United States Patent Application Publication US 2005/0208558 A1 - sequence listing, part 22

SEQ ID NO: 21661 - DNA, 10696 bp, DROSOPHILA
gtgaattattgatgcgtaaacgatgcaaaaatgtttctcaaacttaaaacacttgcttttgctgataatacatatctgcttacttattcatcaagctgagtgagatatatatatcaaacacattatgctcgaccgaataatgacatcccactctgccggtcgccaatagactgaaagcatgagctctgctcacctgctttttttttttggttttttatacctttcgtatattggaagttttgaagatgttcaagatctttgaatgtgtcttaagagaggttttgaccttttttcgcgggaaaaatccgcgtgacgcattcgagtttacaatgcatttgggcaagcaaataactatactggcacttaggtaaataagcagtcgcggaaaagctttgttgagttgtttttgaacttccgcggcgtttccattgacgacgctgctactgcaatcgaccccatatatccaccagatatcggatggtcgctaaacagataagcgctttgattaatgaatgggtctcggagcactaagctttattgttccggggaaatgggggaaatcccaaggcaatgcgtgatgaactcgtgagtgagtgctttagtaagagaaacatatgattagacttggtttttatatgtacaatatttacatgagaatgttgggcaatatgcaagacgaagccttaacgattttaaaataattacttattcttatcaatggccgattatgtgtctaatttgtattcaagtacacaataatctgcaccaactactgataactcaattaataataatgctccgatccacaaacacaattccaagcgagagagagagagcaaagagaggctctgagcaaatgcgatccacaagagagcaagttcaagttcgtttcttgtggcggctaaacaagtttttcgtttttgagagcgcgagtaagcggatatttcgggagaggtctttgggactggggctgggatctatagcttcagttgtctgtccgccgagtggttcaacgcatcgccgatcaagtcccaccgatctgggatcgccccatacgcaacccgtgaaagtttgtggataccagtttcagtggctttgtgtacaatctatatatgtgaaattcagcgaaaatcccaccctaaaataaaagtaataatggctgcaaatgaaaatcaaatttaaaatatatactacgtgcaattgggtgactcattgttaccaaaaaaaaaaaaaaaaacagacgtgtgaattcaataattagcatattggaatggcctcttttgatggcccaatgtggatatttatataattaaatgatgagcttttattttgttgtcttgctatggagagcaagcacacctcacctaggcgttttcttcagtttctaaacttccttttaaattatttgaatacacaaagcattcccaagccgctctctttcgtcccaatctatctgtctttttccgtgcgatcttaaactatgtgagagtgtgcacatacagttgcggacaaagatctaaagtcatacataaaatataaagataattaaagacaaggtcgtctttatatataatgctctattagaagagtaaacacctacaatttttataaatattccattaaaatatagtttaacgtgtttcaagttatgtgaaactatttgaatgtagttgactcttctggagatttttcaaatattttcctttgtcagtgttgagtggcctgtcgctgctattgctttgaccgctgctgtttgtacatgtatattggggttgtgctcggttgcccagtttgttttgctattgcgccatgcacccgatgccgtatacgtcaaaaagagaaatcgccgacccgcttcatgacgcgcagcgtcttaagttatattttcttttagttgggcgtgatgtctgcccttcacttaaatatttcaacaatcatatattgtatgctggatcattgcaaccagttggcagtggcatttggcatgcaatatttccgggctaaaacaaacgactgtttcctctttgttaatttaataaaacccatttctatggcggaatctgcagaatgcggacgacacaaactcccacgcgtttatatgttttttcttgttttcgatttttttgaacacgttgtgcagcagcttttaattaaaatttcatcaccttgtctcagtcctcggacatctggcaggctgccttttaggcggttgattgcgcaatggtttatcaccatcacaaccacgaaagtcggataatacactgcagaaaacaattaacttcctggcggagaagaagcctgctgctgaccatcattgtggtcacagccacagtggtttcactgatttcacaagaaggtaagtgttattaagtgaatattctgtagggcctggttacaactgtaattaagcatacacattatgttggcacccttcacacgtccaactattgtagattatctgtcagattggctatatgagggtatcgggtcaatagtctccgtctatcgcgatgtcgcaacacgttaatgaccacaatattgatgcgtaattggcgcccgaaacaatgcgaatcgctcttgaagtcccacaatggtccaattgtccccgtgggcgagaaaaacaaatgaaattgagctccagtacatttagccttgaccgtgaatgctccaccagattgctgggcgacattttggcgaaggcgtttaatacccggtgtttgaactcttaattcgactaatgggccaggaaatagattgaattttatttgcacttttaataaaaaagcaataaattgggcatagaaatcagagttcaacaacttatttgccaatgttttcggtgcagaaatataaatattgggaatagttttcgcaattcaatatttattttattagtttcgcaactaattgtgatttaaataataatagtgacaaatgaagctttaacaattttattaaatttgtgcttatttttctttcccatgagcggtagcatataataataatacgatacaaatttgcagaaaggtatttgtatttcaaccaattatgtttataaaaaatattctgaatcgattggaattattcgtaatgaagtccgtttcatcttaagtcttctaaattttttcctggtttcctggtaataaatcattggaaatctgtattatttaaaattctccatattaatattgctttcgaactgaaactcacgcacacaactcatcagcatattgtgcaacatttagccgaaacggaacatttctgcgagcatcgtaataaatggcagtcgtgtatttttggatgtggatgggcttacacgcggacagagttaaatccgctcaaaacaatgttccaagacctcagacctgtttggccacgcaatccgcagcgcaaaaacatgctgctcacttaagcggcgccgtcagacacgctgttggccaaaataaagaaaaataagactctcctttagccgttctccgggttacacacgcatataacacacatataaccatgtagccgtatagccatatatcacgtatacgtattcgttacatgtgtgcgcatttgtatctgaaggtcgagcgccagcagaagagatacaagtgcaaacaactcaaccggttatcacgtcacgtcgcttaggtccattgaatgatgcttatggctgacttatggagcgccaagaaatcaactgaatatgcgaatatttcacggacattctcagtggacaatgaaccgattgatattcgctagaaaaactgccaccacaaattttaccccagatgttgcaatctggccctcgcccaaaagggggtagcctttgtctgcacttggctcgcgttcaaagcgattcccaagtgggagacatccgggtcaatagctggcactcgcagtatccgaatgaacttggctgccaactaactgttgggccatggaaatgcgagttaagtcgctgtcttaaccaattaatcgctgtgtcgtcatcggtttcgacgaccgctttgaatggattgaaaaggtgcttgctgtgggattacaaaacaagttaatcgcctcacatgaacactctgcttttaagtgatatcgcgtttctaggaaggggttttctagggaaaattatagttttttgatatattttttttatcatctaaatgtttttacattatattgtatattaaacgggatagttaggaagttaaacatgtgctccacgaactacgttattacttttaagtcagtatcgaggtgatctctaagtttttttatgcaaacaaagtgtgggatcttgttgtacaataatattaaaataaaacactttataaaaccggtactgtaacatcggagaatctggcttatgtacaacaacctgttgttcatgaacatgctataaaacggcatattattaatttttcatgtaaattttcagccgaggcccacaatcagaatgcaccaccgattctatatgttcgcgaacgcaactggcgtatttcggagaccgagaaagttggccagataatcgatagagtgcgggcggaggatccggatggcgatgatctgatatttggcatagaaccgcgattcagtctgcctggtggtgaaaacgatgctagtcctccggagaagataccctttcaaattgatcgagaaacgggagtggtaactctcaatgaaagtttggcaggaagggtaagtcaaatgaatatatatgttatatatctttcaacaggcatttctaatttgattccttataggctggtcagaattttctcatctatataactgtcaccgatggctcctatacggcaaagaatgaggttttcatcaatatcttgggcgagcgggagaatagctccggctatcgaccgcagacatcaatttcgaacgtggtgcacaatatatcgcaattccttccacgttttgaccagctgcccggtgttcaatccatccggaatgggctgccaaacagccgaccaggcggttggtatccaccggtgccccagaacaatatattcggtccgccgccattcggtaacaactacccaccgcctccgccgaatattcccggcgtgcggggagagcagagtggagaagaggagcagccggatgaggaggtgacacccacaacacccgtcagaatcagctccaccacgccgaagagtcgcaccaaactgacgccgataactgccaataattcaacgagagtcgaatccgcaatccccgcggagacaacgacaccgagtggcggccaccataataatagctccagtcccatcacaattttctccctcaagtccggcacaattccgattgtggtcaccgtgggcggattctttgtcgccatcgccgtgcttctggcgtacttgtgccgccgacgcctctgcgccatcagcaggacgctaaagaagaccaaggagaaggaggagctggccaagaagtccaaccaaagccagctgagcagcacgctgaccgacgacagccgcaactcgatggtcatgcagcagtggcaaggacctgtggccttcgccaatcgctatgttccctgggagcgggatcagcagatgggcattgtgagtggaatgcaagcaatataaactaactaatttcagtcactgatatgcggttacttaggtagggtatctcctgttgaatggcctttgggcttttggtagcaatttcattattaatagctaaccaaagaattattcaaaagaagtatgacagagtgctaatagatttaggtcagaccttaatagcatacctcacaaaagctctacagtgaagtaaaacaaaatgtgcagaagcattttatcttgcaaagtaaagagtgcgagtactggcaacgtaatctaaaattcatatttcacagaaggtccatttgaaatgattgcataaaattagtgggcgatgcagaagagcttatgcaaatatcgattgagttttacccgttttgggagtgattggggcttagggcacggagtccctaatcgacagctactccagtgcagatttcaacctcagttggctctcattcaacgcctcctccgcagcagagtggctgtcgtccttttggtcccttggtccctaggtccgtagattttttggccctgtcacccacagtatccacgcaggcaggcagtgtaattgacaggaaaaagtagctgaatgcagctgcatgttggctttgagcccttggagtctgctgggaacgtcctttcattcgattcccatttattgacagcgaatgccaaaacttcagcaggctctcgcgtcatcagcaaaaaactgaaacgcgcgtaaaaattttgacattttgtggtgctgacagctgggctttattttgaaattttgaaatttcagcactttgctataacaatagaatatttgcatccatatagttatttattgcatttttttgggctgtttctaaagttagtactgtcatgttaattgcaaaagctatgatgtcagtatagattctaaagttccgctctgattttatgaaacttaaatgtcaatcaaagtttaacctagattttatgccgtcaccacggttaacgtgacaaccagtaggggatcacaactaatcaaagtgttttttcttgtttttctgaatcctgtacgcgacacaaatgtcaacatcgctcgcatttccgctcacctggacattggacattgcacaactgccatcgatgctgtcgctcaaaggcaacgtcccagttatcaacaggtgtcaccaatggcggagtgtcctcccccggagtgcccagtcccgggacaggtgagccgggttccaacttgggcccgggctgcttgacaggtggagcaggaagttccggcgcaccggaaaacgcttttgccggcgaggccaactgcgaccgctgggaattccccaggtaccgattgaagttcttcaatatcttgggcgaaggagccttcggacaagtttggcgctgcgaggccactaatataaatggtaagtttgagtagaaaacaaaccaaataagttaagatgactatgaaatctaagccgcaatgcaacaattaatatcctttgggatagattagggtcataattcattcctaaatcgattttgatttaatataatagtttatcttgaaaaaggttttgaaaaggtgtatacctcgcttaaattcccattagattcaggcctttagttccacgagatccataatttcaacagagtaatttcatcaatttcgctgtgatgccgaaaggaatttaaaatggagcagattgtgcattcaatcagcggagttccacaaaacgactggcacatgcaatccggcagttgttggcccaaattcaagtgctcaggtggtgcaaaaatgtgcatgtagtagtgggtggatgtccaccacccactcgatataccacattccagagctccacactgagcccttttttatgagcacgtatgtagaatagagtgcaaaacgaaaggcaagtgatttctggatttctataaaggcagaaaaaaagcctgggttcctatgtgatgcaatgcaatggtaaactttaaatattaaatagataacaagtgtatgattttaagaatttaaatatgatacaagcgcctaaggataattatctatttgcaggcaacgagggcattacaaccgtggctgtgaagacgctcaaggaaagtgccaccgaagtggatcgcaaggacctcttatccgaactggaggtgagttggatggctaatcgcataattctggcgaatcagcatttacaatttcctaaatcaaccgtaaagagtatgcaaaacaccgacaaaatcgttacaacatccccagttggctcgatttctcggctgccttttcctctgtcacttttcattcaattggtcgccgtcgcctttcccgcccaaaaagaaaaaaaagaggatgaaaatatcctgacagactcgctaactcgacgactgagtactgaaaactgagaaccgagaactgagaactgaaaactgggaggactgtcggggcaaatcttgtgagttggtttttctggttagatgaaaaagttttgtaaattgaaaattaacgatgctgaaaagtttcgaaagaattcctttcctgttcccgctgctaccagccatatccccttgagttcggatttaatgtttgcctttttaatgaaaacgccaaggagtccacttatgtgtctcactccagaaagtttcaaaatgtttcactacctgctgccaagtttgcaattgcaggtgtatttagttaaattcaggaatataatttggctaagtggttcagtggcaaattctaagaatatctaccttgtttatgctcgacttgaccactgatttcttggccacgtttcgagtagtcactgtaaagtttcatctctctgtttattgtcaaaaagtcctacccattcaagagttttctaatttaaagtttgccactgcctttctccacttttactttgcctgtcatttagttattgtatttgttgttagctaattagctttgttgggcactgtaatctgggtaaaatgctatttagtgaattaaatttaaagcccagtatgacaaatgcaattcggccatggtcacgatgtgggttaaatgccaattcgaatactgtctgccttattgcatattgcatattcatgctcgccaaaaatactgcgacaaaatgattaatttatgcccttgtaagtagcccggtgtcaggcgtgcatatttaatgagctggatccttgtgggcttacatatgcgagcactccgaaaaatcctcacaatccagtcaagcgggattgctgccttaaaagaaaaatatgccatgtcaacatatatcagcatttcgaggctcaaacgcctttgagctgtgtaaatccaaatgcgctgagctgcacaattgtccgcaatcagtgggctaaaatattttcatttcgaatggcgaatcaataaatttgattgtagtggtcggagcgaaggtcctttgttccgtgcgcatttatggtcctttaatggcatcaacactttcagtcatttgcatacttgtgcaaggcaatcaaaggagtgttgtcatggcaattatttgccactatcacatatagatattctcgtatctgaatttcacaatacgattgttaaggccgcaatgatagcgacacaagagctaggaccatttttcgtatcgattagcatttacatactatacttgggtgcattattattacctctggtctcgccggtttggaaaagtcgatggctagctaatgagttcagcatttgggggcactgagtagcattaattcaacgcgcacacaaacacgcaccgcactcatttcgggcgaaactattttgacagcagttgcgggctgtaaacacggaggaaactcccgcagccttgcaaaaagacgacaaaaaaagtcctttgcccggataccaaacacaatccgaactgtgcgctccggcgccttgaaacaaactgattcctgttgctgttcctgccagcaacaaaataatgaagaaaaaaatagaaacaaaaagaaccacagcatcctctcgcctggagggccaccataccacacatactcgtatctctctgaatccgagactgagcatctcgcaggacctccaatccgctcgtcctgcgcagtgcatctttcggagttcgagaccttttgcggcctggccttgccccttgcaatctgactctgactctgttgactccgtgactctgaatctgaatctgaacaggaatctgaggaggaatctgatgccatagagccactctagggttgccgtcgtgtgggtcgcgtccttcatcattaaagtcgcatttggttctcgttctggttttggtcctgcaccggcagccttctgcggcggcagtttatcatgttctgcggattaccccagaaacgagaataattgcactttaattttagaacaatgaaaaattatgaatggccctcggctaggctgcagactcattcctcaagttgcctccgcatttgaaggcgctagagacctggaaaattaccgggctttattgttttttcttttgtttttttgctttcgcgcggcggccttagttgttcaaagtttgaatttgaattggaggggagacggttggttattaactgaaatgaatgacggctacttgggaaatcggatagcccaataaatcagaaggaaagtggcttaataaaacacttattaataggatttctgcctcgttagtaaaacaaacagcttgattgtgtgacatttataaagcaatttgttattcatttttttttttaggtaatgaaatctctggagccacacatcaatgttgttcatttgttgggctgctgcacggacaaggatcccacatttgtgattctggagtacgtgaatcggggaaaactgcaaacgtacctacgcagctcacgcgccgaaaggtaggcaataattcttataaatattaaaaacaaattaatttaatttccatttttataggcactatggaaacactcatggaaagtcaaatgtactaacgtcctgcgacctaacatcctttatgtatcaagtagctaagggcatggactacctaacatctcgaggagtaagttgactaggaaaatctaagtgctatctaatttatatatatgtaattccctatccagattatccatcgtgacttggctgctcgaaatattctcataac

SEQ ID NO: 21662 - DNA, 1964 bp, DROSOPHILA
ccgagtggttcaacgcatcgccgatcaagtcccaccgatctgggatcgccccatacgcaacccgtgaaagtttgtggataccagtttcagtggctttgtgtacaatctatatatgtgaaattcagcgaaaatcccaccctaaaataaaatcctcggacatctggcaggctgccttttaggcggttgattgcgcaatggtttatcaccatcacaaccacgaaagtcggataatacactgcagaaaacaattaacttcctggcggagaagaagcctgctgctgaccatcattgtggtcacagccacagtggtttcactgatttcacaagaagccgaggcccacaatcagaatgcaccaccgattctatatgttcgcgaacgcaactggcgtatttcggagaccgagaaagttggccagataatcgatagagtgcgggcggaggatccggatggcgatgatctgatatttggcatagaaccgcgattcagtctgcctggtggtgaaaacgatgctagtcctccggagaagataccctttcaaattgatcgagaaacgggagtggtaactctcaatgaaagtttggcaggaagggctggtcagaattttctcatctatataactgtcaccgatggctcctatacggcaaagaatgaggttttcatcaatatcttgggcgagcgggagaatagctccggctatcgaccgcagacatcaatttcgaacgtggtgcacaatatatcgcaattccttccacgttttgaccagctgcccggtgttcaatccatccggaatgggctgccaaacagccgaccaggcggttggtatccaccggtgccccagaacaatatattcggtccgccgccattcggtaacaactacccaccgcctccgccgaatattcccggcgtgcggggagagcagagtggagaagaggagcagccggatgaggaggtgacacccacaacacccgtcagaatcagctccaccacgccgaagagtcgcaccaaactgacgccgataactgccaataattcaacgagagtcgaatccgcaatccccgcggagacaacgacaccgagtggcggccaccataataatagctccagtcccatcacaattttctccctcaagtccggcacaattccgattgtggtcaccgtgggcggattctttgtcgccatcgccgtgcttctggcgtacttgtgccgccgacgcctctgcgccatcagcaggacgctaaagaagaccaaggagaaggaggagctggccaagaagtccaaccaaagccagctgagcagcacgctgaccgacgacagccgcaactcgatggtcatgcagcagtggcaaggacctgtggccttcgccaatcgctatgttccctgggagcgggatcagcagatgggcattgcaacgtcccagttatcaacaggtgtcaccaatggcggagtgtcctcccccggagtgcccagtcccgggacaggtgagccgggttccaacttgggcccgggctgcttgacaggtggagcaggaagttccggcgcaccggaaaacgcttttgccggcgaggccaactgcgaccgctgggaattccccaggtaccgattgaagttcttcaatatcttgggcgaaggagccttcggacaagtttggcgctgcgaggccactaatataaatggcaacgagggcattacaaccgtggctgtgaagacgctcaaggaaagtgccaccgaagtggatcgcaaggacctcttatccgaactggagcaacaaaataatgaagaaaaaaatagaaacaaaaagaaccacagcatcctctcgcctggagggccaccataccacacatactcgtatctctctgaatccgagactgagcatctcgcaggacctccaatccgctcgtcctgcgcagtgcatctttcggagttcgagaccttttgcggcctggccttgccccttgcaatctga

SEQ ID NO: 21663 - protein, 589 aa, DROSOPHILA
MVYHHHNHESRIIHCRKQLTSWRRRSLLLTIIVVTATVVSLISQEAEAHNQNAPPILYVRERNWRISETEKVGQIIDRVRAEDPDGDDLIFGIEPRFSLPGGENDASPPEKIPFQIDRETGVVTLNESLAGRAGQNFLIYITVTDGSYTAKNEVFINILGERENSSGYRPQTSISNVVHNISQFLPRFDQLPGVQSIRNGLPNSRPGGWYPPVPQNNIFGPPPFGNNYPPPPPNIPGVRGEQSGEEEQPDEEVTPTTPVRISSTTPKSRTKLTPITANNSTRVESAIPAETTTPSGGHHNNSSSPITIFSLKSGTIPIVVTVGGFFVAIAVLLAYLCRRRLCAISRTLKKTKEKEELAKKSNQSQLSSTLTDDSRNSMVMQQWQGPVAFANRYVPWERDQQMGIATSQLSTGVTNGGVSSPGVPSPGTGEPGSNLGPGCLTGGAGSSGAPENAFAGEANCDRWEFPRYRLKFFNILGEGAFGQVWRCEATNINGNEGITTVAVKTLKESATEVDRKDLLSELEQQNNEEKNRNKKNHSILSPGGPPYHTYSYLSESETEHLAGPPIRSSCAVHLSEFETFCGLALPLAI

SEQ ID NO: 21664 - DNA, 3759 bp, DROSOPHILA
agcggttttacttctgaagaccttatccatttcttctccaactttcacaacaatcggaaacatgttcttcattttgccggacgtaaaagtgggtgtcagtttgtgccgcagatgacgccacttctgaccctcgatgctgaacaaggtggccgacagcggatcatcgatctcgttgtagaagactccccgattctcaaagtgattgaagtccttgatcagcaccctcttgagcaattccatgtcggtgaccacagcagtgcgggtgaaaaagaagaaaaatccagcgaatgggtaatcggagttcttgtacttgaagtaatagtcccgaaagatctcggcaatgtgccgcttatttggccagtccttgatgtttccgaaaagcgggtgtacctcgtcgtgcggtatgccccttctctgccagtatccatgacgtcgtcgggccgcgaagacgagcagtgatagtatcacaacgattagcgccagtaacaacatttcacgtccagagtccaatacaaactgactttaaagtgggatgccacaacgcaagctcattcgcgtatgaggacttcgctcttttcgccaatctctcattttcacacacaaaactcaccgttcaagttctcttaaggtttgttctcaatgtgataaataataattagggaatcatatgcgcagttaaaatggttgtatacacatatatgaacaaacaatctatatacatacaatctctgtatataaacaatctagcgattacgcaatcaaaaaaatataaacaaagcgaattccagtaatttttattgcattctttgcaaacttggtttttgccaacgtaaatgtacaaattaagcatgaaacttggaaaacagatttcattatttaaaatccctggaactggtgaaatgctaagataacgtcagtgacgaaatacaaatatttaatcgaacaaattaagctcaagaagcttgattagatatacagcagttttactgtacctactacgttgattgataaaaacatttgattgtgtatttgtataacagcattgtaaaatgtagatactaaatgttagaatacaatccagatagcgatttaataagcagcactaactactcatttggctaagctgttggacttttaagtaaattccgttggcggggcacagcagaatgttggacttgagaaactcaatttttgggtcagttcgcggacagacgctgaagtgaaagtttcggagcagactgaccaggccaatggtcgtctgcattttgccaaacctcattccaatgcaatttcgcggtccatcgccaaagggcagccatgcggcggtgggtcgctgcgccagttgatcggccagaaagcgctccgggatgaacttatgtggctcgggatatagggcgggatcatgatggatgccgtagaccggtatcagtagcatttgacccggctcgatgtagaaatgacgatcgcccttggctgcgtagagatgcctggagatccgagtgagctgcggtagtatgggatacttccgaagggtttctaaaagatacagtggtaaatggtatcatctttgtaatatttaaaattcgttttgagtcgggctcacctgctatgaccagttccatgtaccgcagctcctgcatggaatcatatgtgaattcaccgttgtgtaaccgcagagcctggtcgatttcctcgcgtagctttgcctgcagtgccggctgcttggccaactcgtacagggcaaatcctagcgttgatgcggatgtgtcgaatcccgccgcaaagaatataaatgcctgggcggccatttcctcgatggtgagctcaccgcgctgcttcatttcgatcagcaggttcatgaagtcgctcctcacgatgccctgctcctccctctgcttcacagtttcccgaacgatgcccacatagaaatccgtaatgtcttgatggatttggcgcatgcgcagaaacctggccacttcggggaaactctctataaatccatcgaccagcttgcagtggcgacgctctgaaaaggctctcctgcccattatggcgaactccgcctcgggattccggaggccgttgcattccacgccaaaggcacaccgtcctatcacgtccgaagtgtagcgagccatcagatcaccgatctcgaggattccacacatggcattatccgccaactcgccacaaacttgagtaagttcctcgcccacctcgcagaccgtcggaaacatatacttcatcttagctgaggtaaaggtgggggacattttctggcgcaagggtcgccacttgggcccgtcaatgcggaatagatgcccagttagaggatcatcccgctcattgtgatacattccccgatcctcaaagttggcgaagtcctgtatgaggatctgtttggccagttccagatctgtgaccaagaccacaggtctcaacatcataaaaaatccggcaaagggtgctccattgcccttgaacttctcatagattggcgttacaatgtcgatgaaatgtttgtttttccgaaatccctccatattccccacgggaaaccgggccggctcactgccaatgccccgccgggtccagtagctatatctcgtccgcacgaaccagaagcccactgccagggcaataagcagtagagccactacatccagcatcctctccccgaatagattcactatgaactgaacactggaccaacgcctctattcgctccgcttacaatcagctgcagtagtgtaaacagacctaggcagataacctcgtctcatagaatttaggcgcactgaaaacaaatcgaactgaagctcggacttgacgagcttttaacggtgattcaagttaatgcaattgatatagtgagagataactgtagaacacccgccttgaagaaaaagtctatgcaatatatgcatttattctctgcttactatatgagcgtaattaaaagtatgataagaattttgcatttcttatctgttttttttctttctttttttatctgatctaatatcagacttattatatagtcttcttgaacttctcgactatcagatacccgttacttggctagaagaaatgaagttaaagaaacaatactaattttcggatcgcccactaccgccacctggtggtatattaattcaattggcaacgcctataaaattaaatagtgcatattgcattaaaactaaataaataaaacacttctaacattaatttcttttttaattagttatactgcaattttaaaggcactttaaaatttaacatttctagtggttggcaacgcggtttaatgcaaaaaataccttaatggtatatttttagtatatttccttaaataaaaattgtataaaatgtataatttccatttcacgtcgacggccacacttttaagtgtaagtcatcaaaaatacatcgcagttgttacgtgagagttttcaaaagctaatttttatatagtagcagtgcttttgtgaaattttttcctcgcaaaagtgtctggcagtgattgtacaaatgtattagcttaaaaaggtatgtttttaaatgttctgcagcgcgaaaaagtaaattgaagtcgaactgataactcgcgtgtgtatgtagtggtaacacaaacgtggctttgtctgggaaaatctccgttaaatcaatttaagcaacgagatagtttcactaaaacgtaaatatttcgtgaaagcgtgaaatgcgatgtacagaaaggaaaaacaagcactttat

SEQ ID NO: 21665 - DNA, 1692 bp, DROSOPHILA
tctgtttacactactgcagctgattgtaagcggagcgaatagaggcgttggtccagtgttcagttcatagtgaatctattcggggagaggatgctggatgtagtggctctactgcttattgccctggcagtgggcttctggttcgtgcggacgagatatagctactggacccggcggggcattggcagtgagccggcccggtttcccgtggggaatatggagggatttcggaaaaacaaacatttcatcgacattgtaacgccaatctatgagaagttcaagggcaatggagcaccctttgccggattttttatgatgttgagacctgtggtcttggtcacagatctggaactggccaaacagatcctcatacaggacttcgccaactttgaggatcggggaatgtatcacaatgagcgggatgatcctctaactgggcatctattccgcattgacgggcccaagtggcgacccttgcgccagaaaatgtcccccacctttacctcagctaagatgaagtatatgtttccgacggtctgcgaggtgggcgaggaacttactcaagtttgtggcgagttggcggataatgccatgtgtggaatcctcgagatcggtgatctgatggctcgctacacttcggacgtgataggacggtgtgcctttggcgtggaatgcaacggcctccggaatcccgaggcggagttcgccataatgggcaggagagccttttcagagcgtcgccactgcaagctggtcgatggatttatagagagtttccccgaagtggccaggtttctgcgcatgcgccaaatccatcaagacattacggatttctatgtgggcatcgttcgggaaactgtgaagcagagggaggagcagggcatcgtgaggagcgacttcatgaacctgctgatcgaaatgaagcagcgcggtgagctcaccatcgaggaaatggccgcccaggcatttatattctttgcggcgggattcgacacatccgcatcaacgctaggatttgccctgtacgagttggccaagcagccggcactgcaggcaaagctacgcgaggaaatcgaccaggctctgcggttacacaacggtgaattcacatatgattccatgcaggagctgcggtacatggaactggtcatagcagaaacccttcggaagtatcccatactaccgcagctcactcggatctccaggcatctctacgcagccaagggcgatcgtcatttctacatcgagccgggtcaaatgctactgataccggtctacggcatccatcatgatcccgccctatatcccgagccacataagttcatcccggagcgctttctggccgatcaactggcgcagcgacccaccgccgcatggctgccctttggcgatggaccgcgaaattgcattggaatgaggtttggcaaaatgcagacgaccattggcctggtcagtctgctccgaaactttcacttcagcgtctgtccgcgaactgacccaaaaattgagtttctcaagtccaacattctgctgtgccccgccaacggaatttacttaaaagtccaacagcttagccaaatgagtagttagtgctgcttattaaatcgctatctggattgtattctaacatttagtatctacattttacaatgctgttatacaaatacacaatcaaatgtttttatcaatcaa

SEQ ID NO: 21666 - protein, 499 aa, DROSOPHILA
MLDVVALLLIALAVGFWFVRTRYSYWTRRGIGSEPARFPVGNMEGFRKNKHFIDIVTPIYEKFKGNGAPFAGFFMMLRPVVLVTDLELAKQILIQDFANFEDRGMYHNERDDPLTGHLFRIDGPKWRPLRQKMSPTFTSAKMKYMFPTVCEVGEELTQVCGELADNAMCGILEIGDLMARYTSDVIGRCAFGVECNGLRNPEAEFAIMGRRAFSERRHCKLVDGFIESFPEVARFLRMRQIHQDITDFYVGIVRETVKQREEQGIVRSDFMNLLIEMKQRGELTIEEMAAQAFIFFAAGFDTSASTLGFALYELAKQPALQAKLREEIDQALRLHNGEFTYDSMQELRYMELVIAETLRKYPILPQLTRISRHLYAAKGDRHFYIEPGQMLLIPVYGIHHDPALYPEPHKFIPERFLADQLAQRPTAAWLPFGDGPRNCIGMRFGKMQTTIGLVSLLRNFHFSVCPRTDPKIEFLKSNILLCPANGIYLKVQQLSQMSS

SEQ ID NO: 21667 - DNA, 3573 bp, DROSOPHILA
ttgggaaatccgaatatcaggaaatccaatagtcctccataacgacgttctatgatcgccctttttccgattgtcacaaactctgcattcgggttttgcaaactattgcaatttaaaccgaaggcgcaattaccgattacgtcagccgtatatcgagccaccagatccacaatttccagaacttgaccttcacctgtggtggttttagcactgaaaatcttctccatttcctccccaaccttcacaataatcggaaacatgttcttcattttgccggacgtaaaagtgggtgtcagtttgtgcctcagatgacgccacttctgaccctcgatgctgaacaaggtggccgacagcggatcatcgatctcattgtagaaaattcctcgattctcaaagtgattgaagtccttgatcagcaccctcttgaccaattccaagtcggtgatgacagcagaccgggtgaaaaagaagtagaacccggcaaacggataaacggaacgtttgtactttgtatagtagtcccggaagatcatcgcaatgtgtcgcttcttgggccagtccttcatgtttccgtatattggatggggcacatcgtgcggaataccccgcctctgccagtatccatgacgtcggcgggccatgaacaaaagcagtgacactagaagtgcgatcaacgttagtaacagcgacatatttcgttctcagtccgctccacactgagttaccaaccggaatgatatggcccctttatacgcgaacgttctcttctaatctcttcaaatgtactcagaagctagttgataaagcgaatattattgctttcggtgtgtgtatgccttattatgtgatgtttgctagcaaatcaaaacattgcctaacacataacacattaaaaaggttagttaaagagggcttaaattcatattaactgagcacagcctaatctaatcgatcacgtaagtgaatcaagcaaaataaagaacacaaataatgtatttgttaaaaacttatttggcgagcttctccactttaaggtggataccattctcggccgatatcagaatgttcttaacgacaatcttcatgggtatttgagtttccggggaaacactgaatttatagcccctgatcaagtaggccaagcccacacaggtttgcatcattccaaaccgcagaccaatgcagttccgcggaccttctccaaatggaagccaagtgcacgagggtctcgccgcgatttcctcgtcggtaaagcgttctggcttgaatatctccggttccggatatatgtccggatcatagtgaatgcccaaagctgggatcacaacaatggttcccttggcaatgaagtattttggatcttcaggcgaaaagtcggtgtcagtcattcttgtaagatgagccagtactgggtactttcgcagcgtttctaaaacaatatttaaataaatgtatcaaataaaaaataagaaggattaaagaaacatacccatcacaacctgctccaggtatttcatctccttgattccctcgtaggtgaactctttgttatgcttgccgaacacattgccaatctcctccctgagtttatcctgaacatcctggttcctggccagctcatatagagcgaatcccatggtcgtggagcttgtctcaaacccagccacaaaaaatatgaaagcctgagcgagaagttcgttaaaggtcaggccatcctccgaatttcccgactgctcattcttatacatctctatcagactgtccatgaaatcatttcgcttttccttcgtccgtagacggtagtcaatggtttccctcacgatcttggtgtaaaagtcctctgcctcctggatatttagtttcagacgtaagcggcgcgataacttgggaaatccaaagaggaatatatccagcatattcccgtagcgatgctcggtgatcgcccgcttgccaattgacacaaattcagcctttggatcgtacaagctgttgcaattgagaccgaatgcgcagttgccgatcacatcggcggtgtaccgtgccaccagatccacaacctccaaaacttgaccccgatccgcagcggttttacttctgaagaccttatccatttcttctccaactttcacaacaatcggaaacatgttcttcattttgccggacgtaaaagtgggtgtcagtttgtgccgcagatgacgccacttctgaccctcgatgctgaacaaggtggccgacagcggatcatcgatctcgttgtagaagactccccgattctcaaagtgattgaagtccttgatcagcaccctcttgagcaattccatgtcggtgaccacagcagtgcgggtgaaaaagaagaaaaatccagcgaatgggtaatcggagttcttgtacttgaagtaatagtcccgaaagatctcggcaatgtgccgcttatttggccagtccttgatgtttccgaaaagcgggtgtacctcgtcgtgcggtatgccccttctctgccagtatccatgacgtcgtcgggccgcgaagacgagcagtgatagtatcacaacgattagcgccagtaacaacatttcacgtccagagtccaatacaaactgactttaaagtgggatgccacaacgcaagctcattcgcgtatgaggacttcgctcttttcgccaatctctcattttcacacacaaaactcaccgttcaagttctcttaaggtttgttctcaatgtgataaataataattagggaatcatatgcgcagttaaaatggttgtatacacatatatgaacaaacaatctatatacatacaatctctgtatataaacaatctagcgattacgcaatcaaaaaaatataaacaaagcgaattccagtaatttttattgcattctttgcaaacttggtttttgccaacgtaaatgtacaaattaagcatgaaacttggaaaacagatttcattatttaaaatccctggaactggtgaaatgctaagataacgtcagtgacgaaatacaaatatttaatcgaacaaattaagctcaagaagcttgattagatatacagcagttttactgtacctactacgttgattgataaaaacatttgattgtgtatttgtataacagcattgtaaaatgtagatactaaatgttagaatacaatccagatagcgatttaataagcagcactaactactcatttggctaagctgttggacttttaagtaaattccgttggcggggcacagcagaatgttggacttgagaaactcaatttttgggtcagttcgcggacagacgctgaagtgaaagtttcggagcagactgaccaggccaatggtcgtctgcattttgccaaacctcattccaatgcaatttcgcggtccatcgccaaagggcagccatgcggcggtgggtcgctgcgccagttgatcggccagaaagcgctccgggatgaacttatgtggctcgggatatagggcgggatcatgatggatgccgtagaccggtatcagtagcatttgacccggctcgatgtagaaatgacgatcgcccttggctgcgtagagatgcctgga

SEQ ID NO: 21668 - DNA, 1513 bp, DROSOPHILA
atgttgttactggcgctaatcgttgtgatactatcactgctcgtcttcgcggcccgacgacgtcatggatactggcagagaaggggcataccgcacgacgaggtacacccgcttttcggaaacatcaaggactggccaaataagcggcacattgccgagatctttcgggactattacttcaagtacaagaactccgattacccattcgctggatttttcttctttttcacccgcactgctgtggtcaccgacatggaattgctcaagagggtgctgatcaaggacttcaatcactttgagaatcggggagtcttctacaacgagatcgatgatccgctgtcggccaccttgttcagcatcgagggtcagaagtggcgtcatctgcggcacaaactgacacccacttttacgtccggcaaaatgaagaacatgtttccgattgttgtgaaagttggagaagaaatggataaggtcttcagaagtaaaaccgctgcggatcggggtcaagttttggaggttgtggatctggtggcacggtacaccgccgatgtgatcggcaactgcgcattcggtctcaattgcaacagcttgtacgatccaaaggctgaatttgtgtcaattggcaagcgggcgatcaccgagcatcgctacgggaatatgctggatatattcctctttggatttcccaagttatcgcgccgcttacgtctgaaactaaatatccaggaggcagaggacttttacaccaagatcgtgagggaaaccattgactaccgtctacggacgaaggaaaagcgaaatgatttcatggacagtctgatagagatgtataagaatgagcagtcgggaaattcggaggatggcctgacctttaacgaacttctcgctcaggctttcatattttttgtggctgggtttgagacaagctccacgaccatgggattcgctctatatgagctggccaggaaccaggatgttcaggataaactcagggaggagattggcaatgtgttcggcaagcataacaaagagttcacctacgagggaatcaaggagatgaaatacctggagcaggttgtgatggaaacgctgcgaaagtacccagtactggctcatcttacaagaatgactgacaccgacttttcgcctgaagatccaaaatacttcattgccaagggaaccattgttgtgatcccagctttgggcattcactatgatccggacatatatccggaaccggagatattcaagccagaacgctttaccgacgaggaaatcgcggcgagaccctcgtgcacttggcttccatttggagaaggtccgcggaactgcattggtctgcggtttggaatgatgcaaacctgtgtgggcttggcctacttgatcaggggctataaattcagtgtttccccggaaactcaaatacccatgaagattgtcgttaagaacattctgatatcggccgagaatggtatccaccttaaagtggagaagctcgccaaataagttttta

SEQ ID NO: 21669 - protein, 501 aa, DROSOPHILA
MLLLALIVVILSLLVFAARRRHGYWQRRGIPHDEVHPLFGNIKDWPNKRHIAEIFRDYYFKYKNSDYPFAGFFFFFTRTAVVTDMELLKRVLIKDFNHFENRGVFYNEIDDPLSATLFSIEGQKWRHLRHKLTPTFTSGKMKNMFPIVVKVGEEMDKVFRSKTAADRGQVLEVVDLVARYTADVIGNCAFGLNCNSLYDPKAEFVSIGKRAITEHRYGNMLDIFLFGFPKLSRRLRLKLNIQEAEDFYTKIVRETIDYRLRTKEKRNDFMDSLIEMYKNEQSGNSEDGLTFNELLAQAFIFFVAGFETSSTTMGFALYELARNQDVQDKLREEIGNVFGKHNKEFTYEGIKEMKYLEQVVMETLRKYPVLAHLTRMTDTDFSPEDPKYFIAKGTIVVIPALGIHYDPDIYPEPEIFKPERFTDEEIAARPSCTWLPFGEGPRNCIGLRFGMMQTCVGLAYLIRGYKFSVSPETQIPMKIVVKNILISAENGIHLKVEKLAK

SEQ ID NO: 21670 - DNA, 3540 bp, DROSOPHILA
gctgagtagcccatttggacgaactccgccttaggatcccgcagactattgcatttcaggccaaaagcacagattccaattacgtcggatgtgaagcgtgacacaatgtcggtgacttccagggtctgcgaagaactggagatcttttcatcgaccacgcgaatcatctcatcgcccacgtttaagaccgtggaaaacatgctcttcattttggctgacgtaaatgtgtgggtcagcttctgtcgcagatttttccacttttgaccctcgatggttgccaggttattggtcagcggatcatccttttcgttgtgatacactccgcgatcgtgaaacttatcgaagtcgcgaattagcacggtttttacaaaatccacgtccgtgatgacaatgtacttcatagcatagaggtagaagcccgcaaaaggtccgtcggtctgtttcctgaatttcagatatgttcgcttgaggatgccggccagcggcattgttctccaaagttcgccggtattgccgagcggaatattgggtggatcatggggaattcctcgccgtttccagtaggtgtagttctggagcacccaccaagcgacgagcgtaaggacaccgaccaccaaaccgagcaggatcgccattttgagcagactgatttgagaaaccaattccaagcgttgcttttatgaagaagagctttccatctagctatcgcctgctcctcttttttagtcgtaaccaagaaaatttaactgttcacttccagatagaggtgctaatagcaaaaaagctgaacaaaaatttattgagggtattaccacaaatatttacaataaatttacaacaacaaactaacaaggcttaatttgaatgctatactctcatatactgaatatgagctttaagagggatttaattcaaaaaaatcatatatagccgtgaataaatgaccaaataaaattgtaatatttaaccattaaagcccataataattttgtttatagtctcatttggaaagcttctcaactttaaggtgaatgccattctcagcagacagaagaatgcttttcacgacaaacttcatgggaatttgtgtttctgtggacacactgaacttatagcctcggattagataggccaatcccacgcaggcctgcatcagtccaaaccgaagaccgatgcagttccggggaccttctccaaacggcagccaggtgcacgagggtctcgcggcgatcgcctcatccgtaaatcgctccggcttgaacttctccggttcgggatagatttccggatcatagtgaataccaagagctgggatcacaacagtggttcccttggcaataaagtatttaggatcttcaggcgaaaaatctgtctgggtcattcgcgttagatgcgccagaactggatacttgcgaagggtttctgtggcgtaaaatgggaaaaggccctttaggtaaagttatgcaacctcttgggattttacttacccatgacgacctgctccagatacttcatctctttgattccctcgtaggtaaactcgttgttgtgtttgctcagaacattgttgatctccgccctaagttgatcctgaatatcctgatcgagggcgagctcgtacagggcaaatcccatggtcgtcgagctggtctcgaagccagccacaaagaaaataaaggcctgtgccaagatctcgttgaaggacaggccatcctcagtgtttccggcctgctccttctcgtacatttcgattaaactgtccatgaagtcgtgacgcttctcgttggtcctcaatcggtagtcgatagtattcctaacaatgctagtgtaaaagtcctcaacatcctgcacgtttagtttaagccgcaggcggcgggaaagtttgggaaatccgaatatcaggaaatccaatagtcctccataacgacgttctatgatcgccctttttccgattgtcacaaactctgcattcgggttttgcaaactattgcaatttaaaccgaaggcgcaattaccgattacgtcagccgtatatcgagccaccagatccacaatttccagaacttgaccttcacctgtggtggttttagcactgaaaatcttctccatttcctccccaaccttcacaataatcggaaacatgttcttcattttgccggacgtaaaagtgggtgtcagtttgtgcctcagatgacgccacttctgaccctcgatgctgaacaaggtggccgacagcggatcatcgatctcattgtagaaaattcctcgattctcaaagtgattgaagtccttgatcagcaccctcttgaccaattccaagtcggtgatgacagcagaccgggtgaaaaagaagtagaacccggcaaacggataaacggaacgtttgtactttgtatagtagtcccggaagatcatcgcaatgtgtcgcttcttgggccagtccttcatgtttccgtatattggatggggcacatcgtgcggaataccccgcctctgccagtatccatgacgtcggcgggccatgaacaaaagcagtgacactagaagtgcgatcaacgttagtaacagcgacatatttcgttctcagtccgctccacactgagttaccaaccggaatgatatggcccctttatacgcgaacgttctcttctaatctcttcaaatgtactcagaagctagttgataaagcgaatattattgctttcggtgtgtgtatgccttattatgtgatgtttgctagcaaatcaaaacattgcctaacacataacacattaaaaaggttagttaaagagggcttaaattcatattaactgagcacagcctaatctaatcgatcacgtaagtgaatcaagcaaaataaagaacacaaataatgtatttgttaaaaacttatttggcgagcttctccactttaaggtggataccattctcggccgatatcagaatgttcttaacgacaatcttcatgggtatttgagtttccggggaaacactgaatttatagcccctgatcaagtaggccaagcccacacaggtttgcatcattccaaaccgcagaccaatgcagttccgcggaccttctccaaatggaagccaagtgcacgagggtctcgccgcgatttcctcgtcggtaaagcgttctggcttgaatatctccggttccggatatatgtccggatcatagtgaatgcccaaagctgggatcacaacaatggttcccttggcaatgaagtattttggatcttcaggcgaaaagtcggtgtcagtcattcttgtaagatgagccagtactgggtactttcgcagcgtttctaaaacaatatttaaataaatgtatcaaataaaaaataagaaggattaaagaaacatacccatcacaacctgctccaggtatttcatctccttgattccctcgtaggtgaactctttgttatgcttgccgaacacattgccaatctcctccctgagtttatcctgaacatcctggttcctggccagctcatatagagcgaatcccatggtcgtggagcttgtctcaaa

SEQ ID NO: 21671 - DNA, 1475 bp, DROSOPHILA
tgtcactgcttttgttcatggcccgccgacgtcatggatactggcagaggcggggtattccgcacgatgtgccccatccaatatacggaaacatgaaggactggcccaagaagcgacacattgcgatgatcttccgggactactatacaaagtacaaacgttccgtttatccgtttgccgggttctacttctttttcacccggtctgctgtcatcaccgacttggaattggtcaagagggtgctgatcaaggacttcaatcactttgagaatcgaggaattttctacaatgagatcgatgatccgctgtcggccaccttgttcagcatcgagggtcagaagtggcgtcatctgaggcacaaactgacacccacttttacgtccggcaaaatgaagaacatgtttccgattattgtgaaggttggggaggaaatggagaagattttcagtgctaaaaccaccacaggtgaaggtcaagttctggaaattgtggatctggtggctcgatatacggctgacgtaatcggtaattgcgccttcggtttaaattgcaatagtttgcaaaacccgaatgcagagtttgtgacaatcggaaaaagggcgatcatagaacgtcgttatggaggactattggatttcctgatattcggatttcccaaactttcccgccgcctgcggcttaaactaaacgtgcaggatgttgaggacttttacactagcattgttaggaatactatcgactaccgattgaggaccaacgagaagcgtcacgacttcatggacagtttaatcgaaatgtacgagaaggagcaggccggaaacactgaggatggcctgtccttcaacgagatcttggcacaggcctttattttctttgtggctggcttcgagaccagctcgacgaccatgggatttgccctgtacgagctcgccctcgatcaggatattcaggatcaacttagggcggagatcaacaatgttctgagcaaacacaacaacgagtttacctacgagggaatcaaagagatgaagtatctggagcaggtcgtcatggaaacccttcgcaagtatccagttctggcgcatctaacgcgaatgacccagacagatttttcgcctgaagatcctaaatactttattgccaagggaaccactgttgtgatcccagctcttggtattcactatgatccggaaatctatcccgaaccggagaagttcaagccggagcgatttacggatgaggcgatcgccgcgagaccctcgtgcacctggctgccgtttggagaaggtccccggaactgcatcggtcttcggtttggactgatgcaggcctgcgtgggattggcctatctaatccgaggctataagttcagtgtgtccacagaaacacaaattcccatgaagtttgtcgtgaaaagcattcttctgtctgctgagaatggcattcaccttaaagttgagaagctttccaaatga

SEQ ID NO: 21672 - protein, 485 aa, DROSOPHILA
MARRRHGYWQRRGIPHDVPHPIYGNMKDWPKKRHIAMIFRDYYTKYKRSVYPFAGFYFFFTRSAVITDLELVKRVLIKDFNHFENRGIFYNEIDDPLSATLFSIEGQKWRHLRHKLTPTFTSGKMKNMFPIIVKVGEEMEKIFSAKTTTGEGQVLEIVDLVARYTADVIGNCAFGLNCNSLQNPNAEFVTIGKRAIIERRYGGLLDFLIFGFPKLSRRLRLKLNVQDVEDFYTSIVRNTIDYRLRTNEKRHDFMDSLIEMYEKEQAGNTEDGLSFNEILAQAFIFFVAGFETSSTTMGFALYELALDQDIQDQLRAEINNVLSKHNNEFTYEGIKEMKYLEQVVMETLRKYPVLAHLTRMTQTDFSPEDPKYFIAKGTTVVIPALGIHYDPEIYPEPEKFKPERFTDEAIAARPSCTWLPFGEGPRNCIGLRFGLMQACVGLAYLIRGYKFSVSTETQIPMKFVVKSILLSAENGIHLKVEKLSK

SEQ ID NO: 21673 - DNA, 3953 bp, DROSOPHILA
gcattgagtgcagtagtcttaaggatccagaggcagagttcagggtaatgggtcgtcgagccatcttcgaacaacgccacggaccgatcgggatcgcgttcatcaatagcttccaaaatctggcacgcagactgcacatgaaaataacactagaagaagccgaacacttcttcctccggatcgtcagggaaacagtcgcatttagggagaagaacaacatccgtcgcaacgactttatggatcagctcatcgatttaaagaacagtccactgacaaagtccgaatctggggaaagtgttaaccttacgatcgaggaaatggccgcccaggcgttcgtgtttttcggagctggcttcgaaacctcgtcgaccaccatgggattcgcactgtatgaactggcccagcatcaggacattcaggaccgggtgaggaaggagtgtcaggaggttattggaaagtacaacggagagataacttacgaaagtatgaaggacatggtctatctagatcaggttatatcgggtatgtaatgtgctcgtcttctccgtcctttctaacttttggtttttttttagaaacccttcgcttgtacaccgttctcccggtcttgaatcgcgaatgcctggaggactatgaggttcctggacatcccaaatacgtcatcaaaaagggaatgcccgttttgattccgtgtggagccatgcaccgcgatgagaaactgtatgccaatccaaacacctttaacccagacaacttctcgcccgaacgagtgaaggaacgcgactccgtggagtggcttccattcggcgatggtcccaggaactgcatcggaatgcggtttggtcaaatgcaggccagaagtggattggctttactaatcaataggttcaagttctccgtttgcgaacaaacaacaataccaattgtatacagcaaaaaaacattcttaatatcaagcgagactggcatcttcttaaaagttgaacgcgtttaaaaatttcaatatttaatctattagtccctattttatatggaattccagaaacaatgttgctctatatctataagaatgttaagcttattagtgtctaatcgcagtagcatgcttgtggataactaactactgtaagttggctttcattttatggttttaaaaaattgtttttttattttctgggtgatatattgccttttaaaggcttcttattattgcataattattacaagactcttttgcagaaaaaatactttcggcatttcttggcagaagcaatctatgaacataacatttttaagaagttaagatattttaaaatcattacaaaaacattttaaaaatcacgtactcaaagtaactaacaacgaaattaaataaatatataacactttagtctctcactaccttggtgatattgagatggattccgccctcggagcccagcaaaaggttattgattgtgtatttcattggcactggcgtcttgggatgcaattcgaacctaaaattgtggattagcagggccaatccaatgatgacctgcatccgtccgaatcggagtccaatgcaatttcggggaccagctccgaagggtaggaaagcgcaggtgggacgcttctttacttgctcttcatcgaatcgttctgggataaacttttccggctccggataaaactcaggatcatgatggatgcccagggtggacaccagcactccagtgccggcctctatgaaatacttgggattactgtgctggtacggtttggtggcaatgcgagccaagtgggctaccactggatgtttccttagcgattctaagcagataacatatacagtttagaatgaaaaaataaactataataacttaccattgataaccttttccatataaaacaagtcctgcatagaatcgtattccagtttaccattgtacctttccagcacactgtcgatttcagccctcaacttgtcctgaacatcctgattgcaggccagctcataaagtgtgaatcccatggttgtggatcccgcctcaaaaccagctaggaaaaatacgaaggcctgggcagcgacctcattgaaggcaagtccattttccttgtcgcctttatcatactgctgtttcatgtcaatcaacgtgtccatgaaatcgttccgagtcacctttctcttcatcctgtaatctatggtgtcctgcacgattttcatatagaacttctgcaccgagggaagcaagaactggaaacccagtttcacggccagtttaggcatcccgaagattagtagatctaccagccaaccatgacgacgttctcttagcgctgagtagcccatttggacgaactccgccttaggatcccgcagactattgcatttcaggccaaaagcacagattccaattacgtcggatgtgaagcgtgacacaatgtcggtgacttccagggtctgcgaagaactggagatcttttcatcgaccacgcgaatcatctcatcgcccacgtttaagaccgtggaaaacatgctcttcattttggctgacgtaaatgtgtgggtcagcttctgtcgcagatttttccacttttgaccctcgatggttgccaggttattggtcagcggatcatccttttcgttgtgatacactccgcgatcgtgaaacttatcgaagtcgcgaattagcacggtttttacaaaatccacgtccgtgatgacaatgtacttcatagcatagaggtagaagcccgcaaaaggtccgtcggtctgtttcctgaatttcagatatgttcgcttgaggatgccggccagcggcattgttctccaaagttcgccggtattgccgagcggaatattgggtggatcatggggaattcctcgccgtttccagtaggtgtagttctggagcacccaccaagcgacgagcgtaaggacaccgaccaccaaaccgagcaggatcgccattttgagcagactgatttgagaaaccaattccaagcgttgcttttatgaagaagagctttccatctagctatcgcctgctcctcttttttagtcgtaaccaagaaaatttaactgttcacttccagatagaggtgctaatagcaaaaaagctgaacaaaaatttattgagggtattaccacaaatatttacaataaatttacaacaacaaactaacaaggcttaatttgaatgctatactctcatatactgaatatgagctttaagagggatttaattcaaaaaaatcatatatagccgtgaataaatgaccaaataaaattgtaatatttaaccattaaagcccataataattttgtttatagtctcatttggaaagcttctcaactttaaggtgaatgccattctcagcagacagaagaatgcttttcacgacaaacttcatgggaatttgtgtttctgtggacacactgaacttatagcctcggattagataggccaatcccacgcaggcctgcatcagtccaaaccgaagaccgatgcagttccggggaccttctccaaacggcagccaggtgcacgagggtctcgcggcgatcgcctcatccgtaaatcgctccggcttgaacttctccggttcgggatagatttccggatcatagtgaataccaagagctgggatcacaacagtggttcccttggcaataaagtatttaggatcttcaggcgaaaaatctgtctgggtcattcgcgttagatgcgccagaactggatacttgcgaagggtttctgtggcgtaaaatgggaaaaggccctttaggtaaagttatgcaacctcttgggattttacttacccatgacgacctgctccagatacttcatctctttgattccctcgtaggtaaactcgttgttgtgtttgctcagaacattgttgatctccgccctaagttgatcctgaatatcctgatcgagggcgagctcgtacagggcaaatcccat

SEQ ID NO: 21674 - DNA, 1899 bp, DROSOPHILA
atggcgatcctgctcggtttggtggtcggtgtccttacgctcgtcgcttggtgggtgctccagaactacacctactggaaacggcgaggaattccccatgatccacccaatattccgctcggcaataccggcgaactttggagaacaatgccgctggccggcatcctcaagcgaacatatctgaaattcaggaaacagaccgacggaccttttgcgggcttctacctctatgctatgaagtacattgtcatcacggacgtggattttgtaaaaaccgtgctaattcgcgacttcgataagtttcacgatcgcggagtgtatcacaacgaaaaggatgatccgctgaccaataacctggcaaccatcgagggtcaaaagtggaaaaatctgcgacagaagctgacccacacatttacgtcagccaaaatgaagagcatgttttccacggtcttaaacgtgggcgatgagatgattcgcgtggtcgatgaaaagatctccagttcttcgcagaccctggaagtcaccgacattgtgtcacgcttcacatccgacgtaattggaatctgtgcttttggcctgaaatgcaatagtctgcgggatcctaaggcggagttcgtccaaatgggctactcagcgctaagagaacgtcgtcatggttggctggtagatctactaatcttcgggatgcctaaactggccgtgaaactgggtttccagttcttgcttccctcggtgcagaagttctatatgaaaatcgtgcaggacaccatagattacaggatgaagagaaaggtgactcggaacgatttcatggacacgttgattgacatgaaacagcagtatgataaaggcgacaaggaaaatggacttgccttcaatgaggtcgctgcccaggccttcgtatttttcctagctggttttgaggcgggatccacaaccatgggattcacactttatgagctggcctgcaatcaggatgttcaggacaagttgagggctgaaatcgacagtgtgctggaaaggtacaatggtaaactggaatacgattctatgcaggacttgttttatatggaaaaggttatcaatgaatcgctaaggaaacatccagtggtagcccacttggctcgcattgccaccaaaccgtaccagcacagtaatcccaagtatttcatagaggccggcactggagtgctggtgtccaccctgggcatccatcatgatcctgagttttatccggagccggaaaagtttatcccagaacgattcgatgaagagcaagtaaagaagcgtcccacctgcgctttcctacccttcggagctggtccccgaaattgcattggactccgattcggacggatgcaggtcatcattggattggccctgctaatccacaattttaggttcgaattgcatcccaagacgccagtgccaatgaaatacacaatcaataaccttttgctgggctccgagggcggaatccatctcaatatcaccaaggtagtgagagactaaagtgttatatatttatttaatttcgttgttagttactttgagtacgtgatttttaaaatgtttttgtaatgattttaaaatatcttaacttcttaaaaatgttatgttcatagattgcttctgccaagaaatgccgaaagtattttttctgcaaaagagtcttgtaataattatgcaataataagaagcctttaaaaggcaatatatcacccagaaaataaaaaaacaattttttaaaaccataaaatgaaagccaacttacagtagttagttatccacaagcatgctactgcgattagacactaataagcttaacattcttatagatatagagcaacattgtttctggaattccatataaaatagggactaatagattaaatattg

SEQ ID NO: 21675 - protein, 503 aa, DROSOPHILA
MAILLGLVVGVLTLVAWWVLQNYTYWKRRGIPHDPPNIPLGNTGELWRTMPLAGILKRTYLKFRKQTDGPFAGFYLYAMKYIVITDVDFVKTVLIRDFDKFHDRGVYHNEKDDPLTNNLATIEGQKWKNLRQKLTHTFTSAKMKSMFSTVLNVGDEMIRVVDEKISSSSQTLEVTDIVSRFTSDVIGICAFGLKCNSLRDPKAEFVQMGYSALRERRHGWLVDLLIFGMPKLAVKLGFQFLLPSVQKFYMKIVQDTIDYRMKRKVTRNDFMDTLIDMKQQYDKGDKENGLAFNEVAAQAFVFFLAGFEAGSTTMGFTLYELACNQDVQDKLRAEIDSVLERYNGKLEYDSMQDLFYMEKVINESLRKHPVVAHLARIATKPYQHSNPKYFIEAGTGVLVSTLGIHHDPEFYPEPEKFIPERFDEEQVKKRPTCAFLPFGAGPRNCIGLRFGRMQVIIGLALLIHNFRFELHPKTPVPMKYTINNLLLGSEGGIHLNITKVVRD

SEQ ID NO: 21676 - DNA, 3626 bp, DROSOPHILA
gcaaatgaagagtagaaaaatgtgatccagatgtgaaatgctgactgactactgcattacaaatagttcggaaaatgttctctcgattttacttaaatcttctactaagttgcgttattatttttcaaactttaacttaatcgtaacatttgatatccagtgtgtggctcaaatttcatgtgtatgctattagataccatcagcatcatttcattcaatgaatgaataaagagcaagtcatcgttattcgtcgcttttggtaggttcagcatgactgagctgagcttaactggcttgtgcaataagggtaagaaagaactcaaataaacatttaaaatttagagtttttgatatctatcgccttttgcacggcccattagtaattaaatattgtttgcataatgatagcattgatatatgtattttcagcctaggcaacgtaattgacgggttattttattttaccttcaacgtagatagcaagttgaacaagcttaagttactatttaaagcgtcacattttttctctatttgttaaaaattaaaaaaaaaaccttagatctcatgggaaagcttttggatgaagtgtaatgcttgttgcattgcaattatatgtagtatataaagctctccaagtttgatctgctttcttttacccgtgtaattaaaagttctccaaatttagctatacatccagtacaaaagaccttgatcatttcagttgtaaatttatttaataaatatgtcattgttacgattcaaaacatttcttttgaaaccttaaactaagctacatcaaatatacaaactagttcacatattaaaaaacgtatacacattatacactgtaggtgatgtaaaaggtataattaactgcatgtgaaaaactatcataaagctttaatttaaaattattcaattcaatccagtattagtattggtatttacgtcgcaagaacaaagctttaaccgaataattcatgaattatctttataactttcacactctagtgacttttaggtgaattccgcccttcgagctcagtagaaaatcatcggtcctatattctaagggaacgacagttttggtggggtgaaactcaaacttaaagttgtggattaacaaggccatgccaactatgacctgcatccgaccaaatcgaagaccgatgcagttcctaggaccatcaccaaagggcaggaaagtgcaggcaggacgctgttgcacctgatcctcatcaaaacgctctggaataaacttctcgggctctggataaaactctggatcgtgatgtatggccagtgtgggtacgatcactccagttcctttttcaatgttatatttcggattggtgtgctggtagtgttgagttgcaacgcggattaagtgaccgacgacaggacgcttcctcatggtctctgtaaaaagaatggaagtaatttgaagaagatataatctggggtaatgacaggcaatccgcgtagtagacgaatcccaccgagagtgggctctaaatacgtggcttcaaataaactgtgaaacttaccatcaatgaccttttccaaataagtcatctctcgcatgctgtcgtaatccaatttcccattatgttgtttcaggaccgtatttatttcggttctaagtttatcctgaatatcctgatggcaggccagctcataaagagcaaatcccattgtggtcgaactggtctcaaacccagccaagaagaatatgaacgcctgggcagcgatttcattaaaggtcagcccattttccttgtcgccattatcgaatttcaatttcatttcaatcaacatatccacgaaatcgtgtctcttcacattgttcttcacgcgataatcaacagtgtcccggatgatgttcatgtaaaagtcctcgacctcttggacagtcgccttcatgcgcagcttagcggccagttcgggggctccgaacagaagtagatccatggacttgccatggcgccgctctgtgattgcggtcgttcccatttggacaaacttcgccttgggatccgacaaactatgacaatccaagccgaaggcgcaacttccgatgacatcggcggtgaaacgggcaaccacatttgtgatctccatggaatcgctatcagcactagctgtttctccaaaaacccgaattagttcatctcccacggtcaggatagtgggaaacatggtcttcatcttgccagaggtaaaagtgggcgtaagtttctggcgcagtgttttccatttctgaccatcgatattcactaggttggcggacagtggatcgtcgcgttcgttatgaaatactccgcgatcgtgaaacttatcaaactcgcgaatcagtacggtcttagcgaaatcaatatcggttacaactaccatcctcttgaagtacatataaaaacccacaaatggtccgtcagtcttgttcttaacttgttgtaggttctcttgaaaatatccgcaaaatggacggttttcattaactcgctggtattaccgtacggaattttcggctcatcgtggggaatgccccggcgcttccagtagttaaaatgctggtgcacataccacgcgacgaaggtgataacaccgatcagcaatacgatcataacagccatttcggaacaactgaaaatcttagcggcgacatcggccttttatacccgacattcatcagtcatctgactctgtttccggcatttttaaagagaaagaaagtctattcaatgtcgcgttatgtaaacttgaattttgctattaaactacatcaatatatgctcttaagtaagagtatttggtagctttagtttttaaccaagttgcattgcagctggtgggcattttaatatttctatttattaaaaagacagagttgatggtaaaaaagaagatattcgtatgttgtcataataaaaatgcgagtcatcgttactagcgcacatcttgtttgccttggaaacggaaattctgcttaatgtaactttctgggaatcatcaaatatttcttttttcgtgaaatattttttttaatggaatatttattttaatattttagcagatattaatgaactttttctatcaatttcaaccaaaatcatacccatttttgaaataagttgaggtaggtaaggtatttaatcgtaaaccatatgactgttaaatataaactctttaaaagagaaattctgagctgtaaaattagcaaataaagaggcaaacagtatcaacaatacaaaattgtttgctttgaatacaaaacaaatgcgaaactgatattctctcatctcatctaattcctctctctttttggctagctgtgcgagctttttgattgcaataggtttatgaagctcaactggagtacatttgcgatctatttttcgacggcataactacatatatcaccgcacccaagctgatgtcataggtgtttacagtgttctactggcaattgtggtggtgctagtgggatatctattactgaaatggcgtcgtgcccttcactactggcagaatttggatattccttgcgaggaaccccacatcctgatgggcagcctgacgggagtgcagaccagtcgatcatttagtgccatctggatggattacta

SEQ ID NO: 21677 - DNA, 1498 bp, DROSOPHILA
ttatgatcgtattgctgatcggtgttatcaccttcgtcgcgtggtatgtgcaccagcattttaactactggaagcgccggggcattccccacgatgagccgaaaattccgtacggtaataccagcgagttaatgaaaaccgtccattttgcggatattttcaagagaacctacaacaagttaagaacaagactgacggaccatttgtgggtttttatatgtacttcaagaggatggtagttgtaaccgatattgatttcgctaagaccgtactgattcgcgagtttgataagtttcacgatcgcggagtatttcataacgaacgcgacgatccactgtccgccaacctagtgaatatcgatggtcagaaatggaaaacactgcgccagaaacttacgcccacttttacctctggcaagatgaagaccatgtttcccactatcctgaccgtgggagatgaactaattcgggtttttggagaaacagctagtgctgatagcgattccatggagatcacaaatgtggttgcccgtttcaccgccgatgtcatcggaagttgcgccttcggcttggattgtcatagtttgtcggatcccaaggcgaagtttgtccaaatgggaacgaccgcaatcacagagcggcgccatggcaagtccatggatctacttctgttcggagcccccgaactggccgctaagctgcgcatgaaggcgactgtccaagaggtcgaggacttttacatgaacatcatccgggacactgttgattatcgcgtgaagaacaatgtgaagagacacgatttcgtggatatgttgattgaaatgaaattgaaattcgataatggcgacaaggaaaatgggctgacctttaatgaaatcgctgcccaggcgttcatattcttcttggctgggtttgagaccagttcgaccacaatgggatttgctctttatgagctggcctgccatcaggatattcaggataaacttagaaccgaaataaatacggtcctgaaacaacataatgggaaattggattacgacagcatgcgagagatgacttatttggaaaaggtcattgatgagaccatgaggaagcgtcctgtcgtcggtcacttaatccgcgttgcaactcaacactaccagcacaccaatccgaaatataacattgaaaaaggaactggagtgatcgtacccacactggccatacatcacgatccagagttttatccagagcccgagaagtttattccagagcgttttgatgaggatcaggtgcaacagcgtcctgcctgcactttcctgccctttggtgatggtcctaggaactgcatcggtcttcgatttggtcggatgcaggtcatagttggcatggccttgttaatccacaactttaagtttgagtttcaccccaccaaaactgtcgttcccttagaatataggaccgatgattttctactgagctcgaagggcggaattcacctaaaagtcactagagtgtga

SEQ ID NO: 21678 - protein, 426 aa, DROSOPHILA
MYFKRMVVVTDIDFAKTVLIREFDKFHDRGVFHNERDDPLSANLVNIDGQKWKTLRQKLTPTFTSGKMKTMFPTILTVGDELIRVFGETASADSDSMEITNVVARFTADVIGSCAFGLDCHSLSDPKAKFVQMGTTAITERRHGKSMDLLLFGAPELAAKLRMKATVQEVEDFYMNIIRDTVDYRVKNNVKRHDFVDMLIEMKLKFDNGDKENGLTFNEIAAQAFIFFLAGFETSSTTMGFALYELACHQDIQDKLRTEINTVLKQHNGKLDYDSMREMTYLEKVIDETMRKRPVVGHLIRVATQHYQHTNPKYNIEKGTGVIVPTLAIHHDPEFYPEPEKFIPERFDEDQVQQRPACTFLPFGDGPRNCIGLRFGRMQVIVGMALLIHNFKFEFHPTKTVVPLEYRTDDFLLSSKGGIHLKVTRV

SEQ ID NO: 21679 - DNA, 3646 bp, DROSOPHILA
tgaagtacatataaaaacccacaaatggtccgtcagtcttgttcttaacttgttgtaggttctcttgaaaatatccgcaaaatggacggttttcattaactcgctggtattaccgtacggaattttcggctcatcgtggggaatgccccggcgcttccagtagttaaaatgctggtgcacataccacgcgacgaaggtgataacaccgatcagcaatacgatcataacagccatttcggaacaactgaaaatcttagcggcgacatcggccttttatacccgacattcatcagtcatctgactctgtttccggcatttttaaagagaaagaaagtctattcaatgtcgcgttatgtaaacttgaattttgctattaaactacatcaatatatgctcttaagtaagagtatttggtagctttagtttttaaccaagttgcattgcagctggtgggcattttaatatttctatttattaaaaagacagagttgatggtaaaaaagaagatattcgtatgttgtcataataaaaatgcgagtcatcgttactagcgcacatcttgtttgccttggaaacggaaattctgcttaatgtaactttctgggaatcatcaaatatttcttttttcgtgaaatattttttttaatggaatatttattttaatattttagcagatattaatgaactttttctatcaatttcaaccaaaatcatacccatttttgaaataagttgaggtaggtaaggtatttaatcgtaaaccatatgactgttaaatataaactctttaaaagagaaattctgagctgtaaaattagcaaataaagaggcaaacagtatcaacaatacaaaattgtttgctttgaatacaaaacaaatgcgaaactgatattctctcatctcatctaattcctctctctttttggctagctgtgcgagctttttgattgcaataggtttatgaagctcaactggagtacatttgcgatctatttttcgacggcataactacatatatcaccgcacccaagctgatgtcataggtgtttacagtgttctactggcaattgtggtggtgctagtgggatatctattactgaaatggcgtcgtgcccttcactactggcagaatttggatattccttgcgaggaaccccacatcctgatgggcagcctgacgggagtgcagaccagtcgatcatttagtgccatctggatggattactacaataagtttcgtggtactggccccttcgcaggcttctactggttccaaagacccggaatactcgtactggatatttcgctggcaaagctcatcctgattaaggaattcaataagttcaccgatcgtggtttctatcacaacacggaggacgatccactgtctggtcagttgtttctgctagatggccaaaagtggaagtctatgaggagcaagctatcctatacgtttacgtcgggtaaaatgaagtatatgtttcccaccgtcgtaaaggtgggtcatgaattcatcgaagtctttggccaagcgatggaaaagtctcccattgtcgaggttagggatatcctggccagattcaccaccgacgtaatcggcacgtgtgcctttggcattgagtgcagtagtcttaaggatccagaggcagagttcagggtaatgggtcgtcgagccatcttcgaacaacgccacggaccgatcgggatcgcgttcatcaatagcttccaaaatctggcacgcagactgcacatgaaaataacactagaagaagccgaacacttcttcctccggatcgtcagggaaacagtcgcatttagggagaagaacaacatccgtcgcaacgactttatggatcagctcatcgatttaaagaacagtccactgacaaagtccgaatctggggaaagtgttaaccttacgatcgaggaaatggccgcccaggcgttcgtgtttttcggagctggcttcgaaacctcgtcgaccaccatgggattcgcactgtatgaactggcccagcatcaggacattcaggaccgggtgaggaaggagtgtcaggaggttattggaaagtacaacggagagataacttacgaaagtatgaaggacatggtctatctagatcaggttatatcgggtatgtaatgtgctcgtcttctccgtcctttctaacttttggtttttttttagaaacccttcgcttgtacaccgttctcccggtcttgaatcgcgaatgcctggaggactatgaggttcctggacatcccaaatacgtcatcaaaaagggaatgcccgttttgattccgtgtggagccatgcaccgcgatgagaaactgtatgccaatccaaacacctttaacccagacaacttctcgcccgaacgagtgaaggaacgcgactccgtggagtggcttccattcggcgatggtcccaggaactgcatcggaatgcggtttggtcaaatgcaggccagaagtggattggctttactaatcaataggttcaagttctccgtttgcgaacaaacaacaataccaattgtatacagcaaaaaaacattcttaatatcaagcgagactggcatcttcttaaaagttgaacgcgtttaaaaatttcaatatttaatctattagtccctattttatatggaattccagaaacaatgttgctctatatctataagaatgttaagcttattagtgtctaatcgcagtagcatgcttgtggataactaactactgtaagttggctttcattttatggttttaaaaaattgtttttttattttctgggtgatatattgccttttaaaggcttcttattattgcataattattacaagactcttttgcagaaaaaatactttcggcatttcttggcagaagcaatctatgaacataacatttttaagaagttaagatattttaaaatcattacaaaaacattttaaaaatcacgtactcaaagtaactaacaacgaaattaaataaatatataacactttagtctctcactaccttggtgatattgagatggattccgccctcggagcccagcaaaaggttattgattgtgtatttcattggcactggcgtcttgggatgcaattcgaacctaaaattgtggattagcagggccaatccaatgatgacctgcatccgtccgaatcggagtccaatgcaatttcggggaccagctccgaagggtaggaaagcgcaggtgggacgcttctttacttgctcttcatcgaatcgttctgggataaacttttccggctccggataaaactcaggatcatgatggatgcccagggtggacaccagcactccagtgccggcctctatgaaatacttgggattactgtgctggtacggtttggtggcaatgcgagccaagtgggctaccactggatgtttccttagcgattctaagcagataacatatacagtttagaatgaaaaaataaactataataacttaccattgataaccttttccatataaaacaagtcctgcatagaatcgtattccagtttaccattgtacctttccagcacactgtcgatttcagccctcaacttgtcctgaacatcctgattgcaggccagctcataaagtgtgaatcccatggttgtggatcccgcctca

SEQ ID NO: 21680 - DNA, 1593 bp, DROSOPHILA
cggcataactacatatatcaccgcacccaagctgatgtcataggtgtttacagtgttctactggcaattgtggtggtgctagtgggatatctattactgaaatggcgtcgtgcccttcactactggcagaatttggatattccttgcgaggaaccccacatcctgatgggcagcctgacgggagtgcagaccagtcgatcatttagtgccatctggatggattactacaataagtttcgtggtactggccccttcgcaggcttctactggttccaaagacccggaatactcgtactggatatttcgctggcaaagctcatcctgattaaggaattcaataagttcaccgatcgtggtttctatcacaacacggaggacgatccactgtctggtcagttgtttctgctagatggccaaaagtggaagtctatgaggagcaagctatcctatacgtttacgtcgggtaaaatgaagtatatgtttcccaccgtcgtaaaggtgggtcatgaattcatcgaagtctttggccaagcgatggaaaagtctcccattgtcgaggttagggatatcctggccagattcaccaccgacgtaatcggcacgtgtgcctttggcattgagtgcagtagtcttaaggatccagaggcagagttcagggtaatgggtcgtcgagccatcttcgaacaacgccacggaccgatcgggatcgcgttcatcaatagcttccaaaatctggcacgcagactgcacatgaaaataacactagaagaagccgaacacttcttcctccggatcgtcagggaaacagtcgcatttagggagaagaacaacatccgtcgcaacgactttatggatcagctcatcgatttaaagaacagtccactgacaaagtccgaatctggggaaagtgttaaccttacgatcgaggaaatggccgcccaggcgttcgtgtttttcggagctggcttcgaaacctcgtcgaccaccatgggattcgcactgtatgaactggcccagcatcaggacattcaggaccgggtgaggaaggagtgtcaggaggttattggaaagtacaacggagagataacttacgaaagtatgaaggacatggtctatctagatcaggttatatcggaaacccttcgcttgtacaccgttctcccggtcttgaatcgcgaatgcctggaggactatgaggttcctggacatcccaaatacgtcatcaaaaagggaatgcccgttttgattccgtgtggagccatgcaccgcgatgagaaactgtatgccaatccaaacacctttaacccagacaacttctcgcccgaacgagtgaaggaacgcgactccgtggagtggcttccattcggcgatggtcccaggaactgcatcggaatgcggtttggtcaaatgcaggccagaagtggattggctttactaatcaataggttcaagttctccgtttgcgaacaaacaacaataccaattgtatacagcaaaaaaacattcttaatatcaagcgagactggcatcttcttaaaagttgaacgcgtttaaaaatttcaatatttaatctattagtccctattttatatg

SEQ ID NO: 21681 - protein, 462 aa, DROSOPHILA
MGSLTGVQTSRSFSAIWMDYYNKFRGTGPFAGFYWFQRPGILVLDISLAKLILIKEFNKFTDRGFYHNTEDDPLSGQLFLLDGQKWKSMRSKLSYTFTSGKMKYMFPTVVKVGHEFIEVFGQAMEKSPIVEVRDILARFTTDVIGTCAFGIECSSLKDPEAEFRVMGRRAIFEQRHGPIGIAFINSFQNLARRLHMKITLEEAEHFFLRIVRETVAFREKNNIRRNDFMDQLIDLKNSPLTKSESGESVNLTIEEMAAQAFVFFGAGFETSSTTMGFALYELAQHQDIQDRVRKECQEVIGKYNGEITYESMKDMVYLDQVISETLRLYTVLPVLNRECLEDYEVPGHPKYVIKKGMPVLIPCGAMHRDEKLYANPNTFNPDNFSPERVKERDSVEWLPFGDGPRNCIGMRFGQMQARSGLALLINRFKFSVCEQTTIPIVYSKKTFLISSETGIFLKVERV

SEQ ID NO: 21682 - DNA, 3568 bp, DROSOPHILA
tacttaaaataattaaatcccactgacttcaataatatccttgcagaaactctgcgactgtacaccattgtgcccaatctggatcgaatggccgccaagcgttacgtagttcccggtcatccaaacttcgtcatcgaggctggtcaatcggtcatcataccctcatctgccattcaccacgatcccagcatttaccccgaaccctttgagttccgacccgagcgattctcccccgaagaatcggctggtcgtccctcggttgcctggctgccttttggagatggtcctcggaactgcattggcctgagattcggacagatgcaggctcgcattggactcgctctgctcatcaggaactttaagttctccacgtgctcgaagacgcccaatcctttggtctacgatcccaaatcattcgtacttggtgtgaaagacggaatctatctgaaggtggagaccgtctaataaacagactgaaaactctcaactaaaagccaaagcttctaacaaaataactgataaatagatggtaatttattcaacctaaatcttatagaatcatattggggtaggtcctcatggccattgatctatcttttgtttattgccagataatttaagtgcttttattttattccagtttgtaaaaggtgtagggtagaatgtttgaattcaataaaaatcttattataaacaaaattatgtatacgagagatgggatacggggtattttggcatcgttactaaagaagcgtctaatttatcagcttgtgaatacccgattactccagtcagaattcacacaaacatcagtgataagtttgcgattgcgactgccagtattttgtttcttggtcacaatgaccgctgatttttgaagcggtctatttaaaagcgcgaaaaagcttttgcaatctcagtacatatcaaacgtttagccagcgttgaggtgcaaaaagattgccggcggagagagagaacacacattacccagttaatcatgtcggttggaactgttctactaacggcgctgctggcgctagttggttacctgctgatgaaatggcgaagcacgatgaggcactggcaggatttgggtattccctgtgaggagccacacatactaatgggaagcatgaagggcgtacgaaccgcacgatcctttaacgagatctggacgagctattacaataagttccgtggctccggaccctttgcaggtttctattggttccggcgaccggctgtttttgtcctggaaacatcgctggcgaagcagatcctgatcaaggagttcaacaagttcacagaccgaggcttctttcacaatcccgaggatgatccgttgtccggtcagttgtttttacttgatggccaaaagtggaggaccatgcgaaacaagctctcctccacatttacgtccggcaaaatgaagtatatgtttcccactgtggtcaaggtggccaatgaattcaccgatgtttttggccaaaatgtggctaagtcccctgttgtcgaagtgagggagctgttggcgcgattcaccaccgatgttattggcacctgcgccttcggcatcgagtgcagcagcctgaaggaccccgatgcagaattccgcgagatgggtcgacgatccctaacggagcagcgcctgggaccagttggaatcggattcgtcaatagctttcccaatttggcacgtcgcctccatatgaaaatgacagcggagcccatcgaaaggttcttcatgcgcatcgttagggaaacagtggccttccgagagcaaaacaatattcgtcgcaacgatttcatggatcagttgatcgatttgaaaaacaaaccactgatggtatcacaatccggggagagtgttaacctaaccatcgaggagatcgcagcgcaggcttttgtattctttgcggctggtttcgaaacctcgtcgaccaccatgggattcgcactgtatgaactggcccagaatcaggacattcagaaccgggtgaggaaggagtgccaggaggttattgaaaagtgcaacggggagttgaactatgaaagtatgaaggatttggtctatctagaccaggttgtatcgggtatgtaatgtgctcgttttctctgtcctttctaacttttggttttattttagaaacccttcgattgtacaccgttctcccggtcttgaatcgcgaatgcctggaggactatgaggttcctggacatcccaaatatgtcatcaaaaagggaatgcccgttttgattccgtgtggagccatgcaccgcgatgagaaactgtatgccaatccaaacacctttaacccagacaacttctcgcccgaacgagtgaaggaacgcgactccgtggagtggcttccattcggcgatggtcccaggaactgcatcggaatgcggtttggtcaaatgcaggccagaattggattggctctcctgattaaggactttaagttctcagtttgcgagaagacaaccattcccatgacatacaacaaagaaatgttccttattgccagtaattctggaatttatctgaaggctgagcgagtgtgatgcctttttaataaattgtttataacacatatcgaatatagcttgtttggacttcgcttattacgcaactgagcatctattaatacttaattgtattccatctcacaactggttaggggggtctactcaaactagattcgaatgttcagaaaaaaggcccaaaagtaggctatgctagctaacagaattataattatttctattctggttgaattgtgtaaatcaagataaatcacttattatcaacaactaactgcttacttttttaaatgacaagcgaaatctaaaaaaaaaatccagcacataacacttaagtatgatgaaatattggaaagcaacttgctcaaaacgttttttttaagaagcaattattccagcatccaaacagttatattcttacacacacttatataaattatgcgggtatgacgaaatcttaaaaacattttccgatgagtctactcttttacaaactttatgctctttctacaacctttatgctctcttttcacttgggtgactcatattcaggggcaaatgaagagtagaaaaatgtgatccagatgtgaaatgctgactgactactgcattacaaatagttcggaaaatgttctctcgattttacttaaatcttctactaagttgcgttattatttttcaaactttaacttaatcgtaacatttgatatccagtgtgtggctcaaatttcatgtgtatgctattagataccatcagcatcatttcattcaatgaatgaataaagagcaagtcatcgttattcgtcgcttttggtaggttcagcatgactgagctgagcttaactggcttgtgcaataagggtaagaaagaactcaaataaacatttaaaatttagagtttttgatatctatcgccttttgcacggcccattagtaattaaatattgtttgcataatgatagcattgatatatgtattttcagcctaggcaacgtaattgacgggttattttattttacct

SEQ ID NO: 21683 - DNA, 1515 bp, DROSOPHILA
atgtcggttggaactgttctactaacggcgctgctggcgctagttggttacctgctgatgaaatggcgaagcacgatgaggcactggcaggatttgggtattccctgtgaggagccacacatactaatgggaagcatgaagggcgtacgaaccgcacgatcctttaacgagatctggacgagctattacaataagttccgtggctccggaccctttgcaggtttctattggttccggcgaccggctgtttttgtcctggaaacatcgctggcgaagcagatcctgatcaaggagttcaacaagttcacagaccgaggcttctttcacaatcccgaggatgatccgttgtccggtcagttgtttttacttgatggccaaaagtggaggaccatgcgaaacaagctctcctccacatttacgtccggcaaaatgaagtatatgtttcccactgtggtcaaggtggccaatgaattcaccgatgtttttggccaaaatgtggctaagtcccctgttgtcgaagtgagggagctgttggcgcgattcaccaccgatgttattggcacctgcgccttcggcatcgagtgcagcagcctgaaggaccccgatgcagaattccgcgagatgggtcgacgatccctaacggagcagcgcctgggaccagttggaatcggattcgtcaatagctttcccaatttggcacgtcgcctccatatgaaaatgacagcggagcccatcgaaaggttcttcatgcgcatcgttagggaaacagtggccttccgagagcaaaacaatattcgtcgcaacgatttcatggatcagttgatcgatttgaaaaacaaaccactgatggtatcacaatccggggagagtgttaacctaaccatcgaggagatcgcagcgcaggcttttgtattctttgcggctggtttcgaaacctcgtcgaccaccatgggattcgcactgtatgaactggcccagaatcaggacattcagaaccgggtgaggaaggagtgccaggaggttattgaaaagtgcaacggggagttgaactatgaaagtatgaaggatttggtctatctagaccaggttgtatcggaaacccttcgattgtacaccgttctcccggtcttgaatcgcgaatgcctggaggactatgaggttcctggacatcccaaatatgtcatcaaaaagggaatgcccgttttgattccgtgtggagccatgcaccgcgatgagaaactgtatgccaatccaaacacctttaacccagacaacttctcgcccgaacgagtgaaggaacgcgactccgtggagtggcttccattcggcgatggtcccaggaactgcatcggaatgcggtttggtcaaatgcaggccagaattggattggctctcctgattaaggactttaagttctcagtttgcgagaagacaaccattcccatgacatacaacaaagaaatgttccttattgccagtaattctggaatttatctgaaggctgagcgagtgtga

SEQ ID NO: 21684 - protein, 504 aa, DROSOPHILA
MSVGTVLLTALLALVGYLLMKWRSTMRHWQDLGIPCEEPHILMGSMKGVRTARSFNEIWTSYYNKFRGSGPFAGFYWFRRPAVFVLETSLAKQILIKEFNKFTDRGFFHNPEDDPLSGQLFLLDGQKWRTMRNKLSSTFTSGKMKYMFPTVVKVANEFTDVFGQNVAKSPVVEVRELLARFTTDVIGTCAFGIECSSLKDPDAEFREMGRRSLTEQRLGPVGIGFVNSFPNLARRLHMKMTAEPIERFFMRIVRETVAFREQNNIRRNDFMDQLIDLKNKPLMVSQSGESVNLTIEEIAAQAFVFFAAGFETSSTTMGFALYELAQNQDIQNRVRKECQEVIEKCNGELNYESMKDLVYLDQVVSETLRLYTVLPVLNRECLEDYEVPGHPKYVIKKGMPVLIPCGAMHRDEKLYANPNTFNPDNFSPERVKERDSVEWLPFGDGPRNCIGMRFGQMQARIGLALLIKDFKFSVCEKTTIPMTYNKEMFLIASNSGIYLKAERV

SEQ ID NO: 21685 - DNA, 3683 bp, DROSOPHILA
cgttagcggctgcgttccggctgcccatcactcggctgggaggcaacgagatctgctcggtgacactccggtcccgaaccagcaccttccgactcaacgtcgtcctgaagatcgatcccagcctaaggatccggacacccatccgagctctgagcgacgccgctagggccaagtttgacggggttcgtctcgcggacgagcgcttccaccggccggcctccatcttcctcgtgttgggatcagatgtatatgccaatttgatccaaccggggttcctaaaaattgaggatgggttgcccgtcgcgcagaacacggtgttcggatggaccgtttctggaacgtgcgcgaaatgaagaggacgatcctgatatctagccggccagggatacctttgcctacgcaaggggggggagaatgttcacgccagaagggcgcaaacagttgagcggcagtgtaagcggccaatgcttgtactcgaagctcctccacggctcgcaagcaccgctgctcgcgctctccttctcttctctcgctctccccccttcccgcaaaggtattcaccactccgcggtcccgcggtatttctactgttagtgttaagggagttgtaatttaccagtgcgtgaataaagaacgaaaggttgaagtccaccccgcgcgtttttaatttcggggaaaatttcagcagccgccgcagcaaccacaaccaaaggaatctttccgcccactccatttcatgagggataatacaataaattccgaactaaataaacacttttttgctcaatttgcctacaaaataatgatcatgtcgacgttggtttctgtccttatctattcagactacaattcttgccatctcacagtgcttggcattaaagtaaacaaaacctaagattaactctccctttctagcgactgagaatgcatcgtcatgcaaagtaagtcaatttcagcgtttaaaagcagtttgcctatcgtttacggaaccagtcgtattcgaagatcatccgcctcagcatggcgttgacttacatccttttccaagtggcggtcgccctactggcgatcttaacgtactatatccaccgcaagctaacatatttcaagcgtcgagggattcccttcgttgcaccgcatctcatcaggggaaacatggaggaattacaaaagacgaaaaatatccacgagatattccaagatcactataacaaattcagggaaagcaaggcaccgtttgttggattcttctttttccagagtcccgctgcatttgtgatagatcttgaactggccaagcaaatactgattaaggacttctcgaatttctcgaacaagggtatattctacaatgaaaaagatgatcccatttctgcccatctcttcaatctggacggtgcccagtggcgtttgttaaggaacaaattatcatcgacctttacatccggtaaaatgaagttaatgtatccgaccgtagtgtcagtggccaatgaatttatgaccgtgatgcacgagaaagtgccgaaaaattcggttctggagatacgtgatctggtggccaggtttacggtggatgtgatcggaacctgcgcctttggcatccagtgcaacagtctgcgcgatgaaaaggccgagtttctgtattttggaaagaggtctttggttgacaagagacatgggactctattgaatggctttatgcgcagctatcccaaattggccaggaaattgggtatggttcgaactgcaccgcatattcaggaattctatagtagaattgtcacagaaacagtggcggtgcgagaaaaagagcacatcaaacgcaacgatttcatggacatgctgattgaacttaaaaatcaaaaggaaatgactctagagaatggcgatgtggtcagaggattaaccatggaggaggttttggcacaagcctttgtgttcttcattgctggctttgagacatcctcctccaccatgggatttgccctatacgaactggcaaagaatccggacattcaagataaggttcgggctgaggtggaggaggtcatagagcaacatgaccaaaactttacctacgagtgcaccaaggatctgaagtacctcaatcaggttttagatggtatgtaaatgaatacttaaaataattaaatcccactgacttcaataatatccttgcagaaactctgcgactgtacaccattgtgcccaatctggatcgaatggccgccaagcgttacgtagttcccggtcatccaaacttcgtcatcgaggctggtcaatcggtcatcataccctcatctgccattcaccacgatcccagcatttaccccgaaccctttgagttccgacccgagcgattctcccccgaagaatcggctggtcgtccctcggttgcctggctgccttttggagatggtcctcggaactgcattggcctgagattcggacagatgcaggctcgcattggactcgctctgctcatcaggaactttaagttctccacgtgctcgaagacgcccaatcctttggtctacgatcccaaatcattcgtacttggtgtgaaagacggaatctatctgaaggtggagaccgtctaataaacagactgaaaactctcaactaaaagccaaagcttctaacaaaataactgataaatagatggtaatttattcaacctaaatcttatagaatcatattggggtaggtcctcatggccattgatctatcttttgtttattgccagataatttaagtgcttttattttattccagtttgtaaaaggtgtagggtagaatgtttgaattcaataaaaatcttattataaacaaaattatgtatacgagagatgggatacggggtattttggcatcgttactaaagaagcgtctaatttatcagcttgtgaatacccgattactccagtcagaattcacacaaacatcagtgataagtttgcgattgcgactgccagtattttgtttcttggtcacaatgaccgctgatttttgaagcggtctatttaaaagcgcgaaaaagcttttgcaatctcagtacatatcaaacgtttagccagcgttgaggtgcaaaaagattgccggcggagagagagaacacacattacccagttaatcatgtcggttggaactgttctactaacggcgctgctggcgctagttggttacctgctgatgaaatggcgaagcacgatgaggcactggcaggatttgggtattccctgtgaggagccacacatactaatgggaagcatgaagggcgtacgaaccgcacgatcctttaacgagatctggacgagctattacaataagttccgtggctccggaccctttgcaggtttctattggttccggcgaccggctgtttttgtcctggaaacatcgctggcgaagcagatcctgatcaaggagttcaacaagttcacagaccgaggcttctttcacaatcccgaggatgatccgttgtccggtcagttgtttttacttgatggccaaaagtggaggaccatgcgaaacaagctctcctccacatttacgtccggcaaaatgaagtatatgtttcccactgtggtcaaggtggccaatgaattcaccgatgtttttggccaaaatgtggctaagtcccctgttgtcgaagtgagggagctgttggcgcgattcaccac

SEQ ID NO: 21686 - DNA, 1624 bp, DROSOPHILA
cgaagatcatccgcctcagcatggcgttgacttacatccttttccaagtggcggtcgccctactggcgatcttaacgtactatatccaccgcaagctaacatatttcaagcgtcgagggattcccttcgttgcaccgcatctcatcaggggaaacatggaggaattacaaaagacgaaaaatatccacgagatattccaagatcactataacaaattcagggaaagcaaggcaccgtttgttggattcttctttttccagagtcccgctgcatttgtgatagatcttgaactggccaagcaaatactgattaaggacttctcgaatttctcgaacaagggtatattctacaatgaaaaagatgatcccatttctgcccatctcttcaatctggacggtgcccagtggcgtttgttaaggaacaaattatcatcgacctttacatccggtaaaatgaagttaatgtatccgaccgtagtgtcagtggccaatgaatttatgaccgtgatgcacgagaaagtgccgaaaaattcggttctggagatacgtgatctggtggccaggtttacggtggatgtgatcggaacctgcgcctttggcatccagtgcaacagtctgcgcgatgaaaaggccgagtttctgtattttggaaagaggtctttggttgacaagagacatgggactctattgaatggctttatgcgcagctatcccaaattggccaggaaattgggtatggttcgaactgcaccgcatattcaggaattctatagtagaattgtcacagaaacagtggcggtgcgagaaaaagagcacatcaaacgcaacgatttcatggacatgctgattgaacttaaaaatcaaaaggaaatgactctagagaatggcgatgtggtcagaggattaaccatggaggaggttttggcacaagcctttgtgttcttcattgctggctttgagacatcctcctccaccatgggatttgccctatacgaactggcaaagaatccggacattcaagataaggttcgggctgaggtggaggaggtcatagagcaacatgaccaaaactttacctacgagtgcaccaaggatctgaagtacctcaatcaggttttagatgaaactctgcgactgtacaccattgtgcccaatctggatcgaatggccgccaagcgttacgtagttcccggtcatccaaacttcgtcatcgaggctggtcaatcggtcatcataccctcatctgccattcaccacgatcccagcatttaccccgaaccctttgagttccgacccgagcgattctcccccgaagaatcggctggtcgtccctcggttgcctggctgccttttggagatggtcctcggaactgcattggcctgagattcggacagatgcaggctcgcattggactcgctctgctcatcaggaactttaagttctccacgtgctcgaagacgcccaatcctttggtctacgatcccaaatcattcgtacttggtgtgaaagacggaatctatctgaaggtggagaccgtctaataaacagactgaaaactctcaactaaaagccaaagcttctaacaaaataactgataaatagatggtaatttattcaacctaaa

SEQ ID NO: 21687 - protein, 506 aa, DROSOPHILA
MALTYILFQVAVALLAILTYYIHRKLTYFKRRGIPFVAPHLIRGNMEELQKTKNIHEIFQDHYNKFRESKAPFVGFFFFQSPAAFVIDLELAKQILIKDFSNFSNKGIFYNEKDDPISAHLFNLDGAQWRLLRNKLSSTFTSGKMKLMYPTVVSVANEFMTVMHEKVPKNSVLEIRDLVARFTVDVIGTCAFGIQCNSLRDEKAEFLYFGKRSLVDKRHGTLLNGFMRSYPKLARKLGMVRTAPHIQEFYSRIVTETVAVREKEHIKRNDFMDMLIELKNQKEMTLENGDVVRGLTMEEVLAQAFVFFIAGFETSSSTMGFALYELAKNPDIQDKVRAEVEEVIEQHDQNFTYECTKDLKYLNQVLDETLRLYTIVPNLDRMAAKRYVVPGHPNFVIEAGQSVIIPSSAIHHDPSIYPEPFEFRPERFSPEESAGRPSVAWLPFGDGPRNCIGLRFGQMQARIGLALLIRNFKFSTCSKTPNPLVYDPKSFVLGVKDGIYLKVETV

SEQ ID NO: 21688 - DNA, 11136 bp, DROSOPHILA
gaaacgtgtttgatggagggcaggtgtggctacctccacgaagaagatacctttttttttgtgtggtttgactgtggccaataccaagaatcgaacgttgacgtgaccttggtagtgacattaagatacacggcgactggctttgatatccatgagatacttactctttccgcgccccttactcccttgcagccatgagatacttattctttctttgctccttcccattcccttgcagctcgtccaatcgcgtcctccgcgaatcccgctcctgcgggcatcactcgctcggtgcgcagctgcaactgctgtccctatggctaccacatcgacctggactttgtgcgctactgcgaggccctcgcccttgagaagcccagcgaggaggagcagcggcggcgggatcgcagaagatcccgaaagtccatggagtttatgctgggatttgagagcctcttcggcggcgactggcaggcggagtccagggtgcagggaaagctcagcgaggtatgtttgcctatcagattcatttcagtatacagtattaaataagatatagagaaaacattaaaagatatattgcatctacgtctttgccttcctaaaaggactatcaatacacttaaaactcaagatcaacaaattactaaatgataatgcagataaacgaagattcaaagtacaaacactaagtcggctttgttaaaagtttcacgaattcatttcttaaaaaaaataacttaaaaccggatatacttttcattataagagtgttattaatattgagcgatggggatttcaaaattagtgagtggtcataccattccattccattttcgaaatcgcatatctgcacgtaaatgtaacctgtacattgtattattgttaaaacagacctcacacgaaagcgaaccagattcgccacaccccattggcggaggagggtcgttgcatatgtcgcagtcgtacaccaccactccgtgctaccgaccgcgttcgtcatccgtgccgcgtttcacctacggcagtataccgcctcgatcggagtcgcccttcggcaccgcttcctccacgtgctcctcgctacgcggcggcgtggagagcgatgctggtatctaccatcagcgtcatcggccggcgatcagtccgccggagacgagggccttcctccacgaggcgctcgacgaggtgtgcagcgatttcgagcggacgctggagcggacttccgtaaagcgacgcaagtctccctatggagctggatccctgtccatggatcggaataacaacaaacttagcctgagcatcagcaatggccatggcgcattgaaggagctcaagagtcatcgcctgggcaacagcacgtgggatcggcactttgatgtggcaggtgagtgggcgtcagaacgatcgaccaaaaatagcatgccaaaaagagctcattttataaatattatgtcatacactgaagaaaaggatatattcgggaaatatttgcattatttaactaacatttgtgataatttgattaaaccttatagcttatattacaaacaatatttctggaaaatgtagtaattttttggtctgttagacaaatgaaaaacaatagttcaaatgtattttctttcagtgtgaggtagatgattcatagagccaagtgagacacgccagatacttttgctttcttttcttagcaattagcgctgctgcggcacatgtgacatttttacgcacgaaagtgtgaaaaatgtagctagacttttaaaagaaaatagaagagtcacacagtggaatagaaagtgaaaggaagagtaataaatttggagaaatacattataacatagtttttttgcttaatattgaaaggtcgaactcataaaaatgtgcagagcgcaagcttattttaaatatttttaacacatcgaattgagcaatctttaaattagctctaaaatgttttgaaatttatttggttttaatttataccacacaatcccatggttaccacgaagttgtcactactgcagctgtgctgaaagatcaaaggatatatcaacatctacaaagttttaagttttaaacgaaatagaaaagcaaagaaatcaaacatcagttcactgctggcagctccaaagatatatagatgcagatacggagttgcatgcaaacgcaattgcagatacagatagatacagttgctttgcatctttggcatttgaaactcaattgggtcttgcaacgtgcggcatggggcaacttcaaggcaattttcgaggcgttcgtatctcaaatcaatttgaaatgcgcatttggcgctcaatttgcatgcaaattttgctccagctcgtttttgtcgtatttgttgatgccataaatttgccataaagtgtgcaaaaaaaaaatcaatgcaaataaacaaatcaaattgtcgcgtttcgactgctgtttctttttttttttttttgtccagaggacatggctcaaagagttgtcgttgattaatgtgtataaaatggttgcagttccatggtaatggccaaagtacgggccattaataaatggctttcaaattgaattgaacatggccaaaaggcagctcgatgccaaaaagaacagaaaaccattctaacaatagatgaatgccaaaaagcgtgtaagagctgaaaacaggaaccttgagctatttgcacttaaagaaaatatctttttttaatgggatattgacattctaaccttaaatcttactattatttagtgtaatattcatttaatataataagattattattattacagctgattctttagtaaaattagataaaatagaaaagctcttaaaatccccaaaaactgtatagacagataccaatcgttttaattatcgttagaaatgtggtgccttaaactatccaactgcgagcccgacccaaaaaatcataaatcagcgaatggtttgggtttttcgccaatcataccatttgttatccaaactatccacaaaattaattgcaaaaagataaggcagaagatatattgggtagcgaacgattttttttttaaaacttaatgatgatttatgcaaaattagcctcttcattttcctggccttgagtcagaaaacacagacaaacccaaacccctttatatgggtggataggtgtgtaaatagccaatcaaaaatcaatattttttgcatatcaaatggcccattgaatataaacaagcccaagggtttctctccctctctctctctgtcttttatccacatgttctctctctctctctctctctctcttcgctcacaccacagaaattatcacttatcaatttggctttaatagatgtgcattcagcttatcagcacaaacacagcgaaaagttgctcacttggttatttcatgtgtatttttgcctagccttatcattttggtcttgaagctctctcagcaaattggtttctattttatttcggtgtttagttagatttaactttatttttccgctcgcctttcgcaccagatttgtgttaaataataacacaaaaatctctattgctaaatggtttttttttttgttcgctcttcatgctgcttttgctgccgtggatgatggtcggagtgaactcaacaatctgagagcagtttgtcggcgactttcgaacgaatagcataaaaatgcgtccgtgaaactgcaaaaccaaaaaaaaaaaacttataatagttacacgaaatgccttaaacgaaatcaactaattaaaacgagacatgtaattttagtacgacgaattaatagcaactaaatttaatgcgaattacatgatagtatgtgacaataatttcgacagcggacaacacgaaagtggtttgacaacaaccaaaaaatattaaataatacgatttaaaaatgtaagaaaagacttacgcgattaacgaataagtagaaacatcaatgataaataatcccaatatataaacgaaaataaatctcataaattactaagacacaaaataaaaataaattaaaaatcagcacacacataaaacacataattgtaaatcaaaaacgaatatatatttcaaaatgcctatgattctacgaaaattgaaatatgaactgctacgatgtgagttttgtgaaccaagtgtgcatgtttcgttggccgccactgtaaagcagataacttttgatgagctgtcgctttgatctggcaaatcaaataatttaatattgtttatagccaagcgcgtttaattagcagccgctaagataagaccaaacaaaaaaaaaacaattatattaaagaatctaacaaatatttgctacgctttggcttgcgaatgccagacaaaccaagtgcaatgtctgctgccttggcccacaaaggctgccaagtgcaatgctgtgcttttctaaccaactgaactgaactgaataaatcaataatagaatcaaccaaaacagaggtgaagaaatgttttcaactgcggacgatgccataccgctaagacggaaacgtttggccaaaaggagtatcaagttgaagccggacagcaagccaaattcacagaagagctggtggagcgactgtaggtctattagcttgaggagacaaactcatttggggtgaactctttaccgttttgaacttcgttccttgctaattagttgggccataaaaactgatttattatggcccggtcaatgctacacagcgtcacgcgcagccccccgcctaccaactccctacatttcgtcttgaccaaagacgctcagccaatttggcaccgctatgaaaaaacaatcactgaaaaatattttgccagttttaatggtgttaaaataacttatgtatatatttaactaacatttaggttaactcataactcagcttataacttataaccccgactaacgcatttgagttctcttttttggttctatacacttggtatagaatttttctcactgtgcccattggcgaaaagttcgttgcacagcgtattaagtaatattagcaaaatggatagcagcacaatttttttggcaaggctaaaagcgcgagatgagttacacattgttgctagcagggaacacagtgcgtatgaggaatattgaaataatgcttcagctgctcataaatttctctatttgctctcatacaacagactgcattcgttgagtgcgtcaagtaaagtacgccaacaaccttgcttataagttaaataagaggtaataaaaagtatacacacatgtatgtatgccagggcgataaccaaaaactaatattgaataatagctcgagcgtcttatctttcgacaaattttcgctcacacgcaaaagaggcggatttggtgactttttgtttttattaagtatatgtatttgttacacatatacatttttgttgttttgcattatacgaactttggcacaattattaaaattagatttgaatagcatgcgttttatctttggtcgtaggagctttttgccacacatcttatcgggcttcatagtccagtcgccagtggcaagtgctcatggcaagtttacaaattaggattgtacttagaagggagagcagaaaatcaagtaacccgtagttctctaccagagtcaatcttaagttaacttcggtatttttaattgtttttagattcctgcattggcggcaatcaatcgcccacgggcacgccgcgcccctttctgcgatccaacacccttcctctgcgacagcgacccagtccggcggaggtccaatatgaaagctacgtgcaggccacggtggcggccaatgccaagtcgccggtggagcagctggagagcgcaaagtctccaggtgctccgccaccaccgcctccgaggcgccaccacctgttggccaccacgcccacgggaaaacccactttcaaggaggatcgaccgcaggagaatggttccgtaagcagcagctccctgcagtcgccagtcatctcggaaaccggtcagactacggcagatgcacaagctctgttccagatacgagaacaaatggccctgagcctgaggcgtcttaaggatctggaggagcaggtgaaagtcatacccgacatggaggtgagaatgttaatgtttaatacggataagtgatattaaagaaataccattccgactttcagctggaacttaattctcttcgctcggaaaagcagaaattgctgcgcagaaacgaggagttgatgcgaagtcagcggcagacgccttcgccgccaagtccgggactcaagactgcctcacccgtgcagttcactccgcaaaggatcagtccagtgtcgctggagagcctaggagcacgcatgcgcagcagttccacctcggcatctccatctccaagcgttgtccgtcgagatgtctccactcaagcagtggtgcgaccacctgccacacgagatgtgtccgttggccaccagcccaccacgagaaatgttggagttcagccgtcggaaactgtctactccaaggaggagctggataagaaggtggagcaggcactaaccaatgcacaaaagcaacaattgagaaagctcatctctgtgggcacccaaatgtatgtgccccagagggaccaaaaagatagtggagtgcaaaccacaccggaacgacccaaactcaagtaccatgtgggagtcaccgtgaaaccggccacaagggagaactttaccagttgcaagccggatgtgcgtcatgtgggcagctctgatgatcgcctggatgatgtgctatgcgaaaaatgcgccgtcagcaagagaagcgtggcctgcggtccggaaactccggcggagaaggtaaaacctgctccccaaatgcccggacgcagcaacaccttcagtttgggcgagaatgagaccgtatccgtggtgcgtaagacaattggatgccagacgccagttaccctggttctcagttctggaagtcaaaccaccacggctgttgttcgttccaccggagcccaggttaatccacagcaacagcactctggcgtccagtgtgcaacggagcaggtatcccgacagactgataccaagggactgcagcgactcactcggagtcagacgaaggctgaacaggtctcagagtctgtgccccgccctacaacccgtcacacagccagcaatacggacaaggtggaggaagcggagccggctaaggttcgcacaagccactccgcctgcaacacggaggaggttcgcaagagggatgtgggctgtggcgacatcgtcaagccacacatctccattgcctgtgcagccaactactgtgattcctgcaaggaggccatccaggatctggccaggggtttctcgaaggccagtcccacggccaccagaacgggaggagcagtgcgacgctccacgtcggcggactcgagaattccgcgacccaagcacctctccagtccgagtccggtgcgcaaagagttcatgcggcagaacacctacacgctggccacgccttcgccaactccaagtccacaggtggaaaggaaggcgcgattgaggtgagtctcaaaaaaaaaaaaattgaagagcctctcttagtgaaattatttttatgatcagcatgaataattttgtaaaaactcttttaaaaatcaaactattctttggattttatccgtaaattcaatttatttattttttgttgctgtatgttcaatattgacccactgtactagccaagtttcacgaaaagcttttagccgagtcaccaaccagacgccagctcttgcgcattggggtcacaaaagtcagtgtctgaaatcgaaatgtcttgaccttcagttgagttttggtgtttgctttggcccaattgctgagccgcttatttttgctttttgtttggattttggtttttcgcatggtgctgccaatgttttccagcctgagcagtttcacgtgctatccgctgctggtcagcggatgctcggctctgctagtaacgtgggtttaggatttgccgtaaaaaccatcaatctgtcgtacttatcaaggttattcccctttcagctccctgcaagagaagccaccgtcagtgtccagtttccaggcatcggagccattgcccgaatcccaaagcttcatccgtcaaccgcagaaggattcattggatctgagtctcttgggcgaggatgagttgatagtccgagaggagaagcgggtgagcatcagctggtcgcgcgatgcctcaccagctccgctgatgacctcctcgggcactaccaagtccgaatcaccggaacaggagccggcaatgagctcctcaagtgattcaagtccgcccatcgacgtccagattgcccagggagcgcgcaagaagtccagcactccactcaaatctagtcagagcgagggctcccaagtgaccgtgatcgaacagccggccaccaaagcccagctccaccagttggcccaggcggattcggagccccgaaaaaagtaagccacttttaatatttatattttttgtagtataaaaaggatctcgtttatttgaaaattcaacaaattcgcagtattaatatttaaaattataatttcagaaccgagttgtcccagagccttaaagacgccctcaagatcattaacgactcgctgctgaagaagctgggcgccaaacccatatcctcgcagagtctcaagtcggccaaggcgaccattcaggatcattggttcactaactccagtactggcaaatccgatccccatcaggttgaggattatctagattactttgaatcgctgtccatcccattgctggagtactgtgtcaacctgtccgacagtaatgtgagtttgaatcacatactaagtaatatagatggatcactaagataatatcttatttcagggcaacacagccatgcactatgcagtctcgcacggcaacttcgatgtggtatccatactgctggattctaaggtttgcgatgtaaaccaaatgaataacgccggatacacatcggtgatgctcgtatcgttggccaagctgaagcagcccgcccatcggacagtcgtcgagcgactgttcaagatggccgatgtcaacatacgggccaagaaggtaggtaaggggccccaccgcccatggatctcgagccccgtatgtgctgaccacacactactcccctactaaccgctcccgtcctgtttctatccactaatccacagcactgccagaccgctttgatgctcgctgtgtcgcatggtaacggggacatggtcaatatgcttctggacgccggggcggatattaatatccaggacgaggacggcagtacggctctgatgtgcgccgccgagcacggacgcgtggatgtgatcaagcatctactgtcgcatcccgagtgcgattcactggtcaccgatgtggtgagtgtgcctatatacataatttatatagaagaggatttaaatgatttcatttctctcaggatggcagcacagccttcaagatcgcctggcaggctggccaccgggatgtgggactgctcatctatgtccacgagcagatgctgcgaagcaagctgccaaatcgcggagatgcaacaagaagctccctgatttcgccaccgcgccacaagcgccagccatcgcagtaaagccatttcgtattagcggccaaatcgacgaacaaacagctagtgactaagatttaaattagcatttcgtagagctgctcagaatacattccataccgccatactgcggaaaggcacaagggcagcttacacttttcatatgtatattgtataactagaattcgtttgtcgtacgttttatttatttgtaaatctaatttaatcgctaattgtagtagcagctaactctgtgtaatcattctgagacacatcgatcaactaatgcaattaagtactactgcacaggcctgagctaccgatcttaaagtagccgacaaaccaaccaaccatatcaagcaaccgacaatgcaaaaaacgatatatattgtactaaccagaaataacgaacagtgaatcaaatcaaaaggttcatctttaggataaccgggtgtatttaataggaataaaaccaagctaatttaaaagcaaatgttttctcaaataaataaattcttaaataaaaacaagtgtttaatattaactattctatgctgactctgcctattgggctacctgaactttagtttaatattgtttcggttagttactatgctgagttttatattgctttctagactttgttcatagagtaaattcttcgtcattaggcaaaagattgagatactgacataagctaaatctctttgtttcgacttttttatgcacaatgagttgctttaattgctttttccatataaagcacgaagcggaaacattaaaattaaattaaaatatttgcaaagaagccacacaatatattgaatgttagtgcatattctatagaggttttatctatatttctagttaactaaacaagtaccaatccttgctatcccagagataaagctaatgtcagtgatcatgcattctcaagctgcgagcttataccgccctctcctcgtttccgggttctatgacacccaatggcatcagggttagtgctataccatcctccaggttaatcagtggtttcctggtattcaaggagaattcatactcggatagaagcagagccaatgccaatcgcagttgcagctgtgcgaattgtataccaatgcaactgcgagcacccacgccgaatccaaaccaagtgccctgctcctgcagcgaatcccgtggtccgctccaacgatccggcttgaattcctcgggatccggatagatatccggatcgtgatggatagcgtgcgtgggtatgatgaggaacagctccttgaccagaatgtacttgggatgatccggaactgcgtagtcatttaaggtgcgacgtaggatgtagggtgttatgggatgcattcgtagtgtttcgttgatcacctgacccatgaaactaagcgacttaatgccctcatgtgttatgtgaccatcatgtcgctcgatggccttcttgacctcctcccgcacacgtacttgcaattctggatgcaatgctagctcatagagtacatatgatagagtg

SEQ ID NO: 21689 - DNA, 4221 bp, DROSOPHILA
taaaaccggatatacttttcattataagagtgttattaatattgagcgatggggatttcaaaattagtgagtggtcataccattccattccattttcgaaatcgcatatctgcacgtaaatgtaacctgtacattgtattattgttaaaacagacctcacacgaaagcgaaccagattcgccacaccccattggcggaggagggtcgttgcatatgtcgcagtcgtacaccaccactccgtgctaccgaccgcgttcgtcatccgtgccgcgtttcacctacggcagtataccgcctcgatcggagtcgcccttcggcaccgcttcctccacgtgctcctcgctacgcggcggcgtggagagcgatgctggtatctaccatcagcgtcatcggccggcgatcagtccgccggagacgagggccttcctccacgaggcgctcgacgaggtgtgcagcgatttcgagcggacgctggagcggacttccgtaaagcgacgcaagtctccctatggagctggatccctgtccatggatcggaataacaacaaacttagcctgagcatcagcaatggccatggcgcattgaaggagctcaagagtcatcgcctgggcaacagcacgtgggatcggcactttgatgtggcagattcctgcattggcggcaatcaatcgcccacgggcacgccgcgcccctttctgcgatccaacacccttcctctgcgacagcgacccagtccggcggaggtccaatatgaaagctacgtgcaggccacggtggcggccaatgccaagtcgccggtggagcagctggagagcgcaaagtctccaggtgctccgccaccaccgcctccgaggcgccaccacctgttggccaccacgcccacgggaaaacccactttcaaggaggatcgaccgcaggagaatggttccgtaagcagcagctccctgcagtcgccagtcatctcggaaaccggtcagactacggcagatgcacaagctctgttccagatacgagaacaaatggccctgagcctgaggcgtcttaaggatctggaggagcaggtgaaagtcatacccgacatggagctggaacttaattctcttcgctcggaaaagcagaaattgctgcgcagaaacgaggagttgatgcgaagtcagcggcagacgccttcgccgccaagtccgggactcaagactgcctcacccgtgcagttcactccgcaaaggatcagtccagtgtcgctggagagcctaggagcacgcatgcgcagcagttccacctcggcatctccatctccaagcgttgtccgtcgagatgtctccactcaagcagtggtgcgaccacctgccacacgagatgtgtccgttggccaccagcccaccacgagaaatgttggagttcagccgtcggaaactgtctactccaaggaggagctggataagaaggtggagcaggcactaaccaatgcacaaaagcaacaattgagaaagctcatctctgtgggcacccaaatgtatgtgccccagagggaccaaaaagatagtggagtgcaaaccacaccggaacgacccaaactcaagtaccatgtgggagtcaccgtgaaaccggccacaagggagaactttaccagttgcaagccggatgtgcgtcatgtgggcagctctgatgatcgcctggatgatgtgctatgcgaaaaatgcgccgtcagcaagagaagcgtggcctgcggtccggaaactccggcggagaaggtaaaacctgctccccaaatgcccggacgcagcaacaccttcagtttgggcgagaatgagaccgtatccgtggtgcgtaagacaattggatgccagacgccagttaccctggttctcagttctggaagtcaaaccaccacggctgttgttcgttccaccggagcccaggttaatccacagcaacagcactctggcgtccagtgtgcaacggagcaggtatcccgacagactgataccaagggactgcagcgactcactcggagtcagacgaaggctgaacaggtctcagagtctgtgccccgccctacaacccgtcacacagccagcaatacggacaaggtggaggaagcggagccggctaaggttcgcacaagccactccgcctgcaacacggaggaggttcgcaagagggatgtgggctgtggcgacatcgtcaagccacacatctccattgcctgtgcagccaactactgtgattcctgcaaggaggccatccaggatctggccaggggtttctcgaaggccagtcccacggccaccagaacgggaggagcagtgcgacgctccacgtcggcggactcgagaattccgcgacccaagcacctctccagtccgagtccggtgcgcaaagagttcatgcggcagaacacctacacgctggccacgccttcgccaactccaagtccacaggtggaaaggaaggcgcgattgagctccctgcaagagaagccaccgtcagtgtccagtttccaggcatcggagccattgcccgaatcccaaagcttcatccgtcaaccgcagaaggattcattggatctgagtctcttgggcgaggatgagttgatagtccgagaggagaagcgggtgagcatcagctggtcgcgcgatgcctcaccagctccgctgatgacctcctcgggcactaccaagtccgaatcaccggaacaggagccggcaatgagctcctcaagtgattcaagtccgcccatcgacgtccagattgcccagggagcgcgcaagaagtccagcactccactcaaatctagtcagagcgagggctcccaagtgaccgtgatcgaacagccggccaccaaagcccagctccaccagttggcccaggcggattcggagccccgaaaaaaaaccgagttgtcccagagccttaaagacgccctcaagatcattaacgactcgctgctgaagaagctgggcgccaaacccatatcctcgcagagtctcaagtcggccaaggcgaccattcaggatcattggttcactaactccagtactggcaaatccgatccccatcaggttgaggattatctagattactttgaatcgctgtccatcccattgctggagtactgtgtcaacctgtccgacagtaatggcaacacagccatgcactatgcagtctcgcacggcaacttcgatgtggtatccatactgctggattctaaggtttgcgatgtaaaccaaatgaataacgccggatacacatcggtgatgctcgtatcgttggccaagctgaagcagcccgcccatcggacagtcgtcgagcgactgttcaagatggccgatgtcaacatacgggccaagaagcactgccagaccgctttgatgctcgctgtgtcgcatggtaacggggacatggtcaatatgcttctggacgccggggcggatattaatatccaggacgaggacggcagtacggctctgatgtgcgccgccgagcacggacgcgtggatgtgatcaagcatctactgtcgcatcccgagtgcgattcactggtcaccgatgtggatggcagcacagccttcaagatcgcctggcaggctggccaccgggatgtgggactgctcatctatgtccacgagcagatgctgcgaagcaagctgccaaatcgcggagatgcaacaagaagctccctgatttcgccaccgcgccacaagcgccagccatcgcagtaaagccatttcgtattagcggccaaatcgacgaacaaacagctagtgactaagatttaaattagcatttcgtagagctgctcagaatacattccataccgccatactgcggaaaggcacaagggcagcttacacttttcatatgtatattgtataactagaattcgtttgtcgtacgttttatttatttgtaaatctaatttaatcgctaattgtagtagcagctaactctgtgtaatcattctgagacacatcgatcaactaatgcaattaagtactactgcacaggcctgagctaccgatcttaaagtagccgacaaaccaaccaaccatatcaagcaaccgacaatgcaaaaaacgatatatattgtactaaccagaaataacgaacagtgaatcaaatcaaaaggttcatctttaggataaccgggtgtatttaataggaataaaaccaagctaatttaaaagcaaatgttttctcaaataaataaattcttaaat

SEQ ID NO: 21690 - protein, 1224 aa, DROSOPHILA
MGISKLVSGHTIPFHFRNRISARKCNLYIVLLLKQTSHESEPDSPHPIGGGGSLHMSQSYTTTPCYRPRSSSVPRFTYGSIPPRSESPFGTASSTCSSLRGGVESDAGIYHQRHRPAISPPETRAFLHEALDEVCSDFERTLERTSVKRRKSPYGAGSLSMDRNNNKLSLSISNGHGALKELKSHRLGNSTWDRHFDVADSCIGGNQSPTGTPRPFLRSNTLPLRQRPSPAEVQYESYVQATVAANAKSPVEQLESAKSPGAPPPPPPRRHHLLATTPTGKPTFKEDRPQENGSVSSSSLQSPVISETGQTTADAQALFQIREQMALSLRRLKDLEEQVKVIPDMELELNSLRSEKQKLLRRNEELMRSQRQTPSPPSPGLKTASPVQFTPQRISPVSLESLGARMRSSSTSASPSPSVVRRDVSTQAVVRPPATRDVSVGHQPTTRNVGVQPSETVYSKEELDKKVEQALTNAQKQQLRKLISVGTQMYVPQRDQKDSGVQTTPERPKLKYHVGVTVKPATRENFTSCKPDVRHVGSSDDRLDDVLCEKCAVSKRSVACGPETPAEKVKPAPQMPGRSNTFSLGENETVSVVRKTIGCQTPVTLVLSSGSQTTTAVVRSTGAQVNPQQQHSGVQCATEQVSRQTDTKGLQRLTRSQTKAEQVSESVPRPTTRHTASNTDKVEEAEPAKVRTSHSACNTEEVRKRDVGCGDIVKPHISIACAANYCDSCKEAIQDLARGFSKASPTATRTGGAVRRSTSADSRIPRPKHLSSPSPVRKEFMRQNTYTLATPSPTPSPQVERKARLSSLQEKPPSVSSFQASEPLPESQSFIRQPQKDSLDLSLLGEDELIVREEKRVSISWSRDASPAPLMTSSGTTKSESPEQEPAMSSSSDSSPPIDVQIAQGARKKSSTPLKSSQSEGSQVTVIEQPATKAQLHQLAQADSEPRKKTELSQSLKDALKIINDSLLKKLGAKPISSQSLKSAKATIQDHWFTNSSTGKSDPHQVEDYLDYFESLSIPLLEYCVNLSDSNGNTAMHYAVSHGNFDVVSILLDSKVCDVNQMNNAGYTSVMLVSLAKLKQPAHRTVVERLFKMADVNIRAKKHCQTALMLAVSHGNGDMVNMLLDAGADINIQDEDGSTALMCAAEHGRVDVIKHLLSHPECDSLVTDVDGSTAFKIAWQAGHRDVGLLIYVHEQMLRSKLPNRGDATRSSLISPPRHKRQPSQ

SEQ ID NO: 21691 - DNA, 4159 bp, DROSOPHILA
gaatacgaaggagcattaacccccttaaagaatggcctattatgaacatcgtgtgctcccggaccgggactgcttcgcttatctacgattaagcaatttaaccaaaaacgttcttgtcttcagtactaataagttatcttaccgatgacattggttctgggcgccatcgagaactccaaacccttgctcgtgccatagcgagtcaacttgtccaccttgtaggcccctggaccaggacccagatcctcaccaggagcacgggtgcgcatgccgaaagagtactgcggcaaccgctgtttgcggttgtcatgcttatcatagcccacagtggggggcagcatgtaaacgccgggtccagggcctacaaaaagcatgtataatatattatttaccacattacaattttatgaattctcactcaccaaaaggtcgcaccgccatttttgttagttttgtgcaatattagaaagaaaatctattttgaaaatttagaacccaatattaggtgttggccgaacagattccagtagcagaatgaggctttcatagaacttcacatcgcagctccattcgaagtcagagccatagcacacttgttatagaaaagttttaccaccgtaattccttcacacataacccattcaaatattaattacgtaattctttttattccgaaaatttgatcataataacctaagttacttcaagacatggcaaagtgattttaataataggagattcgaattttatcggaaaaataaattgtttacgaaaatcagctccagatatattgctttattgagccaaaggaacgccttatttgcacactcaaggttgtttgctattttgctggacaactgggcagtacagcttattccacatccatggagttgtaaagttgtttatacctagatccccgcccgctgctttggagcagcatatcattatgctgttccctaagggcctgttaaaaaaaaaaacacatataaatagtgacggcttaatcgaaaaatataaaaaatgttgatacctttggatcgtatttctgatgcaagtagaccaatattgggccataaatcatattgaaaatgccgacaatgcgcatcagccaagcaaatccaaaggtctgggccaactccccgccaatcaggggagctataaagatgataaaaatacacttttttttttagaaaaaaaaaaaaaacaatatccacttacctaagcaataagccagactgacagaggtctgctggatagcatagactgttccgtagctggacatggaactgctgccctcaccctgatcctcctgagccagtgttgcatccacaaaggtggccaagagtggaaccaatgcggcatcgattactccaatacccagtcccaaggcaaaatggggcagcaatagttgggccaccgttgtagcactgggtatctgcaaagtaaataatatatttgcaatatatttccaattcaggttttataaaagcagggctctcaccagaatagaggctactcccaccagcaacaaactgatacaggacaccttaacctgaccatatttgtaggcaatgctgccgaagaagttcgtgcccacaaagtagcccacagagtctggaatgaaaacggtgcccagctgccacttgttaggctttagatactggattagccagatgggcagacagggctccagcatggccattgttgaggttgaaaaccaaatggccagcacaatggccaggatcattttgcattcgagcagcgatcgccacttgggtctatcctccaccacaacctccggttgcaccgtcagatccatggtcaggagctggaggcccaaacttaggaacatcagagtggagagaatgataaaaggcgccgatttgcccattaggtcatacagaattccaccgaatggatagcccagcagcacacccaatgcgatgctgcccaggatgatgcccatcaccttggaacgacgtgcctcctccggataatgctgggccaccaggctcatgccgcatatgttgatgcaagcggatcccacgccctgcacagcccgggccaccaggagagcccagtaggattcaccaacggtgaaaactgaaaggtaagtttggagaaagttggatatatcgttttacgcattaataaaatatagaaatataatacaatataaagttccatagaattatcaaaatttgttaaaaaaaaaaaaaaaaactgaatgtagaagagttatcttctccaatattaatttatccgcctgatgaggtgtctcccaattgaaaaaccaatcaatgcccccaaaatagaccacttacccagcgaggagaggagcaggaagaaggtgccgaccacaatgggaaggcggtaaccaaacttgctggacgcattgccgacaatcggattgaaaattaattggaccagagccttcatggccagcaacaggccgatggagccattctcctgcgtcaaggtcagctccttgttgctgttgtcattgctgctgttgtcgtgggtggggggatggccggaggccagcttcctgttcctgctcttgtgcccaattccagtgacattagtgccgcccgactggccaaccgtcagctttggaggcgattgcatggacgtagaattgtgcggggagttggtcgttgtggcgatgctggtggtcgtggttgtggcttctgtggacagctggagcagtgtgaagttaaccattgatttgcccggaatcggatgcttagaaatgtacagttgaggatgaccgccgcctggcgattctccagaccgatagccaagtttcgagaatgacgatgtgtcctccagactcagcactaccgcggacgatgtatccgcctccaggctggccagataatccggcaggatgggcactgaaaatggcgaaaattaccgcgtttattaccgcgcttatctgtaattgatttggccattaccaattacggttagcagcatgttatctagcagcagggccaggtaaacaatcacggcaatcaggcagcgattggaggagccattggctccggatggagtggagctgcgtctgcccggggcattcagttgaacagccgcttggttttgggatttcgatcgggagttggagtgtatttgagcacggttcgatttctccgacatggctaattggacggcacactgatagcgccaaattaggctgccatatggctcgcgatacgcgccacaaagtatgctcccgagtgtatctatccggagtggcaacaggtggtggtgctgccacaacgacgtatgtgcgaatattgaaaggcggcgacaagttgcctttccattttattgacaccagacgaaccgagccgagtaaacggcccgaacagccagttcgccaggaggccgaaggcagccgggcagagcaacaaccaggccagatggatcccactccaaggttctattctgtttgtgtctgtgttcagcatggctacgatggtgacctacaggagggtatgttgggttttaaaaaccattctacgcatcaaggtggttctctagtttttatattctttacttaaaaaaagaaagagcattcattagttgtacataacaatttttgtattgaactgttaatagtttttgttaacaccaaactcagccgcacacacatggctttaaagctttagccatgacatgggattctttattattagcactcccctggatatggaaaggatggtgaagggatgggtgagatggagattaaagacatggcttaaagactcggcaaaacgagtgtgccgcggccccgataagcgggctatggacttttagcctttagtcacattttccgtttcattgcatctccttttttccgtttaaatttggccccgaccaatttgtgatgaatttctcgttctttatgctgaaaattgattttcctttatggaaggagagtgtggggcagctatttatagtcaacgtgtggcataaataaccgagtaattgctcaacaaaaaatctgctaatccgtcaccaaatagatgattgcgctgacagacttgataagaacacaatacacctgttgtgcaaatttgccattagtagccactaatctacgcccagcccacttgggcttagttaaatatttccatttatttactactcctta

SEQ ID NO: 21692 - DNA, 1677 bp, DROSOPHILA
atgtcggagaaatcgaaccgtgctcaaatacactccaactcccgatcgaaatcccaaaaccaagcggctgttcaactgaatgccccgggcagacgcagctccactccatccggagccaatggctcctccaatcgctgcctgattgccgtgattgtttacctggccctgctgctagataacatgctgctaaccgtaattgtgcccatcctgccggattatctggccagcctggaggcggatacatcgtccgcggtagtgctgagtctggaggacacatcgtcattctcgaaacttggctatcggtctggagaatcgccaggcggcggtcatcctcaactgtacatttctaagcatccgattccgggcaaatcaatggttaacttcacactgctccagctgtccacagaagccacaaccacgaccaccagcatcgccacaacgaccaactccccgcacaattctacgtccatgcaatcgcctccaaagctgacggttggccagtcgggcggcactaatgtcactggaattgggcacaagagcaggaacaggaagctggcctccggccatccccccacccacgacaacagcagcaatgacaacagcaacaaggagctgaccttgacgcaggagaatggctccatcggcctgttgctggccatgaaggctctggtccaattaattttcaatccgattgtcggcaatgcgtccagcaagtttggttaccgccttcccattgtggtcggcaccttcttcctgctcctctcctcgctggttttcaccgttggtgaatcctactgggctctcctggtggcccgggctgtgcagggcgtgggatccgcttgcatcaacatatgcggcatgagcctggtggcccagcattatccggaggaggcacgtcgttccaaggtgatgggcatcatcctgggcagcatcgcattgggtgtgctgctgggctatccattcggtggaattctgtatgacctaatgggcaaatcggcgccttttatcattctctccactctgatgttcctaagtttgggcctccagctcctgaccatggatctgacggtgcaaccggaggttgtggtggaggatagacccaagtggcgatcgctgctcgaatgcaaaatgatcctggccattgtgctggccatttggttttcaacctcaacaatggccatgctggagccctactctgtgggctactttgtgggcacgaacttcttcggcagcattgcctacaaatatggtcaggttaaggtgtcctgtatcagtttgttgctggtgggagtagcctctattctgatacccagtgctacaacggtggcccaactattgctgccccattttgccttgggactgggtattggagtaatcgatgccgcattggttccactcttggccacctttgtggatgcaacactggctcaggaggatcagggtgagggcagcagttccatgtccagctacggaacagtctatgctatccagcagacctctgtcagtctggcttattgcttagctcccctgattggcggggagttggcccagacctttggatttgcttggctgatgcgcattgtcggcattttcaatatgatttatggcccaatattggtctacttgcatcagaaatacgatccaaaggtatcaacattttttatatttttcgattaa

SEQ ID NO: 21693 - protein, 558 aa, DROSOPHILA
MSEKSNRAQIHSNSRSKSQNQAAVQLNAPGRRSSTPSGANGSSNRCLIAVIVYLALLLDNMLLTVIVPILPDYLASLEADTSSAVVLSLEDTSSFSKLGYRSGESPGGGHPQLYISKHPIPGKSMVNFTLLQLSTEATTTTTSIATTTNSPHNSTSMQSPPKLTVGQSGGTNVTGIGHKSRNRKLASGHPPTHDNSSNDNSNKELTLTQENGSIGLLLAMKALVQLIFNPIVGNASSKFGYRLPIVVGTFFLLLSSLVFTVGESYWALLVARAVQGVGSACINICGMSLVAQHYPEEARRSKVMGIILGSIALGVLLGYPFGGILYDLMGKSAPFIILSTLMFLSLGLQLLTMDLTVQPEVVVEDRPKWRSLLECKMILAIVLAIWFSTSTMAMLEPYSVGYFVGTNFFGSIAYKYGQVKVSCISLLLVGVASILIPSATTVAQLLLPHFALGLGIGVIDAALVPLLATFVDATLAQEDQGEGSSSMSSYGTVYAIQQTSVSLAYCLAPLIGGELAQTFGFAWLMRIVGIFNMIYGPILVYLHQKYDPKVSTFFIFFD

SEQ ID NO: 21694 - DNA, 3013 bp, DROSOPHILA
accctgggctttcgatggcacctggccaccacccgatcgacgggagtgggaatttgcgttatggcggctctcctggttgggggtccgacccagctcctgtgaggatggaggaggattcgcaagcgtcggtgtacgcggagcagcctccgccaaagactgttcctgctcctgctgcggttgacctggtgtaccacctggagcggccgcacccgccacatcgctcatcatgttaccaatcgtaagctgggaacatggacggcaagaactttgccgtggcgaatgctcggtgaatatatttcttctccctttattggccactaattattacaaattcctataatatgcccgacgagccactgacacacaaacacacatctaatttacggacactggagcaaactataaatttgcttggacaatttcgccaacttctttcgaaaaactataaataaaacaggcaaaatctacaaacaaaacgagaaactttgataaaaagaattttgtgactgaaaaataccggagttagataaaatcaatggttccgagttccagtgcctttaagcgagcactcgaaccattatcttgataacagcgctctgttaagagaaaacaacggttgaaacaagatgagcatttgcccgcgaaattgaaatgggatagtctaaatacaaattcagttactctcaattccgtaaaatagtaacgcgtgttgttgtctgcctaaaaactcaccgttacgttgatataataatgtaaatgtaaatgtgctttttccaaaaatttctattatcaaatgttaatttgacacatcgttcagggactacttgtattttagacatgtacagagccaagtgtatcacatcataggcgcactagcatcaaaatgctcccttccttttccaataaaggtaacgctcattgcgttctaccaagttaaaacaaattcaatctcattttaataccccgttaagcattttccataaacaatgaaacttggtttaaaaagaattgtttattcacaaaaattttagcatatatttcttccaatattgcacttggtctacatattgtcacatctaactatcataggcggagcgaactggtggtggcgcacaccaaaggagtagcccggtccactcttgccaggacgatagtacatgaggtcgtagtagttgggtccaggtccgacattctcgcccggaatagtggtgcgcggctgcatcgagtatatcggagcacgtgtcagtttgacattgatatcaccaccgccatatgcagccggacccggagaattcgtcttgttcaaaatctttgtttgtagtcccctgagatacaggtacaaataaaaataggcaacttagtaaaggaataactatggtaggattgaaatacgcacatgctatagctcgggactccaggacgaacggcattgacctcgtacttgtaggcattgggaccgggaccatccttcttgaagttaaagtccgttcgtaggcccatcgaatacgaaggagcattaacccccttaaagaatggcctattatgaacatcgtgtgctcccggaccgggactgcttcgcttatctacgattaagcaatttaaccaaaaacgttcttgtcttcagtactaataagttatcttaccgatgacattggttctgggcgccatcgagaactccaaacccttgctcgtgccatagcgagtcaacttgtccaccttgtaggcccctggaccaggacccagatcctcaccaggagcacgggtgcgcatgccgaaagagtactgcggcaaccgctgtttgcggttgtcatgcttatcatagcccacagtggggggcagcatgtaaacgccgggtccagggcctacaaaaagcatgtataatatattatttaccacattacaattttatgaattctcactcaccaaaaggtcgcaccgccatttttgttagttttgtgcaatattagaaagaaaatctattttgaaaatttagaacccaatattaggtgttggccgaacagattccagtagcagaatgaggctttcatagaacttcacatcgcagctccattcgaagtcagagccatagcacacttgttatagaaaagttttaccaccgtaattccttcacacataacccattcaaatattaattacgtaattctttttattccgaaaatttgatcataataacctaagttacttcaagacatggcaaagtgattttaataataggagattcgaattttatcggaaaaataaattgtttacgaaaatcagctccagatatattgctttattgagccaaaggaacgccttatttgcacactcaaggttgtttgctattttgctggacaactgggcagtacagcttattccacatccatggagttgtaaagttgtttatacctagatccccgcccgctgctttggagcagcatatcattatgctgttccctaagggcctgttaaaaaaaaaaacacatataaatagtgacggcttaatcgaaaaatataaaaaatgttgatacctttggatcgtatttctgatgcaagtagaccaatattgggccataaatcatattgaaaatgccgacaatgcgcatcagccaagcaaatccaaaggtctgggccaactccccgccaatcaggggagctataaagatgataaaaatacacttttttttttagaaaaaaaaaaaaaacaatatccacttacctaagcaataagccagactgacagaggtctgctggatagcatagactgttccgtagctggacatggaactgctgccctcaccctgatcctcctgagccagtgttgcatccacaaaggtggccaagagtggaaccaatgcggcatcgattactccaatacccagtcccaaggcaaaatggggcagcaatagttgggccaccgttgtagcactgggtatctgcaaagtaaataatatatttgcaatatatttccaattcaggttttataaaagcagggctctcaccagaatagagg

SEQ ID NO: 21695 - DNA, 821 bp, DROSOPHILA
ccaacacctaatattgggttctaaattttcaaaatagattttctttctaatattgcacaaaactaacaaaaatggcggtgcgaccttttggccctggacccggcgtttacatgctgccccccactgtgggctatgataagcatgacaaccgcaaacagcggttgccgcagtactctttcggcatgcgcacccgtgctcctggtgaggatctgggtcctggtccaggggcctacaaggtggacaagttgactcgctatggcacgagcaagggtttggagttctcgatggcgcccagaaccaatgtcatcgataagcgaagcagtcccggtccgggagcacacgatgttcataataggccattctttaagggggttaatgctccttcgtattcgatgggcctacgaacggactttaacttcaagaaggatggtcccggtcccaatgcctacaagtacgaggtcaatgccgttcgtcctggagtcccgagctatagcatgggactacaaacaaagattttgaacaagacgaattctccgggtccggctgcatatggcggtggtgatatcaatgtcaaactgacacgtgctccgatatactcgatgcagccgcgcaccactattccgggcgagaatgtcggacctggacccaactactacgacctcatgtactatcgtcctggcaagagtggaccgggctactcctttggtgtgcgccaccaccagttcgctccgcctatgatagttagatgtgacaatatgtagaccaagtgcaatattggaagaaatatatgctaaaatttttgtgaataaacaattcttttt

SEQ ID NO: 21696 - protein, 229 aa, DROSOPHILA
MAVRPFGPGPGVYMLPPTVGYDKHDNRKQRLPQYSFGMRTRAPGEDLGPGPGAYKVDKLTRYGTSKGLEFSMAPRTNVIDKRSSPGPGAHDVHNRPFFKGVNAPSYSMGLRTDFNFKKDGPGPNAYKYEVNAVRPGVPSYSMGLQTKILNKTNSPGPAAYGGGDINVKLTRAPIYSMQPRTTIPGENVGPGPNYYDLMYYRPGKSGPGYSFGVRHHQFAPPMIVRCDNM

SEQ ID NO: 21697 - DNA, 7650 bp, DROSOPHILA
ccggcgtcacctcctacgggacgaagccctgcggcctcaagggatggcccggcgtctatacccgcacgggggctttcatcgattggataaagcagaaattggagccatgatgaatacatacttaaatacatgataaccatgtgaaaagcgcgatgtagatattggggtttaatcaattcacatgagatcggcactgtcaagttttgcgagcacaaccggttgtaataatatcgaaccacttttctgtcaatctgtgatcagcaaagtctggtagtagcttgcccacgtaatttcccatattctaatggaaaagtagaggaaaatctctggaactcatttatctctgttgcaatagccatctcacttgtcaatctagacggcagatgtgccggagagcttggtcagtatcggattgggttctggggtatcgagatggcttccatggaatggaattttctactattgctaatggtcatctgcgcattttccgagtgggtccaacattcagatgggatgccataaacgacaacgatttcacctggatccgcttaaaattttgaaatatatccacacacgaggtggagaagggcattgtacatgaccaatagttgcctaattccgtagaccagcagaatgacattgctttggttttgaaaaggagtggcattgaaaaggagtggcgggtgtgtgggatgtgtgagtattccataacttcttcatcattgttattcattcaccagctacaccgactacgtgcgccccatttgcctgcccacgggcgatctgatccagatccaattgtgcgccggcggcatgtacggctatggatacctgcgatggcgattctggcggtcccttgatggtgtccatatccacaggcagccgggacgtattctacatcgctggcattacttcctacggcacgaagcagtgcggcctcggtggataacccggtgtatataccctcaggggggctttcatcgattggataaagcagaaattggaggcataataaataaaattgctagtttattcacatttctcgcattggctagcttacaatattacgtacatggtgctgattggacgtgggatggactaactaagctaggttctagtggaatgcctacaaatattcgcgtaggccagcgttcacaatattcgcaacaaaacattaaattttatttgttagctggcctgataacaacataaagtaaaactcgctgacattacatgaggcggattcctttaacaatttatgcttagttgcgcgctatatataattcagctttgtttgttgttttttaaactaataaccaataatcgtagaaaattttgtttaactaaaaggctgtctgccagcaatacgagcggatagaaattcgagattcgagataggggctataaaacgctgacacttgccgagggccagatcagactcccaaaacgcaggcggcaaaagtcttgtggttcttctgataggcaccattttcataggcatacgctggccaggatgagtggcaatcagatctcctccggagcagcgcgcggggcagtgccaattccagtcgcaatgccattacgttcatccgtaaccagattggcacccaaggcagttagctcgctttgaagttggctcaaaacgcgcttgaccgctatgcaaaagcctcgactgcatggtagcagcgggaattcgggtagctcgcaagacgccttgtactccacaggcatgtctaagaaaatggattatgaataatcgagcaaaactgagttattggctgactcacccttgattttggttatattttggcgctgtgcctcaagagaatactccgaccaggcccgcatgcgggcatacagctcggtgccaaactccttgaagtgctcaataagttcattgcgaaagatgagcggcggatttgtcaactgcttcaccgtggattgggcaatttttatgatggccatctcgttgtagacacgagagttctcattgcccagttgggtgcctaaaaataaatggcgaaaccattttaagttcagtctatggcattgaatagaaacagcactttacctctttgcttttcgtagcccgcctcattatagtagggctcatcgaccagtatgagtccctgtatggagacgagcacctggagcatggtgctgctgggcgaccaaacttcgttgtcgcgtcccatccatgtgccaagtagcgacacacataccctgccaccctcgtacaagtttggattgagacgatccgtgcagtagctgatgtagtggcacaccggcgggctcttcgggtaatcgcgcccaaattgaaagtcgaaaaagaatagagcgttctggtagggcgtgcgcttgggacccaccatcattacagacattaggtccatgcgatcctcgtaggcacgtaccacaactccgttaggtagcgaggacttaagcataagatattcccgctgcacagctcgctgatactgcgccttgttggccggggtaatcaggttgctaataaaattatgtgcagctggtgcattgggcagcacttggaaacaattctcgtccacggagggcgtgtctggaattattgaccaagatggtgaggagcaggccatgggacctgtctggtcaatagccggcagtgactcggaaagcgcgttgagattcaatggctcttccatagcttcgtcctcagccattgtattgcactcggtagcaccatcattggctagttccgcttcctggctgaccgcctcaatagcttcctctgcatcgctaacatcctctttctcttgcttgggattgtcatttgtcttgcccaacgtcacagcgaccgtcttgcgaattctggccatttgaaacttgatcaaataacagaagacttcgcagacgtcagcatctccacttgcaaccaattcaatttccaaatcatccattacatttattgtgggatgctttatgtccaacttattttcgctgtctggatgattattagactcgtcagaggtgatttcaccgcgagagtgtacgccagaatcattctggcagcaaaggataagttgtaaaaaaaaaacaaaattctttattgtttgaaggactcttaccttagtacgattttcaatcgcttttgcaatgcttctacgtgcgttggcgaacatttcgttgtacttgcagcgatactccctcactagcggcggatcttctattacctctactacctccacctggtaatcttgctcctccgagatctcatccgtgctctttttgcatagaacttcatccatctccgtagaggattttcgcttagtaggacttgatgatgactgaacagacggatccattaaaactggttccaactcagcttggagcgttgatgactctttgggaacggcggccgacgtctctggggtctctggggttgcgcgctcatgggtggcactgtcagaacaaactttagaggtaataggcttgcaacgcacaatgcctttgaaattaaactcgtcgaaaaatttagtatttagcaaacggtctaaggcccggcaatttttgtacacatccagcagatcgtaaagcacttccgctttccgattgggatgtaaaacgcggaacatcttttctagcactttcattgcctctgtggctctgtcaatgcccgtaagaatgtcgtcatcgttgtccgatgacgatatgtggctgttttccgattccgtctcccacgagtcttcggatccatctgatccgtagacatcttgatcttgttcattttgttcatcttgttcaaatggttgaaagagatcctgagggtagcacaatgtgatatggcccttcgcccaccaaacacgcacacgaccattcgggtagttgtcgatcacctgaccagcagtagagttaacatcctcacccgtgaagtttgacactcggatcaccactgtgccgggtcggtactggtaatcggtgtgatccttcatgtcataaacgctcagctcctccaatcctttgaacaaagggctaaacaaaatatatagaattataatttatatagctaaaaacaaaaaagtgcactcacattggattatcaatattcgtgtagatattgaaccacatgaccttggctatgcgtgcatcatggtccacgcactgaattaccccgtagtctgtggctcccgtactgatatcgttggctttggtcacaaaatcaccgggaaagaattcatggttgtccaaatgatgaataggatagagctgagtggagtgaacgcctgactccaccgtgccatcctgccagacgaccgtcaccgagctgtaaacgaccagcgtttccactacgatttcatcgccatccttgggagtggtttcctttttattaaaaggcgaataaattgttttcttgacagagcggatttttttctttacttgtcgcctcttagcagatcgcatcgttattctgggagcctggacttcgacaccggctgcagctgtggtagcagcggacggaggcagtgcgtcctcagcaacctccacttctttttcggcagtcatcgattgatcaagtggctgcatgaactcctcgaactcatcctcatcctccgatgtcaacacatcctctttgctgcgcttagacgacttgcaagcattgtgagtctggtcgcttggcggtcgaggcagtcgcataccgctgattttattgggcatgcggcggaactttggtacactgcgagcatttccactagtggaagcagatgcgttcaatttgctggccttgcgctgcatttttttctgggcgtgaaaaatggggatgtacttctccgctgtaatacgtgaaatacaatatatatatatataatttattgttacctctaaacctatttcctgttaacatcctaccttgttcattttcccagtcggcatatttaactaatagatcacattttgaatatttgaggtagaatcgatcgtgaatttgcagctcgtaggactcatagaggctaaggcgcttgactttgtgcagttcctcacccttgatcaaggaccttggctcctttagaggatcgctgtctgtgtcatcgctgcccgtggcatttccgattgcacggcaggaccaatccacattaattgatgtagtttctacagactccacggtgtactggataaataaggttattttcaattagcgatagtatgggagggccttctttagttaagtaaaaatgtaattaatctactatgacaaatcaaactagggcgaatgctacataaaataatagcgtaactagtatatacaatcggtcaatctgagactacaaatctataaaggattaatatctccctaccacagcacgacccttgcgagttaagggatgggtaatctccggggtcagattcttgacacgatccgggggcggcatgcgaccgattacaatgtttcctggaaagaagacattcggattgaagaccgtgcgatcgcattcggacacagcatccttaaacttgtggaaatcgttggaggtgatttccacacgggcaccgttggatgatctgcaaaaaaatattgaaaataatgttcgcccgagttgattgagagatatgaaacatacttgagcacagcgcactcattaatgtctatgatggtgcctatccaggtgtccatgcagagaggcacatattggttccactcggatatcggacgcagtcgctcggcgggcacatttttaatgaccattctggagcccattaccataacatcggcgcgtacattgacatcccgcacgtagcccgcctggccagccaaaacgttttctcctggcagacgcctccgcaccacatcgcctggcattagggtgcgatccgccagaccaatctgtgtatatgccacatgttcggatgtcgatggaacaaaagaaaagaagcaaacaaacacgtgtcaaaagaacttgaagagcaaactcaaaacagttgtgaaaacagttatttttttggagagaccgtgagacttacataacctcaatggagtttactcaccgactgttccgtcatcaccatctccttgccacccggatagaaggccacacgcacctcgcccctggacagcgaatcgacatcttcctcttcggaggaggaataggtctcggtcgttgcggttaccaagccaaaatggacgcgaccgcgccgatcaatgcgaaaaaccccatcctctaagaagaactgggactcggtgttaccctgggctttcgatggcacctggccaccacccgatcgacgggagtgggaatttgcgttatggcggctctcctggttgggggtccgacccagctcctgtgaggatggaggaggattcgcaagcgtcggtgtacgcggagcagcctccgccaaagactgttcctgctcctgctgcggttgacctggtgtaccacctggagcggccgcacccgccacatcgctcatcatgttaccaatcgtaagctgggaacatggacggcaagaactttgccgtggcgaatgctcggtgaatatatttcttctccctttattggccactaattattacaaattcctataatatgcccgacgagccactgacacacaaacacacatctaatttacggacactggagcaaactataaatttgcttggacaatttcgccaacttctttcgaaaaactataaataaaacaggcaaaatctacaaacaaaacgagaaactttgataaaaagaattttgtgactgaaaaataccggagttagataaaatcaatggttccgagttccagtgcctttaagcgagcactcgaaccattatcttgataacagcgctctgttaagagaaaacaacggttgaaacaagatgagcatttgcccgcgaaattgaaatgggatagtctaaatacaaattcagttactctcaattccgtaaaatagtaacgcgtgttgttgtctgcctaaaaactcaccgttacgttgatataataatgtaaatgtaaatgtgctttttccaaaaatttctattatcaaatgttaatttgacacatcgttcagggactacttgtattttagacatgtacagagccaagtgtatcacatcataggcgcactagcatcaaaatgctcccttccttttccaataaaggtaacgctcattgcgttctaccaagttaaaacaaattcaatctcattttaataccccgttaagcattttccataaacaatgaaacttggtttaaaaagaattgtttattcacaaaaattttagcatatatttcttccaatattgcacttggtctacatattgtcacatctaactatcataggcggagcgaactggtggtggcgcacaccaaaggagtagcccggtccactcttgccaggacgatagtacatgaggtcgtagtagttgggtccaggtccgacattctcgcccggaatagtggtgcgcggctgcatcgagtatatcggagcacgtgtcagtttgacattgatatcaccaccgccatatgcagccggacccggagaattcgtcttgttcaaaatctttgtttgtagtcccctgagatacaggtacaaataaaaataggcaacttagtaaaggaataactatggtaggattgaaatacgcacatgctatagctcgggactccaggacgaacggcattgac

SEQ ID NO: 21698 - DNA, 4927 bp, DROSOPHILA
aagaagttggcgaaattgtccaagcaaatttatagtttgctccagtgtccgtaaattagatgtgtgtttgtgtgtcagtggctcgtcgggcatattataggaatttgtaataattagtggccaataaagggagaagaaatatattcaccgagcattcgccacggcaaagttcttgccgtccatgttcccagcttacgattggtaacatgatgagcgatgtggcgggtgcggccgctccaggtggtacaccaggtcaaccgcagcaggagcaggaacagtctttggcggaggctgctccgcgtacaccgacgcttgcgaatcctcctccatcctcacaggagctgggtcggacccccaaccaggagagccgccataacgcaaattcccactcccgtcgatcgggtggtggccaggtgccatcgaaagcccagggtaacaccgagtcccagttcttcttagaggatggggtttttcgcattgatcggcgcggtcgcgtccattttggcttggtaaccgcaacgaccgagacctattcctcctccgaagaggaagatgtcgattcgctgtccaggggcgaggtgcgtgtggccttctatccgggtggcaaggagatggtgatgacggaacagtcgattggtctggcggatcgcaccctaatgccaggcgatgtggtgcggaggcgtctgccaggagaaaacgttttggctggccaggcgggctacgtgcgggatgtcaatgtacgcgccgatgttatggtaatgggctccagaatggtcattaaaaatgtgcccgccgagcgactgcgtccgatatccgagtggaaccaatatgtgcctctctgcatggacacctggataggcaccatcatagacattaatgagtgcgctgtgctcaaatcatccaacggtgcccgtgtggaaatcacctccaacgatttccacaagtttaaggatgctgtgtccgaatgcgatcgcacggtcttcaatccgaatgtcttctttccaggaaacattgtaatcggtcgcatgccgcccccggatcgtgtcaagaatctgaccccggagattacccatcccttaactcgcaagggtcgtgctgtgtacaccgtggagtctgtagaaactacatcaattaatgtggattggtcctgccgtgcaatcggaaatgccacgggcagcgatgacacagacagcgatcctctaaaggagccaaggtccttgatcaagggtgaggaactgcacaaagtcaagcgccttagcctctatgagtcctacgagctgcaaattcacgatcgattctacctcaaatattcaaaatgtgatctattagttaaatatgccgactgggaaaatgaacaagcggagaagtacatccccatttttcacgcccagaaaaaaatgcagcgcaaggccagcaaattgaacgcatctgcttccactagtggaaatgctcgcagtgtaccaaagttccgccgcatgcccaataaaatcagcggtatgcgactgcctcgaccgccaagcgaccagactcacaatgcttgcaagtcgtctaagcgcagcaaagaggatgtgttgacatcggaggatgaggatgagttcgaggagttcatgcagccacttgatcaatcgatgactgccgaaaaagaagtggaggttgctgaggacgcactgcctccgtccgctgctaccacagctgcagccggtgtcgaagtccaggctcccagaataacgatgcgatctgctaagaggcgacaagtaaagaaaaaaatccgctctgtcaagaaaacaatttattcgccttttaataaaaaggaaaccactcccaaggatggcgatgaaatcgtagtggaaacgctggtcgtttacagctcggtgacggtcgtctggcaggatggcacggtggagtcaggcgttcactccactcagctctatcctattcatcatttggacaaccatgaattctttcccggtgattttgtgaccaaagccaacgatatcagtacgggagccacagactacggggtaattcagtgcgtggaccatgatgcacgcatagccaaggtcatgtggttcaatatctacacgaatattgataatccaatccctttgttcaaaggattggaggagctgagcgtttatgacatgaaggatcacaccgattaccagtaccgacccggcacagtggtgatccgagtgtcaaacttcacgggtgaggatgttaactctactgctggtcaggtgatcgacaactacccgaatggtcgtgtgcgtgtttggtgggcgaagggccatatcacattgtgctaccctcaggatctctttcaaccatttgaacaagatgaacaaaatgaacaagatcaagatgtctacggatcagatggatccgaagactcgtgggagacggaatcggaaaacagccacatatcgtcatcggacaacgatgacgacattcttacgggcattgacagagccacagaggcaatgaaagtgctagaaaagatgttccgcgttttacatcccaatcggaaagcggaagtgctttacgatctgctggatgtgtacaaaaattgccgggccttagaccgtttgctaaatactaaatttttcgacgagtttaatttcaaaggcattgtgcgttgcaagcctattacctctaaagtttgttctgacagtgccacccatgagcgcgcaaccccagagaccccagagacgtcggccgccgttcccaaagagtcatcaacgctccaagctgagttggaaccagttttaatggatccgtctgttcagtcatcatcaagtcctactaagcgaaaatcctctacggagatggatgaagttctatgcaaaaagagcacggatgagatctcggaggagcaagattaccaggtggaggtagtagaggtaatagaagatccgccgctagtgagggagtatcgctgcaagtacaacgaaatgttcgccaacgcacgtagaagcattgcaaaagcgattgaaaatcgtactaagaatgattctggcgtacactctcgcggtgaaatcacctctgacgagtctaataatcatccagacagcgaaaataagttggacataaagcatcccacaataaatgtaatggatgatttggaaattgaattggttgcaagtggagatgctgacgtctgcgaagtcttctgttatttgatcaagtttcaaatggccagaattcgcaagacggtcgctgtgacgttgggcaagacaaatgacaatcccaagcaagagaaagaggatgttagcgatgcagaggaagctattgaggcggtcagccaggaagcggaactagccaatgatggtgctaccgagtgcaatacaatggctgaggacgaagctatggaagagccattgaatctcaacgcgctttccgagtcactgccggctattgaccagacaggtcccatggcctgctcctcaccatcttggtcaataattccagacacgccctccgtggacgagaattgtttccaagtgctgcccaatgcaccagctgcacataattttattagcaacctgattaccccggccaacaaggcgcagtatcagcgagctgtgcagcgggaatatcttatgcttaagtcctcgctacctaacggagttgtggtacgtgcctacgaggatcgcatggacctaatgtctgtaatgatggtgggtcccaagcgcacgccctaccagaacgctctattctttttcgactttcaatttgggcgcgattacccgaagagcccgccggtgtgccactacatcagctactgcacggatcgtctcaatccaaacttgtacgagggtggcagggtatgtgtgtcgctacttggcacatggatgggacgcgacaacgaagtttggtcgcccagcagcaccatgctccaggtgctcgtctccatacagggactcatactggtcgatgagccctactataatgaggcgggctacgaaaagcaaagaggcacccaactgggcaatgagaactctcgtgtctacaacgagatggccatcataaaaattgcccaatccacggtgaagcagttgacaaatccgccgctcatctttcgcaatgaacttattgagcacttcaaggagtttggcaccgagctgtatgcccgcatgcgggcctggtcggagtattctcttgaggcacagcgccaaaatataaccaaaatcaaggacatgcctgtggagtacaaggcgtcttgcgagctacccgaattcccgctgctaccatgcagtcgaggcttttgcatagcggtcaagcgcgttttgagccaacttcaaagcgagctaactgccttgggtgccaatctggttacggatgaacgtaatggcattgcgactggaattggcactgccccgcgcgctgctccggaggagatctgattgccactcatcctggccagcgtatgcctatgaaaatggtgcctatcagaagaaccacaagacttttgccgcctgcgttttgggagtctgatctggccctcggcaagtgtcagcgttttatagcccctatctcgaatctcgaatttctatccgctcgtattgctggcagacagccttttagttaaacaaaattttctacgattattggttattagtttaaaaaacaacaaacaaagctgaattatatatagcgcgcaactaagcataaattgttaaaggaatccgcctcatgtaatgtcagcgagttttactttatgttgttatcaggccagctaacaaataaaatttaatgttttgttgcgaatattgtgaacgctggcctacgcgaatatttgtaggcattccactagaacctagcttagttagtccatcccacgtccaatcagcaccatgtacgtaatattgtaagctagccaatgcgagaaatgtgaataaactagcaattttatttattatgcctccaa

SEQ ID NO: 21699 - protein, 1398 aa, DROSOPHILA
MMSDVAGAAAPGGTPGQPQQEQEQSLAEAAPRTPTLANPPPSSQELGRTPNQESRHNANSHSRRSGGGQVPSKAQGNTESQFFLEDGVFRIDRRGRVHFGLVTATTETYSSSEEEDVDSLSRGEVRVAFYPGGKEMVMTEQSIGLADRTLMPGDVVRRRLPGENVLAGQAGYVRDVNVRADVMVMGSRMVIKNVPAERLRPISEWNQYVPLCMDTWIGTIIDINECAVLKSSNGARVEITSNDFHKFKDAVSECDRTVFNPNVFFPGNIVIGRMPPPDRVKNLTPEITHPLTRKGRAVYTVESVETTSINVDWSCRAIGNATGSDDTDSDPLKEPRSLIKGEELHKVKRLSLYESYELQIHDRFYLKYSKCDLLVKYADWENEQAEKYIPIFHAQKKMQRKASKLNASASTSGNARSVPKFRRMPNKISGMRLPRPPSDQTHNACKSSKRSKEDVLTSEDEDEFEEFMQPLDQSMTAEKEVEVAEDALPPSAATTAAAGVEVQAPRITMRSAKRRQVKKKIRSVKKTIYSPFNKKETTPKDGDEIVVETLVVYSSVTVVWQDGTVESGVHSTQLYPIHHLDNHEFFPGDFVTKANDISTGATDYGVIQCVDHDARIAKVMWFNIYTNIDNPIPLFKGLEELSVYDMKDHTDYQYRPGTVVIRVSNFTGEDVNSTAGQVIDNYPNGRVRVWWAKGHITLCYPQDLFQPFEQDEQNEQDQDVYGSDGSEDSWETESENSHISSSDNDDDILTGIDRATEAMKVLEKMFRVLHPNRKAEVLYDLLDVYKNCRALDRLLNTKFFDEFNFKGIVRCKPITSKVCSDSATHERATPETPETSAAVPKESSTLQAELEPVLMDPSVQSSSSPTKRKSSTEMDEVLCKKSTDEISEEQDYQVEVVEVIEDPPLVREYRCKYNEMFANARRSIAKAIENRTKNDSGVHSRGEITSDESNNHPDSENKLDIKHPTINVMDDLEIELVASGDADVCEVFCYLIKFQMARIRKTVAVTLGKTNDNPKQEKEDVSDAEEAIEAVSQEAELANDGATECNTMAEDEAMEEPLNLNALSESLPAIDQTGPMACSSPSWSIIPDTPSVDENCFQVLPNAPAAHNFISNLITPANKAQYQRAVQREYLMLKSSLPNGVVVRAYEDRMDLMSVMMVGPKRTPYQNALFFFDFQFGRDYPKSPPVCHYISYCTDRLNPNLYEGGRVCVSLLGTWMGRDNEVWSPSSTMLQVLVSIQGLILVDEPYYNEAGYEKQRGTQLGNENSRVYNEMAIIKIAQSTVKQLTNPPLIFRNELIEHFKEFGTELYARMRAWSEYSLEAQRQNITKIKDMPVEYKASCELPEFPLLPCSRGFCIAVKRVLSQLQSELTALGANLVTDERNGIATGIGTAPRAAPEEI

SEQ ID NO: 21700 - DNA, 4742 bp, DROSOPHILA
gctcgtgggcgaagtagtttcatcccctgagcgaaacggttatgcacatagagaatattttacattgctttaaaccattggtttattgttctacggaaacattgaattcctctttttaagttagttccaccaaactagttggggaacttacttctttttgcctttgcccttcttggaacccttggcttccttggcggctggttccgctgcgttgttcgattcggaagtcacaggatcggcggtcggcttggcaccagctggagcggcagctcctttcttagcacccttgtttgattccttttttgccggcattctaaaagaaaaatccggaaagtatacaagttttaagcttgtgtctaaaaatataatttttttttactaacttcacagaaatttggaaaaaatcacagcgattttttcatcagccaaaatcgatgttgctcgcttgaaatttcgacaaaaagtgatttcgtttgcatttagttctatcatctcgaaactaaatgtcaacgcttgcttagaatgtatccagtttagcaaaaacaaattttgaaaaattaaccgttttgcgaatcggttaatgattcgcgccagttttggggggcggactctctttgaactctccgtaataattccgttctctctctccgtcagttgtctcgttattccgatttccgtgcagttgaggaaacgaaagccaagtgcgcgcaacataggccgcataaatttctagtgcaatttctatttaggtaaatttagtttttagcgcaaagtgaattcctggcactttaggaatccactcataagttgatacatcttattcgaaaaaaaagtgtcagatatctataaagaaaaaagcaggccaagttttttttcggacgccgcaaaaaaaggaatcacatcaattatcgattttgtgcacatgaaaagcgtttctgcaattacctagaaataattgctcaaattccctcaaaagtcaagtgcacaaatcggcgaaataatggcagccaagcggaatgcggtgaccacggaagctccggaatcgtcggcgcccggcgaaggtaccgccctcgccctcgactcccgcctgtccaagcgcgtggagagcgtcatccccaagaagcggtgagtgccaaagagtgccaaacaactcaaactaagcccctttcacaccaaagaaatcaatctaaaccagaagattcaatttcagttttaattgttgtatctatagtagtaaatatttatgtttaatttagtttattttagttccaaaaagaaatttaaagtatttttttgaaacatttgtttaaattaaccttaagtcggtaatgggtgtagtttactaataactttatttaaccatttaaattaaaaaaaaaaattccttgttttatcacaattgaagccacttagtccgtatttattctaatgcaatttttatgttaagcctaaccccaatgttaattaatataaataatatttaaaaaacagacatgaggcgcttaagtggttcggatggggatataacgactcgcagttttatggtaaggatggtatcatctgttttcgcggtgaaaagtgagtagagtacattcaatttccgaattgaatagtgaaagcatatcccatttccccacagatatcccctcggtggatgcgagctgcccagtttcaccaagtgggtggagaagaagttcgatctgcgagtggataccaccaagcagtatccccagttgccacgaacgtatccgcggccagtggagaacgcacccttcctgcacgaactgaagggcaccacccaggtggattactctgcggagggaatcgatcggttggtgcggtgccatggccagaccctcaacgatatatacagcctgtggcaccacaagtttcgacggatacccgatttggtggtgtggccacgttgccacgatgaggtagtccagttggtgcggctggccaacaagcacaatgtgatgctggtgccttttggtggtggaacgagtgtatcgggagccatcacctgtccgcagaacgagagccgaatgatctgcgccctggacacctctcagatgaatcgactattgtggctaaaccgggagaatctcaccgtatgctttgagtccggcattgtgggtcaggatctggagagggtgttgcgaagtgaaggtctgacagttggccacgaaccggattcgtatgagttcagcaccctgggcggctgggtggcaactcgtgcatctggcatgaagaagaacgtctatggtaacatagaggatctggtggtgcgagttaggatggtcactccgtcgggaacgctggaacgtgaatgcagtgcgccgcgcgtgagttgtggacctgatttcaaccatgtcatcttgggatccgagggcactctgggagtaatcaccgaagtggtgctcaaggtgcgtcccctgccatcgttgaggcgttacggatccctggcctttcccaacttcgagcagggagtgctcttcatgcgcgaagtggcgcggaggagatgtcaacccgcctccgtccggctgatggacaacgagcagttcatgttcggccaggccctgaaaccggagaagtcctggtgggccagtgtggtggatgccatgaagcagcgctacgttacctcctggaagggcatcgatctcaatcagatctgcgcggccaccttgcttttcgagggcgatttaaaggatgtccagcggcaggaggcactcatttacgagattgccgaaaagtttcagggatttccggcaggtggacaaaatggggaacggggctatatactcacctttgtgattgcctacattagggtgagtattttctgaatttgtacaaatgaaactaaaagtaaagatcaacatcattatctttatgacaatgtgctatttccggttttccggctttacgtttccctatttttatttattattgttgtttggttttcgagtcgtttggtagaatgattttaatttgtagtttgctcatttcgatcgattgcggactatatatattatatcagcgctaatatggaaataattaacacaattgatctgtaactaatataagaataaatggcaaactttttataaagatttatttatcactaatacaaaccttttttatattatcttttatataaatattcatttaatgttcatatattttttaaggactttggactacatcagggaattgtggcggagtcctttgagacatcggtgccttgggatcgctgcagtctgctctgtcgttctgtgaagcagcgtgttgtttcggtgtgtgctatattaaaaattattcatataaacaataattatcatctcgaccattgcaggagtgcagcaaacgtagtattaactactataccatttcgtgtagagtaacccaaacctacgatgccggtgcctgcatctacttctactttggattccgcagtacggacgtggccgatcccgtcgagcttttcgaggccatcgagcacagtgcccgcgatgagatactgtcctgcggcggatcactgtcccatcaccatggcgtgggaaagatacgaagccattggtaccgcaatgccgtcacggaaacgggcagttcactatattcggcggccaagcggcatctcgatccgaagaatatctttgctctcggtaaccttctgcccctggaggaggctcaggcttctccgccaccacccacatcatcgacaccaccaaaggccaaattgtagagggtagccaactagatagtgcgcttagttcgtttactagtcttagtcactttactgattttcctagtcgctcttgggggttcgggtctccagttcttttgtagcgggctcatgttttctatgggttttgataaataaatggagtatttctcttgaagcatttcttctttacaattttgaatacctatttcttgctgtgtagcaatggccatagacaacaactgatttgcgtgtgcgtgtcccggctgcagaccaaatacgaaatgctgatcattgtcttctcatctgctcatcgaagtcatttgcggcttgatggcgcaccgttccgtccaagaaaagatccaacatcgaagatcggagcgcccatagcccagagatcaaatgtcatcaagttgtcaacttcgttagcatgccgcaaggcagcgatccagcttggcttaaagatcttcttggccaggctggttaaacggatgcacagagaaaaatgtacaaattagttttaaataaccaaataaataaaatactatttctgaagggcataaaaacgaatttgagttgggatcttaaaatatttaaagaggtgctactaggtttaagaatttttctaagtgtgcgaataagttggggaatgaggcaactccggcggcttattgatggccgaggagaagtcgtcgacttggcctgtcttgttaccctggcattggatactatatggtatatgcggtacatacccccgcaagtgcttttcggcccggctaatacacacacatgcggcctataaataaagattacaatcggcaaaagtgagcagaagagaagtccgtctaagccgcggcctgccgcctggaaattgtcagcaattaacccgcgggtcagtgccggaaaacgctggcagccctgcgtcccaaaccctgtgatttatgccacagccacagacgaggcagcctcccagcccagaaacccacaatcaaggccggcggagagcggaggattacgatcc

SEQ ID NO: 21701 - DNA, 1896 bp, DROSOPHILA
atggcagccaagcggaatgcggtgaccacggaagctccggaatcgtcggcgcccggcgaaggtaccgccctcgccctcgactcccgcctgtccaagcgcgtggagagcgtcatccccaagaagcgacatgaggcgcttaagtggttcggatggggatataacgactcgcagttttatggtaaggatggtatcatctgttttcgcggtgaaaaatatcccctcggtggatgcgagctgcccagtttcaccaagtgggtggagaagaagttcgatctgcgagtggataccaccaagcagtatccccagttgccacgaacgtatccgcggccagtggagaacgcacccttcctgcacgaactgaagggcaccacccaggtggattactctgcggagggaatcgatcggttggtgcggtgccatggccagaccctcaacgatatatacagcctgtggcaccacaagtttcgacggatacccgatttggtggtgtggccacgttgccacgatgaggtagtccagttggtgcggctggccaacaagcacaatgtgatgctggtgccttttggtggtggaacgagtgtatcgggagccatcacctgtccgcagaacgagagccgaatgatctgcgccctggacacctctcagatgaatcgactattgtggctaaaccgggagaatctcaccgtatgctttgagtccggcattgtgggtcaggatctggagagggtgttgcgaagtgaaggtctgacagttggccacgaaccggattcgtatgagttcagcaccctgggcggctgggtggcaactcgtgcatctggcatgaagaagaacgtctatggtaacatagaggatctggtggtgcgagttaggatggtcactccgtcgggaacgctggaacgtgaatgcagtgcgccgcgcgtgagttgtggacctgatttcaaccatgtcatcttgggatccgagggcactctgggagtaatcaccgaagtggtgctcaaggtgcgtcccctgccatcgttgaggcgttacggatccctggcctttcccaacttcgagcagggagtgctcttcatgcgcgaagtggcgcggaggagatgtcaacccgcctccgtccggctgatggacaacgagcagttcatgttcggccaggccctgaaaccggagaagtcctggtgggccagtgtggtggatgccatgaagcagcgctacgttacctcctggaagggcatcgatctcaatcagatctgcgcggccaccttgcttttcgagggcgatttaaaggatgtccagcggcaggaggcactcatttacgagattgccgaaaagtttcagggatttccggcaggtggacaaaatggggaacggggctatatactcacctttgtgattgcctacattagggactttggactacatcagggaattgtggcggagtcctttgagacatcggtgccttgggatcgctgcagtctgctctgtcgttctgtgaagcagcgtgttgtttcggagtgcagcaaacgtagtattaactactataccatttcgtgtagagtaacccaaacctacgatgccggtgcctgcatctacttctactttggattccgcagtacggacgtggccgatcccgtcgagcttttcgaggccatcgagcacagtgcccgcgatgagatactgtcctgcggcggatcactgtcccatcaccatggcgtgggaaagatacgaagccattggtaccgcaatgccgtcacggaaacgggcagttcactatattcggcggccaagcggcatctcgatccgaagaatatctttgctctcggtaaccttctgcccctggaggaggctcaggcttctccgccaccacccacatcatcgacaccaccaaaggccaaattgtag

SEQ ID NO: 21702 - protein, 631 aa, DROSOPHILA
MAAKRNAVTTEAPESSAPGEGTALALDSRLSKRVESVIPKKRHEALKWFGWGYNDSQFYGKDGIICFRGEKYPLGGCELPSFTKWVEKKFDLRVDTTKQYPQLPRTYPRPVENAPFLHELKGTTQVDYSAEGIDRLVRCHGQTLNDIYSLWHHKFRRIPDLVVWPRCHDEVVQLVRLANKHNVMLVPFGGGTSVSGAITCPQNESRMICALDTSQMNRLLWLNRENLTVCFESGIVGQDLERVLRSEGLTVGHEPDSYEFSTLGGWVATRASGMKKNVYGNIEDLVVRVRMVTPSGTLERECSAPRVSCGPDFNHVILGSEGTLGVITEVVLKVRPLPSLRRYGSLAFPNFEQGVLFMREVARRRCQPASVRLMDNEQFMFGQALKPEKSWWASVVDAMKQRYVTSWKGIDLNQICAATLLFEGDLKDVQRQEALIYEIAEKFQGFPAGGQNGERGYILTFVIAYIRDFGLHQGIVAESFETSVPWDRCSLLCRSVKQRVVSECSKRSINYYTISCRVTQTYDAGACIYFYFGFRSTDVADPVELFEAIEHSARDEILSCGGSLSHHHGVGKIRSHWYRNAVTETGSSLYSAAKRHLDPKNIFALGNLLPLEEAQASPPPPTSSTPPKAKL

SEQ ID NO: 21703 - DNA, 5401 bp, DROSOPHILA
cgattagatttcacgtgtttaaccagataaataataatactgatcacaatgccaatagcgtgagaattcagtttgtgctaacagttcaccattgaaaataatgtttgacacttcgatcgattggacaataaatatagattgcgtacgtatatgtaaatatatatatatatagaatttgtattgctgcaccataacaactaacataaacagcaaatatcttttgtaatcaagtaattgatctatacatataattttgggaacaaatttgaacaacgctgggcgtaaaataggcgctagttgaaggtaatttgtctgattatcgcgagtatatataatgagtgcgtatatatatacctataatcgacgctaattgcactatttatatgtattatgctgatacattccactggcggtcagaataatggtagcacaaacttccaatacaaatgccacttcaatgtaatctacgcattgtaataataaagtactggaactaataattggccaaacatattattgcttccttaagtgcataacttaactatttacataagatatcgattagatactgattaaataaatccaacttataagtggctcaattcgaattataaacagctttaaagtcaaatcataaattcaattcatcttcattcaacttaaattttgagaatacttgttgtgggctataactactaaatttggccgtcttctggtaatattcttctatcgagtatggaggtgcaaagaaaatggcagtttggattcgtctatctaatatacaaaaagcatgggatcctctagctggcgattgtgctctatgactgatggtttgaccgccagtacggaagggtattatgaactaacactatgatcggtccaagtaatttgttatccgatttcggcgatgctgcttattggaaaaatgcgttagaaaaatgcacaaaaagtcttcggtctcgggatgggaatcggcttaggtcggtaaatagatggtccatcattttctcgacaacattatgttcatgaccgtgccgcagtttagcagcactcgtttggcatcgctcaggttggcattggtcaggtcgtagccgtcgatttccagcaacttgtcgttcagattaagcaggcgggcggcattcgtattgggcgttatggagctcacaaagatgccaacctgtggtggtaaattgttaaaattataggctgatataaggattaaatatattcgaactaacctgattaagaagctcggctatatcaaagcctatagagttctcccattttagagtaacctgtttgactgtcggatttttgtggacaccaaagatccaggtggatttcttatggctcgctttggaagtattgttagtggccgtggaattaagcgagtgctgcgacatagtgtcatccagctcctggtcttcctcctccggatttggctctaaattattgctaatattattttggtagtccaactgatcgactgactcttcgacgtcctgagcgccaatcgctgtcgttttaaagttactattgctattcaaagcatcttggtagatggtttgttcttgcagctgttgttgctgctttcgctgcctcatggactcgtaaaggttgagatcctcgggcgttttctttgtgtaaactcgagctatgtggtatggtggtggttccaaccggggtgttggcagcgcctgttgctgcattggttgttgctgcagcggttgcaactcatagtcctgatccccgtttaaatgcgtggtgggaagcggcgtgttggcctcgacgtaaagctgctgatagtgtgcttcgtagttgaccagtggcaggccgtagtactcctgcgttggcaccgggtgcgccatctgctgcggttgctgatagactccgtagatgtgtgtcgtttcgggcgcaatgccgtatattgcacttgttgtggcctggtccacaacatcctggttggcattgttgctatcacagtgaatttgtccattggttactacgcgtgcctcccttacctcgctggcattggccgatgaggtcgccgcctgagcctgcctcacatatttggacatttgtcgcagctccttgggataaggtgtgggtgaacgcattaaccgcacagacccagccatctgatcgggcgttggcgtcggcggagcggccacaaagctgggataattgggcgctggctgtgctttggcgttgctaagaatggtggcctcctcggcgaagcaaatccttctcgagggactcgcgtgaggctgctgctggttggcgtaaacgaactcatactgctcctgagcctgctgttgggcctgtatactgttcatcttgaatgtgacttggggcagcatgaagcaggtcaactgggtctttgtacttgcatctagatattgcagcggcaccaagggctgcgattggttatcgcttagccacatcgatgtgagattaaccagatttaacatcgaaactggcaatgcatttatgtagttattcaccacattgagtaccttcatcttgctcaggtttccaatgttctgtggtagagcggacaactgattgttcgccacacttagcacactcaactgctgacagctgcacagctcatctggtagttgtcgtagttgattatcatcggcgaacagaaagcgaaggctacgcaacatcccaattgtgctaggtaggcgtataagcttgttgtggcttaatactagttcctcgagctgttccaagtagcttatgctgtcgggtaactctgtcaaaccgtttgactcgcacttgaatgtcaccagggacttcagcatgcccacgctgaagggaaaggcctccaggctgttggagcatatagatagtacctccacattgcgccagttgctcagctcgctgggaagagtgtccagcaagttgccattggcctcgaagtgctgcagatcgcgtagctttccaatgttggccgaaacacgacgtatttgattgaagtcgatccatagttcgcgaagggacttcaactcgccgacaacttcgggctgtggagttataaattaatttagaagactttaaatttaagcatttaaaaacgtgatttacaagatctgacaaaagtttaacgacactcaaccaaatatttataatttgagattaaaaaaggcacttatttacaaagcttttgcgttgaatgacattgagtttctttgtaattctttgtcagagcttataagttcccggttcttattgcttaccaactcggtaaattcattaccgccaatgtccagcctctgtaggttgattagtctcaccatggatttgggaagtgtcatgagattgttgagtcgcagctccagaattctcagatttaccaatcggccaaagttggctggtaggaattctagataggtctcgtttagcagcagctcctgcagcgaaattagcgaggtaatggcatcgggaagacgttgcaaactgttgcagctcaggtccaagtgggttaagtgcttacaggacttgatttcctcgggcacattgacaataactaatggaataagtggtattttagtactgagtgaagcacaaagaaggaaacctcacgattccggttgagatccagatgctgcagctgtcgcagactgccaatggcctgtggaatgctctccaaattgttgctgtttacgtgaagcacccttaatccttggcaataaaacaattgcggtggcagagcttgcaactggataataatgcagggtaaattaagtacacagataagaataaatagggacgtactcttgtggtgctcaggtaaagctcctccagggttcgctcgtgctgccaaacttctgggaaatccgttagcggggtattactgtagtccagcttgtcgatcacctcctcgcgcttgaatttgaagcaggggaagcatttgctcagcagcggcatctttggattaagtgtattgcttttcgttcgttaattaaggcacgtttgtggctgctgcaatttgtattcatgtacatatgtaagctgactgtctggacgggatttggggttgggctcctacactcacctgtgattcatcgcctccgatggaacgttattgttggtcctgctccattacattccatgtccattggcatttttgggcttgttattgttctgcccaccaacactaacacgcacaggcacactcacccacactcgcatacacacagaggcgactgactgagcctctcttttcgctctttctcgcatttactgtccccaaatagatgatttcattgcttactcaaacgctgtatgtcaaacatgagggggtaatatttatttttgccatccaattgcgttttatttaatgtttttcgctttgaaaatgacaagttgcttgcaggtgttagtgttggtaaatgccgaacgcgctagtggtgggtggtcaattagtcacggatggaattgtcagtagcgacctatagattgtttatatacctaaaaaatatattttaagcttcaagcttacattttaaagacattaagtgattcgttctgacatgatgcttgtaagttaatattccttagtaattatttgcagtaaaagatatttctaagcatcgcataactatcgaaagtgcacagtctcggttttatagactgacacacagatggcgccacaacgcaaccgttccattcaaaatgggaactaaaaaaacgttcaaaaatattgcagttacgcttgcaattttactcaaaacgcttaacgcattgctaattaatatttactctgcacttcctggctgcgattgcgcttaggtgagccgcgcctatcgtgttgccccaacggctgataacggcatctcgctaacttggtaataaaacaaataacagtaagggaaatcaagcgttttcgaagttgcaaagttcaaatgggttaatgcgaattccggtcaaaaacaaccaattaaagctgagctcacactatcccaagtcagacattaagtgtcgtcaggtttcgtgtgtttcgatggtgtgaaaattattcaaataaccgcctttttttccatttttttctttctatttttgctttttgtcgtacggctgcgtcgtcggcggagcattgacgaatttacacttcaaacaattgttaaaaactctacagcatagtgcaaataagtacgtaataaaccatgtgtgcttgttgcccctgccatttgcaagagaaaagctgagctcagttatggttttaaagttgtccgctgcagttggttccgtatccgaatcgaaatcggtcgatgtgagtgcgatatggtgatatgggatatctgtgcaaatcttgcattagctttgcaaatcttgctgcatcacttgagcaaatcgtgcaatatcaatataagagtgtgttatctatcgtgat

SEQ ID NO: 21704 - DNA, 2888 bp, DROSOPHILA
tttaccaacactaacacctgcaagcaacttgtcattttcaaagcgaaaaacattaaataaaacgcaattggatggcaaaaataaatattaccccctcatgtttgacatacagcgtttgagtaagcaatgaaatcatctatttggggacagtaaatgcgagaaagagcgaaaagagaggctcagtcagtcgcctctgtgtgtatgcgagtgtgggtgagtgtgcctgtgcgtgttagtgttggtgggcagaacaataacaagcccaaaaatgccaatggacatggaatgtaatggagcaggaccaacaataacgttccatcggaggcgatgaatcacagatgccgctgctgagcaaatgcttcccctgcttcaaattcaagcgcgaggaggtgatcgacaagctggactacagtaataccccgctaacggatttcccagaagtttggcagcacgagcgaaccctggaggagctttacctgagcaccacaagattgcaagctctgccaccgcaattgttttattgccaaggattaagggtgcttcacgtaaacagcaacaatttggagagcattccacaggccattggcagtctgcgacagctgcagcatctggatctcaaccggaatcttattgtcaatgtgcccgaggaaatcaagtcctgtaagcacttaacccacttggacctgagctgcaacagtttgcaacgtcttcccgatgccattacctcgctaatttcgctgcaggagctgctgctaaacgagacctatctagaattcctaccagccaactttggccgattggtaaatctgagaattctggagctgcgactcaacaatctcatgacacttcccaaatccatggtgagactaatcaacctacagaggctggacattggcggtaatgaatttaccgagttgcccgaagttgtcggcgagttgaagtcccttcgcgaactatggatcgacttcaatcaaatacgtcgtgtttcggccaacattggaaagctacgcgatctgcagcacttcgaggccaatggcaacttgctggacactcttcccagcgagctgagcaactggcgcaatgtggaggtactatctatatgctccaacagcctggaggcctttcccttcagcgtgggcatgctgaagtccctggtgacattcaagtgcgagtcaaacggtttgacagagttacccgacagcataagctacttggaacagctcgaggaactagtattaagccacaacaagcttatacgcctacctagcacaattgggatgttgcgtagccttcgctttctgttcgccgatgataatcaactacgacaactaccagatgagctgtgcagctgtcagcagttgagtgtgctaagtgtggcgaacaatcagttgtccgctctaccacagaacattggaaacctgagcaagatgaaggtactcaatgtggtgaataactacataaatgcattgccagtttcgatgttaaatctggttaatctcacatcgatgtggctaagcgataaccaatcgcagcccttggtgccgctgcaatatctagatgcaagtacaaagacccagttgacctgcttcatgctgccccaagtcacattcaagatgaacagtatacaggcccaacagcaggctcaggagcagtatgagttcgtttacgccaaccagcagcagcctcacgcgagtccctcgagaaggatttgcttcgccgaggaggccaccattcttagcaacgccaaagcacagccagcgcccaattatcccagctttgtggccgctccgccgacgccaacgcccgatcagatggctgggtctgtgcggttaatgcgttcacccacaccttatcccaaggagctgcgacaaatgtccaaatatgtgaggcaggctcaggcggcgacctcatcggccaatgccagcgaggtaagggaggcacgcgtagtaaccaatggacaaattcactgtgatagcaacaatgccaaccaggatgttgtggaccaggccacaacaagtgcaatatacggcattgcgcccgaaacgacacacatctacggagtctatcagcaaccgcagcagatggcgcacccggtgccaacgcaggagtactacggcctgccactggtcaactacgaagcacactatcagcagctttacgtcgaggccaacacgccgcttcccaccacgcatttaaacggggatcaggactatgagttgcaaccgctgcagcaacaaccaatgcagcaacaggcgctgccaacaccccggttggaaccaccaccataccacatagctcgagtttacacaaagaaaacgcccgaggatctcaacctttacgagtccatgaggcagcgaaagcagcaacaacagctgcaagaacaaaccatctaccaagatgctttgaatagcaatagtaactttaaaacgacagcgattggcgctcaggacgtcgaagagtcagtcgatcagttggactaccaaaataatattagcaataatttagagccaaatccggaggaggaagaccaggagctggatgacactatgtcgcagcactcgcttaattccacggccactaacaatacttccaaagcgagccataagaaatccacctggatctttggtgtccacaaaaatccgacagtcaaacaggttactctaaaatgggagaactctataggctttgatatagccgagcttcttaatcaggttggcatctttgtgagctccataacgcccaatacgaatgccgcccgcctgcttaatctgaacgacaagttgctggaaatcgacggctacgacctgaccaatgccaacctgagcgatgccaaacgagtgctgctaaactgcggcacggtcatgaacataatgttgtcgagaaaatga

SEQ ID NO: 21705 - protein, 849 aa, DROSOPHILA
MPLLSKCFPCFKFKREEVIDKLDYSNTPLTDFPEVWQHERTLEELYLSTTRLQALPPQLFYCQGLRVLHVNSNNLESIPQAIGSLRQLQHLDLNRNLIVNVPEEIKSCKHLTHLDLSCNSLQRLPDAITSLISLQELLLNETYLEFLPANFGRLVNLRILELRLNNLMTLPKSMVRLINLQRLDIGGNEFTELPEVVGELKSLRELWIDFNQIRRVSANIGKLRDLQHFEANGNLLDTLPSELSNWRNVEVLSICSNSLEAFPFSVGMLKSLVTFKCESNGLTELPDSISYLEQLEELVLSHNKLIRLPSTIGMLRSLRFLFADDNQLRQLPDELCSCQQLSVLSVANNQLSALPQNIGNLSKMKVLNVVNNYINALPVSMLNLVNLTSMWLSDNQSQPLVPLQYLDASTKTQLTCFMLPQVTFKMNSIQAQQQAQEQYEFVYANQQQPHASPSRRICFAEEATILSNAKAQPAPNYPSFVAAPPTPTPDQMAGSVRLMRSPTPYPKELRQMSKYVRQAQAATSSANASEVREARVVTNGQIHCDSNNANQDVVDQATTSAIYGIAPETTHIYGVYQQPQQMAHPVPTQEYYGLPLVNYEAHYQQLYVEANTPLPTTHLNGDQDYELQPLQQQPMQQQALPTPRLEPPPYHIARVYTKKTPEDLNLYESMRQRKQQQQLQEQTIYQDALNSNSNFKTTAIGAQDVEESVDQLDYQNNISNNLEPNPEEEDQELDDTMSQHSLNSTATNNTSKASHKKSTWIFGVHKNPTVKQVTLKWENSIGFDIAELLNQVGIFVSSITPNTNAARLLNLNDKLLEIDGYDLTNANLSDAKRVLLNCGTVMNIMLSRK

SEQ ID NO: 21706 - DNA, 3382 bp, DROSOPHILA
acagagaaccgttaaccgaagtcggggggacgaggaaattctcttaaaatgcgaacaaaaacatatttatttattttattcattttctactctgtatttttaacagcaagcaaacacaatccgtctactggcaatataactttgttaagtattaaaaaaaaacttttgtttttaatgcattccactgtacttacaacaacaacaaaaacatatatatatttattatttttgtttatttgtgatggcatatatagtgccagcatctttttgtaatccacatatgaatattacgaaaaaattattaaaattagtatatatcaaaaatatcattgtgttgcgaaggtaaataaaatattgtgtttttaattgaagctaaagataaatttcagcaaaaatgttacttgttaatgtatgaaaagcaaataaaagagaacaaattaagcgcatattgttaaatttccaaatacaacgcaatctaagaaagtaatattgatcaaagtttttgattaaagaacatagcaagcaatcaatttaaatgcaaaacaaacaggacaaactgaaaaacaatttcaaattgcacttaaacgttaccgattttattagtaacaaccaatattctttagcctatcccaattattatgttgttgtgtttgataaccaagttctatgagtaagtttaattagtatataatgattttactgagcgtataacatcaatttgtatcttcttcaactgatgtttccgactaattttttaaactggatgcacttttggcatatactaccagatgctagcaaaatgaaattgaaaacgtaaacgatagttgcgttacaattatgcatataaagaaaaacgaataaagtattgtataagacaaagtttatgttttaatcaaattgaaaagaactttcgaaaaacgtttattaacaactgggcacaaattcaacaaatgcaaaacgttatcctatcgtatcgtatggaggagccttccattgcccctcagttgctgctctgcaaaatggagaccggctcttgcataatctcctgaatcttcgcctccggaactgccaccccattcgccagcagagtgtgaacgatgccatcatgtttattgccacttgagcgtgcctgaagcacgaattccgtgtcctgcagcaggaacttggtgtctgtgccgccgtgaacaaaaaccgactgcgatatgggggtaataaagtgtgtgagtatggtgtgtgtgtgtgtgtgtgtaggtggcaatagcccatttccctcacctcctcggtgcgcagctcatcgtttacgtagagactcagcgtgtccagtttgagcattattctatattcctgcggcgcatcggcggccgcatcatccgtatatagccacagtcgatattgccgtgtcatgtcctcggtgtactggtcgtgcgatttgccgtcgatgtagagggagtactcgtatttgaagcccggcgcaggatcaacgcgtatgatgcagcgcgtctgatcgatgtgaaaggtgtcttcgccaaccagtttgaacatccagtcgcgacgcaggacttcctgggaatttgattaggagaagaaaattaggcggatgaactttatagttcattttgatagccctttaaattgttgcatttgctctaccagtttatcactcatacgcaccgttgtctttggtaaaatcttctattttgtttgtttgtatcgatttaatttatacagttcatatggacttaaagtttaaaagcactctaaagcactaaagcactttagtaagaaagaataaacccaacggtgtactaaacataaaaactgaaatgctaaatgtcggtgagggatgacagaagtatatacatatatgtttagaaataataagacccaaagaatttaattaaatatttttatcaactaaatgagacctttttaaatatcattctgcattgctgaagtacgattacgtacgtacacgacccgtaattaagtttaccttcacaatgcaaatactttacgagctccaaagccaccaaccacccattcagctcgctgggagctaaaaaacttacccgtccattgacccaaatcatgcgccgcccactggttgtgccatgttccagctcgatgcggtacatctgcgcaaaaaaaataaaaattacaaaaaataaaaatgggaatgggcggataattatcgcgaatttccattaaatgtaagtggcggttttgaaaaataatcgcaggtaccttgccattgatgggcacacaccattgagccacaatattctgtttgttatagcgctggtcctcgggcacatgatcctgcgtcatcgtgggctgcgtggacagattctccaggcgcagtgtgggcgaaagaaaggacatgggtccgaagcctcgtgtcgatctggctctggcccaccgccagtcaatcaataaatcctattaatatttatagtaatcgcctttaaagtgcagccaactaaatgggttacacaaaaccagagaaaaccacgtaggtataatatatctataatatttgggaagttcaaggaactcaagtttgtctaatctgcagatctggctgcaatgcactttcactccacccctatgtttgtgggcttagaccccgaaatcgggctagaatctattccgctctctgaattcaacgggcggcgagaaaacccaagaccgaaccgcacgttgttagcgccaatggcacactaaacaacaaaccaccgtgtacaataaaagccaaaaggaggagccaaagaaaaactagttggcccggctggctgcctttgccttttggccgggctctccggcagcccagctcagctctgttccgttctgttctgttctggccttagcctcagccgtgcttctggccgagagtcgcggtcgcgtttgtcggtctgccaaagtgcagagcaactacgccgcgtggcgccaaaacagagttgatttgtttccactagtcgtgtgcgtgtggatatgaggctgagtgtgtgtacagggaaagtctcctaagacctacacgcatatattggccatactttaagcggcgatctttggaatatagttagcattcaagccggatacttggcaccctcatacaatcctattcctacataactgtaaagtttacatacccaatccattttctacacaaatatggtgcttctccttttggttcccgttatcaagtctccactgtaactacttctcaatacccccaccgagtgtcgctcgcataaaaataaactttgccccgtcaagtatgcaattgtttctgcattgcaattgggctggctgacttttcggaatgagcctggtttttcgccaatgcctccggcctccaattgagcgtaagccaaacaatatt

SEQ ID NO: 21707 - DNA, 654 bp, DROSOPHILA
atgtcctttctttcgcccacactgcgcctggagaatctgtccacgcagcccacgatgacgcaggatcatgtgcccgaggaccagcgctataacaaacagaatattatgtaccgcatcgagctggaacatggcacaaccagtgggcggcgcatgatttgggtcaatggacgggaagtcctgcgtcgcgactggatgttcaaactggttggcgaagacacctttcacatcgatcagacgcgctgcatcatacgcgttgatcctgcgccgggcttcaaatacgagtactccctctacatcgacggcaaatcgcacgaccagtacaccgaggacatgacacggcaatatcgactgtggctatatacggatgatgcggccgccgatgcgccgcaggaatatagaataatgctcaaactggacacgctgagtctctacgtaaacgatgagctgcgcaccgaggagtcggtttttgttcacggcggcacagacaccaagttcctgctgcaggacacggaattcgtgcttcaggcacgctcaagtggcaataaacatgatggcatcgttcacactctgctggcgaatggggtggcagttccggaggcgaagattcaggagattatgcaagagccggtctccattttgcagagcagcaactga

SEQ ID NO: 21708 - protein, 217 aa, DROSOPHILA
MSFLSPTLRLENLSTQPTMTQDHVPEDQRYNKQNIMYRIELEHGTTSGRRMIWVNGREVLRRDWMFKLVGEDTFHIDQTRCIIRVDPAPGFKYEYSLYIDGKSHDQYTEDMTRQYRLWLYTDDAAADAPQEYRIMLKLDTLSLYVNDELRTEESVFVHGGTDTKFLLQDTEFVLQARSSGNKHDGIVHTLLANGVAVPEAKIQEIMQEPVSILQSSN

SEQ ID NO: 21709 - DNA, 18776 bp, DROSOPHILA
cgttagcagataatattactattttccaggcttttggctaagttctctccgctcctcctcttaccgttcgacaaatcacataaatcacaagcgtaacgaaagctggcacacaaaatgtaaacaatgtaaaacgctcgtaattgttgcttttgtagcttaatgaatttcacgttttttatggttttttccacaaaaacaagagactaacaaacggcatcaaacgcacgcagacacatccactcgcaccaaaactcactgtttgttgtctttattttatgtctacgacgcgcgagtaaaacataaaaaccagattaatttcaggcagacgaaaatgttgacgcttttttttttgttggtttcttttaagctgaatttcttgctcagttgttgtggtcgcgagtgctcttttttatttgctgagccgccattttcttttgtggcaatttgttgagttttatttattttttttattttctcagatatattaagcactgctttcttactttgtaattataatcactttactttgttgtgatatccgtacttgtgatatatttcgtttttgaatctaacgacaaaagaacgggtttccgctacaaacgtccgaacagcggaaaaacgaaaacaaaacttagtgtgatcgcagcgtggctgttggaaaatacctcattaataaaacatcgattgcacacaaagtattgacgtatcgatgttttagtatttttgggtcatctgctcagtttgtgttttgaagttgatgttataatcatcaaaaaataatgtcttttgtatttttgctttaaatagtgttgtacgtacaactttttcatttatcaccggtcataattgttttccacccctgaaaccggtgtggaagctcaaaaataccaattatttaaaaacgacccctagcagtgttggtaaacatgttattattgaggcacttgcagcactcccttgtcggtattttctgtgctgtcacttcgcgttctccgctttgtgctctccttccacaacgaaataaacggagaaatagcaatgttagttttaattcgttttagccataacaattaattaaacgagtgcgagtgccagtgtcttaattaaaatgtatgtggcgcactgattggctttaatttaaatgtttcgtgctgtttgatttgtcccctgtgttatatttgtgcggcgttttgtgcatactttttgtggttaaataaactaaaggaaccagtgtgagtcgattactaagcttaagcttattaaaagtgttaatgttaaaaaagcggcgtcttaattgaaaaatgctaatgagttaaaacaggttggcgactctcctgctcgctctcgatgccctgcctccactctctctctttctcgctcatttgttgcactattgttgttgcggccaactgggtacttttaacagttaccttggtcaatgtacggcattaattacgctcaaatacttaagtactgagatgccaagtaagcggtgaaagaaggagaggcgaggagtaaaaataaactaatttgcacactcgctttggcgtgctaattccacttacttttcttcttttattgttttgtgggcgttttgcatgattcactcgcgtttgttttgtcttattcgttttatcaacgtctacgcatttggtgcagcgcaagcaacaacaactacctgtggcatgcagttcgtttggcgtctgcgtatgtgtgtgtgtgcctcaaatgtcaaagttgacatttggttttgggcgggatttcaaattcgtgggcaaagagaaaacgataacagagagagcaatagaaattcataagttcgtttatctatcagattctgaagataatgctacgacactttacagttaagcttctacaaaataacaaatccttaaaaaagttcagtcaatgtataaatataaatatatttcgccactaatagtttattaaaatatatttttttatttaaactagaaaataaaacttacttttagcttaatttgtaattgtaaaatgtctttttaatttattttactgtaaaccgcttcgtttttaactcgtatctatttactcttatttttgcagttttctgttatcaatctgtttgtctctgtgtgttacgtgatatcaaaatattttacccagctagcaaatgcagaaaatgccctcgcaaattctgaacgacggcagcagcgtcagcttgaatagcgccagtatgaacatggccaatacgcccaatagtataacggtaaagaccgcctacaatggccagattatcattaccaccatcaacaagaatatctcatacgaggagctgtgctacgagattcgcaacatttgtcgatttcctctggatcaggtaaaatatatataaagtactgcacgttacagaagtgtaattcattgagcgttttgtttagccatttaccatcaaatgggtagatgaggaaaacgatccctgcaccatatcaacgaaaatggaattggacgaggccatacgactttacgaaatgaacttcgattcccagttagtcattcatggtaagtctgctcaaaatttaaaattgcaaagatacgttagagtaataaataaaagaaagtcgagttattggttattattggttaaggaatttcgattgtaatttaagttcgcttctaaaactgaaaacgataaacttatctaataaggtcagtaaactaatgtgagcggaaagcactattaaaccaaagtaagcctactggttatctagcaaaagatacagtatctgcattcacagaattactcttctttttattttcaattctccaagtttttaaatgatttactgctgccgccgcaaggtaggcagcaagtaattaattaaccaatcggccacacatttcgtcttcgcttccataacttaagcaggcacatttaagcctgattaaacaatgtgagctcgtcttgttggctcaataaacttgagttttccccgcgagttttccggttgcctttctgccttcgcaggctgccaaaaggcagcgtcatccactcgagttaataacataaaatattaattaacccgtacgaacactcgcatgctcgaaaagcttgagtcttgtggcaattgccttaggcagtcagcgttcttctacgtttgttcactcttgcctacctccgacttatttgcatataaattctgcttggatcttggctcgacggcatcatttataattcattataattaaattgtttgcttcgtgtgggtttaagttttcgccagctttttttggaattttaattttcctgttgtgcggttttcggcgatctcactcatgcacactctgatgcgagttttgtgcttaattatgcctgccgcaacaacaaaaaggtttcacttaccacactcgtttggcgaatgacaaacacaaaacccttttatacagtaaattactaaaaaaacgagggcctgaggttaaagcataataaacaaggaatacactcttcttggctacgaatgtaggacattttagttttattgggtaagatacttaaactgatacttagtacccaaaattgtttttaccatttaattttattgagtattaatatcccttgcaaagtgtagttcttattcaaatttttccgagttatccatatatccttaaccatttcatacctgtggtcattctgtttttccgaacaccgatatgtaaaacaagaaaaaagccaactaacggcccagcagatatgataactgccagtcgcactaaacaaagttcgtggctggtgtggggttttgatggagagggtgttacagtttccgctaccctttttatgcggctttgtttttgttctggggagcaggcttcctgatattttgtggccagtccacatcttcacatatgtacatacatatctccgaatgacaaaaaagaacagtgtgtaaggacaacatgttggttgttgttgttgcatacccggtacttttcaaggggtatgctgtattcgttaaaaacaagcgtactccaagttctttattcatctatttttcaggacatatcccaaaaattatgctacttaaatattcaattgcctggtagtgggtagcttttctgtcgcaacacttgacagtctcattctttcttgtttttattcttgtgttatgtggccacgtgtgaaaaaatgcggcttaaaatgtattaaaagtattctgtgtgcgtctgttttcctgcgactgtgtgtgtgtgcgtacgggagagggacattgtcaaggtattacgttaccgttacacgcactcctgcatatgttaggatgtcctgtctgtgtgtttgtatgccgcacatgttttctgtttgtgtgcttattgttgttgtgttgattagtaaatggctgttggtgagtgtgttttgcatttatacaagcccgtgttttgacttctctgttgttgcttctcttgttttttggtttcgttttttttttttaattttttcttatgttggaaagtgtgtttccgtagaacttcgcttcaccttccggcttcatctccgcccagcaaaaacctctgcagctctcccaaaaacaaagcaatacaaaaagttagaatctgtaagctaacggtataatttatgcgcctgcaatatggcaacgctgtccggcacacactcacacacatacgcatatgtacatgaaaaacttttgtccaggtccgaagaactttttttgcagctcataaggtcgatacacaagatgccattacccaagagcgagacagcgatggccaacagagaatagatggaaggacagagagagagagagagcgagagagcatttccccagatgccacaaaaaacagctgagccaaagagaaaggtattgccatccattgaatctaagatggcaatgctaaagcgccggtctgcggcttttattttcgctctctctccaaaagtgaagtatattcacaaggccacgacaggctgtttggagctagaaagagcggggaagggaaattttctttttccaatccttggacgaggactgaattttagtaacatctgccccactcagttccggatcatttggatcaccttcatccatcgaaacggatccggaattgtaatttcagattatagaattcttactttactcttactctgtttacgtgttggaataaaaaatgtttttaaaaattatatttttcatttcttcattttcgagacagtcatagcaaaatagcttacctaaaatgaattgttataaaatattttttttaataataatttttttatagtcattcattaaaaacgtctactaagaaactactaaaagaacaaaacattttttctcaaattatctagtttcttttttcgctcttgctctttactttttccattcgccgagactcgctctcaatagctttctccatggctttccgctacattctccccgaaaaatttccctagcatacttctctgcatcggcatttcactcgcgcgttggccgctcgcctgtgtggaagtgccgtgcggatttcgattcgaagatataactccccgggccttacaaacaaatacataattatagatatatatatacatatacatatatatgtatacaaatatacaagattttgcacagctaaacggcaaatcgagtttctgcgctgtgaattaacaaaagaaagcggaaaaatcgaagttgtatgtcggaaaaggagtacaaatcagtgaataacataattccatataattattttcttaaacatttccactcgctcttcggcaagtcacgaaaatcttgcggaaaaaatcaattggccctgtgcaatattttttgactgttctgccgaagttgtcgtacatttctgattagttgccatacaattttccgctgagagaaggggtcggaaaatggggaggtggaaaggcaatggacgtggaatgattaacataattttgtgaatgtttctttaatgaacgttttttagtgctgctaatgaagtaaaaactttatgaaagagttaccccagagatgtgatggaatttatgaccgtatctcgcaaaatcaatatattttgaaagattataatttacccctttataaagtattaataataataattcattcttgttaaaaaaaaaattgaatataaatatggttttttagtttctattaataaaatccttgcttttattcactttcttaaagtataaaaacgtaaaaaacaaaacgcagacaaaaacgcaggtgaaatcccacacactaagcatttttcttttatattttaaatacctcagtgcaatacaattaaagttctagaacgctttaaaaacataccatttcctatgcctctatcattttgcacttagacaaaggggagcaaccacgataaaaaaatcaaagaattgatttccatttttgtgggttcccttacactttttctgcatcacgctgttcacttttttcccaaattttttggctgctgtgcgccagacactggcaaacaaaaccacacacactcgcacactcacacacacttgcaaacacatatgacgcaaaatgaggcagtgtgtgtgtgtgtgtgcgagtgtgtgatggtgtgcgagaatccccaccctaaacttgacctcaggcatttgcacttcatcaagcgcttcttgcacctcggcgaccgtctggttgcccaaacttggcccaaaccgactatactatatagacgagatggatccatttcgtatgcatacatacatatatgtaaggcatatatgcacatatactatatatatttatgtacatatacatatgtatataatatgagtcagtgggctagtaagaagctgcagggcgaaacaatttctttttattcattctttgcggaaagcgttttgctggccaagctgtcgccctgccatttaaacttgttcgtttctttttggcccgaaggctttcactcgaaccaggtgtgtgtgcgtctccttttgccaaagttaaatcagcaaatttccactgcttttttgggtaccctggggttctgtttttggtctgtgttccttttcttttattttaggtttgcctatgcagcctctggcagattcggtacccagttcgcttgctagctggccccattatgattgttgggcaaattttaatgatgccattgggcttaatgaaattattgttagttcagcaaacaagaaagcccatttcggtattgttaggggatcagtgcaaatgtacggatgtgggcggaattggttgctggtcatatgtatatgcctcattacggatgcctatatcatatcgttgatgcagagagaaaaagctataattatattatattattaatcatacagtaaaatgtacaactttgaggaccttatgcttaaactttaagctttacgagtctcaatacttacattttatttaaatttgtttaagttgcacatacacaacagtgtcaaatttttctagatccctgaagctcgattactatctgtttagctctgttttaatataatttgtatccatccatgaagttgttaatatttatagaataaactagcgtctttattcacgttttaaggtacatttcgcagatgggcattctttctgtaagtgggaactttatggcatttccattttgccgcttttctcttttttaagctgtgtgaaattttatatccactggaggtcgaggtgggcggcaggtggcaactcgccccgcttgacgtcactcggaaaagccaaattgatgtttaactattgatgcctctggtccggagtatctggtatctgttggcccaaagatggtgccgcagtccttttggcgaacatcgcctgctcaggtttatcgttatggtttcacaggaaacccatctccccaaacgcttctttgccaaagttcaagagtgggcggatgattgaggcgctggaatggtcaataattcgtgggcgtggcgggctaaatatccaaatttgatgggtttctgatgtaagcagtcgtgtgcttatttaggccattgaaattcttgaatgaggccgtaaataataaacaatagctattgggaatatctaatcaatagctttttgctttaaaaacgcagctttattgatattaaacatttatggcagcatttttattaggccatgcaatgcagtgaaaatatattaaattaccgaaaacaaaaaacagaaaacttaacttaatcatgtaacaaattgaaatcaagaagtataaatagaataggatttaaagacatctattgtgggcactttccctatgcagtaattaactaatcggcttaaaaactttaaaacaaagcgtgtactttaagcttgttaaataattttcttgtttgtaaatcagctttaatctagcttagagctgtgggattttaggactttggttagtccaacaaaagaggtttctatggatggagccaggaaggctttagtgtaggtggctggactgttgggttgtttgggatgctctgttcccatcctggacaaacaagcaggcaaccaatattcatgctccaattgcagagaaaacaatgccggcggagtgtttatatttagcaaacgctgaagcatagtgccagtgcaaaagaggggaatggggctagggaaaacgggatgagttgaaggggactggctaaatttaattcgaaaatgcatcagatcctctttttgtgcacaccattcagtcaccagagactgcatcatcagcagatagcgtggaaaacaaagaaaatgccgagaaaatgagtgccaaacaaagggatctgcttgccttgtcacgacaaggctcttgtgtcaagtggatgctgtccacctaaggacctcgccaccccctttttcgacccacttcgaccctcgttaatcatgcgaattatgcatgaaagtggagtgcttaatttcaattgtctaaacaacaagcgattgcgatgtgacctaccaatacacttgaagaaaattttctgtttacacttgactgcatcgatgggtgggcttttgccctgggttcgcctttcactggaatacagtgtacgctcaagagaaagaaagtgtttaatcacattataatagtttgggatactaacttctattagcattacttttcataacataaaatatatatttttatgtttctataattacccatctcatcttttgaataaaaaccttcgagtttactgcacagagtcttcactgtacatggctgaaatgtaggaatggcaacagaagattgcatacttaaaagggcgattgcgagcaaatttccctgcgcgcgtcgaccgattttctctctctctctggattttccttaccttctctggcgctttctctcccaccttctcaataattttcgctcgctcttggctgcctttcacgcctttgtcaatttgcagcaacttgtgcgctcgtttgacttgggttaaattgtttgtgattgtcgcagccgtgtgtctctgtgtgtgttaccaatttctccaagcaactgtttcttgtgtgtgtctgtgtgtgtgtgtgggtgtcctgacagagttgtcagctgttcggcctgcatttctctcggtttccccgctcgtttctctcttgtctttcccattattacacaatttatatattttttttaggtgtggtttctgcggcgtctgcaaccggccacgcccatagccaaacgcccaccttccctatccccataacccctcttccatcgcccaacgcccttctcacggccatatccttgtgtgtgtctgagtttttcttttaatcaatcattacgaactgcgagatcagcaaagtgggcggagtgggggatacgccgcctgtcgtttggctttgaaactttgcattgcatagtttggtgcgccatgtaactgtaattgcaactgggaccttgttccgctttccttcgcgatttactttctccgaccacccgctctccccgcgactcagtccccactgaatccaattttatatacgctccacttaagaggggggtttatgctaagtagaaatattggtggcacttagtcaagcaacgctggcaacggagtaaatcaagttgaagtgatagaaagattgagttataacgatttctttgcgaaaaacaaacaattcttaaatattacaaatcaaacattcaatgctacttaatcttgtaatgaccttgataacaaaacaagctgaaaagcaatggacatacgaaactcgatttagagtacaactttcaattgtgtcttactagttcccccacgttaatcttgtgctaattaatcgcagaatcaagtccaacgcaaacgaacttacaaaataagcaaaatcaaattcgagcaaaatcaaaacgaaacgaagcgagagcttagtgaacttaaacgcaataaacgcgacgcgaagtgaaaaatttgttcaagtaaaccaaaatggcctggggctattggtccgccacgactgtggatcgtggacgatcgccgcgccgcctgacgcaatgtgcaccacttccggtcaacatcgtgcagcaggaggaggaggaggagcagccctgcctgccgcaacagcagcagcatcagcaaacgcagcagcaacagcaatcgcagacctgccccagcacaccgtcggccaatcagcagggcagtggcaacttgtgctacagccccacctgtcgatcgcgctgctcgagtccttgtccgggatctccgtgcggctccattacgccgccacctccgccgatgctcacgtcctcgcagcagcacctgcattccaataagaattgcccagcggcgcagcaactgatgacccacttggattacgccgctcggagacaatcgctcgaccagctggatagtccacaggtatttggatcattggggcttacatcttcatccagaactcagcttgaagaaaagaaattgagttgtctatccaagtccaactaactatactataatattccgatgacttagtcatttttataagtgtatcccatcaattaaatatagattgcttatttgtacaaattaggtttttgcatctatagaaaatgtacacgcccatagattactcagtttttctttttatagaactgtaatatttataaactaatgacgtaataatgagcagatagtaatttactttctctactgattagcattggaaattaaagcatttttagatttattcttatcgtaaaatacaaacaactgtcatggcttggatatagcactttttcataactgatctataaaacaacttcaagctgagttcgaaccaaaattctggcttaaacccctatcactgacctggtaatccattctgttctcatcccattccgatttcgaacataatccagtccaagtactttgacattcaggccaaccagctgtcggacatcatgtgccgcggagcggtggtcagttccattcagtcggcgaacaacacgctgacccgtggcgtatcgatgcacagtaggagtggcagtgcccacgggagtcaccatggcagccaccacagtcacagtcatcatggcagtgcccacggatcgctgggctgtttgcagggcggcgtgggagtgggcgtgggcacaggaagtacgggcagcattggcatgatgtcggccggacatatcgacactggtgactacgatgtgccgcatccgcacccgtatacgcatcattatatgcagacgacggcatcggtgacaccgccacacacgtcactcagtcgaccgggatcggcgggtgccgtgtgccagggtcacgactctggatcggattctagtcaaggttgcggcggatccataatgggcggcatgttggtcatgggtcatccgggccatatgggcagcttgggtcaccacagcgccggtagcggatcgctgggcaggtgctcgagcagatgtcacaatacgaacaccaccacgacggatgactcgggcggtggcagtagcggcggcggcggagtaccgggcaccatgagtagtgcctccatggcggtgggcatgccgggcatgctgatggactaccatcatagtcaccacagcggcagtgccgggagtggtctaaacggatgcggtggcggtagcatcgccggcggaagcatcggaggaaggagcagtgtcctgggcacgatccacaatggacatggccatcatcatcagcagtatcatcacgagtgcatccactacgagcgattgcccattcccgtgcccatacccacagtgccgatgggcgtggcaccgtcctcgcagcagatgtcacagcaccagcttcaatcggaggaggagatcgagccagcctatgcgacaggtaaatggaatcgacgtctttttgtgggatagttaagcaatattcagaatgctatttaagttcattgttatttgttttattataatttattaagtaccatttgtttgtaagttcttatgctaaggtattaagttaagacataacttcttttttcgattatttcttatttgatattcaagttcaacttaatataattgtattactttccatttagttatggctgtttcgggcagctaaaatgacattataatccattattggaatgtcaaatcttaattaaaaccaaaacatttgcaatgtcactgcagagaaacattaaactattatttatggcttgtgttattttggccaatgttggttttatttcaaatcctgtgtgcaagggcctacagaagcactccaaattagctgcaataaattagtgcttatccatatttattctttccaataaactattgattttccaccgccagcgttgtacttaattttatggaattaccagtcccgatcttatcggcgatgcctttcgtcgcgctctcacttgctcccaatcggtgacaattcaatcggccacttggaggcacttgcttttattgttcttttgttgtggcttttggttttggtttcggtttggttctggttctcggtttctctgctcctcggttttctcagttgattcttttagttttttgcccatgcttcttgggctgaaaagttgcggactcagttcgtagctgaaagtcgcggcgtgacgacgcttcgcgcgttttcgagagcgtatctcaagtgcttcaactgggctccagtgacccctgaactgatcactcatccgaatcgccccctatcacatcacccacccaacaaaaatgatcatctggagtggcttctgcgaggcggcccaaatatacagcacacaaacggccacttttatgagcggcggagcatcgtgttagtgaagagtctcatttaaattgccaattaatcaatgcggattccataaagatcaactacgggtgcaaacgcctaaggctaacttcaattttgtgactttttgtgaagtgaatactgcgaaaaaccaaactgcggagctattaacgcaaacaaactcaactcatggccaaaaatggacttattgataatatattttgtgcgatctctgatatcaaacaataatagtaccctttcgctgcgaccttcagattatttagccttacctcctccatcagccttatgactaatattgcatatcgcaccgattgtttttaactgtgcttccccatggccctactcactctatgacttctggccgccttatctgaccagcaaggcatttacacggcgtataaataagaaccggctaaacaaaaataggaaaaacaagagcacaagtacaaacaaacggtgtgcgtcctatcacaattgataagctaaacactgggagggaaaattggggagatggggaaaactaaaattctaggtcaatgcaaggcatgcggcaatgtgcggacatgtgtgagaatctatctgaatattaaccttgccgacggacaggcaagaatttattgaaccctagactccctgggacgacactttaattgaattatgaatgagcgatgagcgattgttggcggagaatctatctgatagctgaacaattggtctcaattgatggctggtggtctgccggaaaagcttaattaacattactcggaaaagagcgaagtatctcccccgtgctccagtcataactgtatatgcatgtatgtatgtgtatctctcgggttacttcagtagtccagtatctcccactcccgctccattatactctctatatggtgcgtggcactgagataaggaactagctgtgtttggaaatcggattggttcagtcgaggagtgggtgctgacatgttaacaggcctctcgacgacgcagtacagcacgtccatgtggctcggcaagaatccgtttataagtaaaaaaaaaaaatcgaaaatcgcataacaaaatccccattaaattgataagcgacctgcggcagaaaagatatttacccgatgggcaaactagcctgccgtaagcatgcactgccattaccacgattggctgacgtgaccaatattgaatgtttatttaatgtttcaaaatataagttaataatatgtagtggtgtaaagtggctaatgaacacattctcctttgtctttcagtatttcccaatgttcctcaagcgccgggattgtcttgcgatggcgaagatcgtaagtatttactaaagtaactaattttaaatatatttaattcaaacgataactgctcgaacagcgaactttgcaatatgaataaaacggctaaagattaccacttgttattgattcatcgatcgtttgactcattatgccgcttttcacggcctgtactttgatttaaaaaaacgcggactttcttaaaaagggttaaatgtttaggattttaaaagttaatttaaattgctgtcagaaaactaatttgttctctgatatcgcttttcgttggaacatttgcacatatttgacaagtggtgttgtcaaaagtgaaaagaaaggagaatttcggcttactcaatttattgaacaaattttaatttttttaggcagcatctatcgacgcggtgctcgacgctggcgcaagttgtatcgcgtcaacggacacatcttccaggccaagcgtttcaaccgggtaagtgctcccataagcttaaaattaacataaaactaagaatatacaaacaaacttccgttccagcgtgctttctgtgcctactgccaggatcgaatctggggtttgggacgtcagggtttcaagtgcatccagtgcaagctgttggtgcacaagaagtgccataagcttgtgcagaagcactgcaccgaccagccggagccgctggtcaaggagcgggcggaggagtccagtgaccctataccggtgcctttgccgccacttccctacgaagcgatgagcggcggagccgaagcctgcgagacgcacgaccatgcgcacatagtggcgccaccgccaccggaggatccattggagccgggcactcagcgccagtattcgctgaacgacttcgagctgatacgggtcatcggacgcggcagctatgccaaggtgctaatggtggagctacgacgcacacggcgcatctacgccatgaaggtgatcaagaaggcgctggtcaccgacgacgaggacatcgactgggtgcaaacggagaagcatgtgttcgagacggcctcgaaccacccgttcctggtcggattgcactcgtgcttccagacgccctcgcggctcttctttgtcatcgagtttgtgcgcggtggcgatttgatgtaccacatgcagcggcaacggcggctgcccgaggagcacgcccgtttctatgcagccgagatcagtttggcgctgaatttccttcacgagaagggcatcatttatcgcgatctgaagctggacaacgtgctgctggatcacgagggccacatcaagctaacggattacggcatgtgtaaggagggcattcgacctggagacaccacctccacattctgcggtacacccaattacattgcccctgagatactgaggggcgaggactatggcttctcggtggactggtgggcactaggcgtcttgctctatgagatgttggccggccgtagtccgtttgatctggcaggagcctcagagaatcccgatcaggtaaccatattcatttattttgagaaattctaatttgttggtgtttttttttcgcagaacactgaggactatctgttccaagtgatcctggagaagacgattcgtataccacgctcgctgagcgttcgtgcggcctctgtcttaaaaggtttcctcaacaagaatcccgctgaccgtttgggctgccatcgggagtccgcgttcatggatatcgtcagccatcccttctttaagaatatggattgggaattggtgagtcgaagggcggttgtcttcatattagctctgtgtgtcctggtgaacttgtttgtgattatgataatgagtaaggttaataggaactaataagtatttgtagtagcaatcccatgggttacattaagttaagattagacttgtcacaacattttattgagaccatcgtttccacataggtcaggtctaaagttaatcgttttatttcattttgtttgtattgctgttggtatcaagttggccgataatgaggcaatcaataccgagcattttctttattaccttggatattattaatgatatctattattacgtatacgattgattgcgcgttaaagatagctcaaaaggaggtgcaaccgccttatataccgaacatagacacgggagatccctatgtgacaagcaactttgatgtgcaatttacccaagaaccggctgtactaacgccagatgatccgtaagtcataccgagttccccttaaatccgaaagatggcaagttgtgttagttcttttcgttttccttgcatgagataagcccccgtaaaagatcttagcttagcgtccagactaacggcaggtaaatgttcctatcgatcagccgcattatacgaccatgtataccatccattgaacctctctatctgtctttacaaattctgaatccacttaaaagtgaattttaccatcgtcataatcatgctcaagccgcaccgacataatggagaaaaaatgttttatgtttgcccattggctgggagtttttcctaatcgattatgatttctactatcctcatgcacaccctacatcacgcagcttgagcgcaaacaggtcacgccaccattcaagccacgcttagactcagatcgcgacctggccaatttcccgcccgagttcaccggcgaggccgtacagttgaccccggatgatgagtaagttgagatccaagatggccctaatttttctctatctattcgaacgacttgcacccactgagatggctaactcacaatgattttctttaactctcagtcatgtcattgacaatatcgatcaatccgagttcgagggctttgagtatgtaaaccccttgctgatgtctctggaggattgcgtctgacaccacgaaatgtgcgacttacatccgtataacatgcgggtaagtgatccacttaactatgtatccggttataaagtaataagtgcctttcttcctagctctatggcgaggattccagtgattacgattccgtggctgacgatttgagtctcctgcatttgaacagcgcagcgggagctggtggatcagttagcagcaataacaatctcagccagcagcaacattatcgccagcagcagcagcagcaatatcaaccccattcagcatactcacaacagcagcagcagcagcagcaacatcagcatgctgcagcaacttcagcagcatcaacatcagcagcaacagcagcaacaacttcatcataatggtaacaataacattcataataatcaaatgcaagcaaataataataaaagtctactgcagcacatgttttgccttccattgaactaattaaaataacgaattagaaaaaacaacagacaacaacaatgagccacacagcaacaacaaaaagcagagcaactaagaaaattaaaaagattccaagaatataaatttcataatatacaatctatataatcctttctcaacaacagacacaactttcaaaagcaaagtatatttattatataaaaaggcgaaggcaaaagcaatagccgaagcaaaacaaaacaaaaaactgtcacaagttgcaagtattacactaaacgattactttactatttaagcacctaggcagccaggcgaactttatgcaagcaaaagataaaccatttcaaaactcaatgcaagacttttcaccaagaaacttaggggtttgacgatcccgcgagaatgcaacaagaactttttaagctaacaatacgtgcatcagatatgaaaatatataatttttaaaggtttaacactacaatgaaaatttcatgttcattttactaggcaggaacggtgtgcggtggaggagaccgaatatgggagtatatatttcaagtgaatcaatctataatatctaagcatatataaactctaatgtaaaatgtgtgtgtgttagtattagagagcagagcatggtttttaaaggcgacagcaaaagatcgacatatacatacgtgtgtactgtgaacagcaatagttaatgcaaacgaaataccaattgtaacttcgtaactctaatttttacacagagaaccgttaaccgaagtcggggggacgaggaaattctcttaaaatgcgaacaaaaacatatttatttattttattcattttctactctgtatttttaacagcaagcaaacacaatccgtctactggcaatataactttgttaagtattaaaaaaaaacttttgtttttaatgcattc

SEQ ID NO: 21710 - DNA, 2305 bp, DROSOPHILA
tgctctccttccacaacgaaataaacggagaaatagcaatgttagttttaattcgttttagccataacaattaattaaacgagtgcgagtgccagtgtcttaattaaaatgtatgtggcgcactgattggctttaatttaaatgtttcgtgctgtttgatttgtcccctgtgttatatttgtgcggcgttttgtgcatactttttgtggttaaataaactaaaggaaccagtatgccctcgcaaattctgaacgacggcagcagcgtcagcttgaatagcgccagtatgaacatggccaatacgcccaatagtataacggtaaagaccgcctacaatggccagattatcattaccaccatcaacaagaatatctcatacgaggagctgtgctacgagattcgcaacatttgtcgatttcctctggatcagccatttaccatcaaatgggtagatgaggaaaacgatccctgcaccatatcaacgaaaatggaattggacgaggccatacgactttacgaaatgaacttcgattcccagttagtcattcatgtatttcccaatgttcctcaagcgccgggattgtcttgcgatggcgaagatcgcagcatctatcgacgcggtgctcgacgctggcgcaagttgtatcgcgtcaacggacacatcttccaggccaagcgtttcaaccggcgtgctttctgtgcctactgccaggatcgaatctggggtttgggacgtcagggtttcaagtgcatccagtgcaagctgttggtgcacaagaagtgccataagcttgtgcagaagcactgcaccgaccagccggagccgctggtcaaggagcgggcggaggagtccagtgaccctataccggtgcctttgccgccacttccctacgaagcgatgagcggcggagccgaagcctgcgagacgcacgaccatgcgcacatagtggcgccaccgccaccggaggatccattggagccgggcactcagcgccagtattcgctgaacgacttcgagctgatacgggtcatcggacgcggcagctatgccaaggtgctaatggtggagctacgacgcacacggcgcatctacgccatgaaggtgatcaagaaggcgctggtcaccgacgacgaggacatcgactgggtgcaaacggagaagcatgtgttcgagacggcctcgaaccacccgttcctggtcggattgcactcgtgcttccagacgccctcgcggctcttctttgtcatcgagtttgtgcgcggtggcgatttgatgtaccacatgcagcggcaacggcggctgcccgaggagcacgcccgtttctatgcagccgagatcagtttggcgctgaatttccttcacgagaagggcatcatttatcgcgatctgaagctggacaacgtgctgctggatcacgagggccacatcaagctaacggattacggcatgtgtaaggagggcattcgacctggagacaccacctccacattctgcggtacacccaattacattgcccctgagatactgaggggcgaggactatggcttctcggtggactggtgggcactaggcgtcttgctctatgagatgttggccggccgtagtccgtttgatctggcaggagcctcagagaatcccgatcagaacactgaggactatctgttccaagtgatcctggagaagacgattcgtataccacgctcgctgagcgttcgtgcggcctctgtcttaaaaggtttcctcaacaagaatcccgctgaccgtttgggctgccatcgggagtccgcgttcatggatatcgtcagccatcccttctttaagaatatggattgggaattgcttgagcgcaaacaggtcacgccaccattcaagccacgcttagactcagatcgcgacctggccaatttcccgcccgagttcaccggcgaggccgtacagttgaccccggatgatgatcatgtcattgacaatatcgatcaatccgagttcgagggctttgagtatgtaaaccccttgctgatgtctctggaggattgcctctatggcgaggattccagtgattacgattccgtggctgacgatttgagtctcctgcatttgaacagcgcagcgggagctggtggatcagttagcagcaataacaatctcagccagcagcaacattatcgccagcagcagcagcagcaatatcaaccccattcagcatactcacaacagcagcagcagcagcagcaacatcagcatgctgcagcaacttcagcagcatcaacatcagcagcaacagcagcaacaacttcatcataa

SEQ ID NO: 21711 - protein, 690 aa, DROSOPHILA
MPSQILNDGSSVSLNSASMNMANTPNSITVKTAYNGQIIITTINKNISYEELCYEIRNICRFPLDQPFTIKWVDEENDPCTISTKMELDEAIRLYEMNFDSQLVIHVFPNVPQAPGLSCDGEDRSIYRRGARRWRKLYRVNGHIFQAKRFNRRAFCAYCQDRIWGLGRQGFKCIQCKLLVHKKCHKLVQKHCTDQPEPLVKERAEESSDPIPVPLPPLPYEAMSGGAEACETHDHAHIVAPPPPEDPLEPGTQRQYSLNDFELIRVIGRGSYAKVLMVELRRTRRIYAMKVIKKALVTDDEDIDWVQTEKHVFETASNHPFLVGLHSCFQTPSRLFFVIEFVRGGDLMYHMQRQRRLPEEHARFYAAEISLALNFLHEKGIIYRDLKLDNVLLDHEGHIKLTDYGMCKEGIRPGDTTSTFCGTPNYIAPEILRGEDYGFSVDWWALGVLLYEMLAGRSPFDLAGASENPDQNTEDYLFQVILEKTIRIPRSLSVRAASVLKGFLNKNPADRLGCHRESAFMDIVSHPFFKNMDWELLERKQVTPPFKPRLDSDRDLANFPPEFTGEAVQLTPDDDHVIDNIDQSEFEGFEYVNPLLMSLEDCLYGEDSSDYDSVADDLSLLHLNSAAGAGGSVSSNNNLSQQQHYRQQQQQQYQPHSAYSQQQQQQQQHQHAAATSAASTSAATAATTSS

SEQ ID NO: 21712 - DNA, 3486 bp, DROSOPHILA
tggatggctgcggctgtggctcgacgttcacacccataatccaatcgtttgaagcgcttttatggattcgacatgtcaaatcgcgtgcaaatttgttagaattggttttcccaagcttccacattccgcaatctcgccactaggaaaaatatcatagcagcttcaaaaggaaaaatattggataccattttgaattttagaaatttgtcatgattataaatatcacagaaaataagttttaaactccttttctaaaccaaattttggaataaataatatgactagcgccttggttacctattttgaattattgtacccagctttgcttgcagtgtatcaccacccgtaatcaaatacaaagccccaggggccgaaaggctttaccagtccataagaacattttttgtttccgctaaaatgatgatatgatacacgggggagttcaaaaaaggagacaagcggccaatgaaaaaaaaaaacgcattcaagtcatgtaatttcggaacttcctttgatattgtacatttgttggtgctttgcatgcgctaggtgcaaattgggttttttccaatttcattttatatacccacggcgtcatgaagccacccatatttattgcataattttcagcatagcttcccgcgcacacacattgcgaacattgattgtggaaataactacggccagttgtgacttttaccaactagcgtacaactagattgccagattttctcgggcgtgttacatttcaaattgtattgtattgtattgtatgtattcaaattatcaaataaattaattttatgaaccaaattccacatgctgctaaaacatcacatacgtttgatattctatttttaacaaaaataacctttatttacgtatgaagttcattcttacaactatgaatacgctatccgttagcgtttaagctagtattactgattataagggattatatctggaaataagacagtatactctactgaatttgattgcgtcagtgagcttgaattcggatctcgttcccgcccccctgctcggccaccatttccaccttcatgctctcggccagcattacggcgttctggtgcagtttggtctcctcgtgctggcgcatgtgatgcagcagacggaagtccttgttgcaataatcgcagcggtacagtttgatgtccgagtggatgagctcgtgcttggtcagggagtgagcgtaggcaaacgctttgtcgcacaccttgcacacgtagggcttgatgccacggtgaacactgatcggaaaaagaaaagttagttatctctgtcccgaactaggaatatatttaaatggcccattttgaggcctctccgtgagaataacatttctactcacttttcatgagacttgagaacactttcgtagaagaattgacgactgcagaagctgcacttatagggtttgctgcccgtgtgggagtacatgtgcttcctcagttgctcgcgcacctggaacttggcatcgcatagtctgtgaaggcgggattagggttatcgctttaatatgaaatttaccgactcgacttactcgcatgcatattggcagatgccgtcatggcgtctgcgatgctccatcatccggccgcgcttttcgtaaaagtttccgcagacgtcgcagatatagccacccttctcagtgccgtccgatgttgttagggagtttaatccgcgacgaacccggccgcgccgcgccttcaggcttgccttggccgcctcctgcagcgccaactgctgcgatggtgtctcttcgtactgcttctcagactccaggacgatctcggtctgatcggagttcatctcgatggtgtagttgtcctccaagtactcgatggtgtcgccaatgcactcctgctgatcgctggtgtccacttccaagtactcctcgtgccccttttcttcctggtgctcctcttccccggtggtggtctcctccaggatgtacatctcctcgtcgcattgctgctgcgagccgtcctcctccttgatcatcatcacatctgattcgtccagcaagcccagttcccggcagtactcctcaatctccatctgcttgcgcagcgccttctcgcgaaactggtaggccatgttgagttcgaccttgcaggacttgcagatgccatcgggtatgtgttctctgtcgttcagctgcatgagggatggatggatgaatggtcagttcgcattgccagctctagcgattcacttacattgctgtatgagactcccaaaagttgaatcaacatctcgttcggcgattcctcgccttcctcgcggatctcgtctaggcgctgcagtcgctcactctgcgccaggcagacccggcacgtctgtggggtaagctcgacgcgcattctggaatcctgctcgaaatttaatttaaagaaccgctcgcgtagtattgtagtgttaaaatttgtgttgctaaagtgttgtgtaaagcgactgaaaaaagaaacgaaaagacatcgccattttccttaccagggctgcatagcatcggcgaacacgatgtggttcattttgctggttccgggaagcggatttttggttaaatatctgataaacatgtttgctgcttgtgacaatacattggaaatatttgttcctttaaccatggctaaacgatatgatatgataactgaaagtattccccagtgtgcctataaacacaaacaacttgtaaaatgagaaagaaaatattaatacttcaaatattcaaatattatgaaaacaattatatatatatttatatatttctttcatatttacgtatatttagatagagtaaagaattcaatcataaaaataccaacgtcttacattaaatattatttaaaaaaaggcctaatgcgcttaaatttgccttatcaatagaaaatattatgtccaatactgacaatacatctcaccaaagatttaatttagctaggaaccagttctctatggctcatttttttgaccagtggcgataacgatgacagcaagatcactaaaagactagcgttgcatgtttatcatatacaagctaacattgcgtaaggtgaatctgcaaattatatacaaattattagtaatttactcatttatttatgcgaaatcgcaaatacaacaccgtgtttacatccgaaagctctggcaaaaaaagcacatttcttaatgcagccgtctggcaacgccacatatttttcgagacgcagaacgcaagatattttcttatctctcgttaaaaaatggattatttcggttcaatcggtgcgtatctgggaaaatcgcatgctcgttggcagtaaagaacgccacgcactttcacgtcccacgcccagcgcactcccgcctgacgggaaaatgggaaagcaactatatctggcatccgtatcttcgtccgtcgcagccgtcaaaatgttcgtcgcgccagttatcgactcggcaatctccatctcctaaggcaca

SEQ ID NO: 21713 - DNA, 1266 bp, DROSOPHILA
tttttcagtcgctttacacaacactttagcaacacaaattttaacactacaatactacgcgagcggttctttaaattaaatttcgagcaggattccagaatgcgcgtcgagcttaccccacagacgtgccgggtctgcctggcgcagagtgagcgactgcagcgcctagacgagatccgcgaggaaggcgaggaatcgccgaacgagatgttgattcaacttttgggagtctcatacagcaatctgaacgacagagaacacatacccgatggcatctgcaagtcctgcaaggtcgaactcaacatggcctaccagtttcgcgagaaggcgctgcgcaagcagatggagattgaggagtactgccgggaactgggcttgctggacgaatcagatgtgatgatgatcaaggaggaggacggctcgcagcagcaatgcgacgaggagatgtacatcctggaggagaccaccaccggggaagaggagcaccaggaagaaaaggggcacgaggagtacttggaagtggacaccagcgatcagcaggagtgcattggcgacaccatcgagtacttggaggacaactacaccatcgagatgaactccgatcagaccgagatcgtcctggagtctgagaagcagtacgaagagacaccatcgcagcagttggcgctgcaggaggcggccaaggcaagcctgaaggcgcggcgcggccgggttcgtcgcggattaaactccctaacaacatcggacggcactgagaagggtggctatatctgcgacgtctgcggaaacttttacgaaaagcgcggccggatgatggagcatcgcagacgccatgacggcatctgccaatatgcatgcgaactatgcgatgccaagttccaggtgcgcgagcaactgaggaagcacatgtactcccacacgggcagcaaaccctataagtgcagcttctgcagtcgtcaattcttctacgaaagtgttctcaagtctcatgaaaatgttcaccgtggcatcaagccctacgtgtgcaaggtgtgcgacaaagcgtttgcctacgctcactccctgaccaagcacgagctcatccactcggacatcaaactgtaccgctgcgattattgcaacaaggacttccgtctgctgcatcacatgcgccagcacgaggagaccaaactgcaccagaacgccgtaatgctggccgagagcatgaaggtggaaatggtggccgagcaggggggcgggaacgagatccgaattcaagctcactga

SEQ ID NO: 21714 - protein, 388 aa, DROSOPHILA
MRVELTPQTCRVCLAQSERLQRLDEIREEGEESPNEMLIQLLGVSYSNLNDREHIPDGICKSCKVELNMAYQFREKALRKQMEIEEYCRELGLLDESDVMMIKEEDGSQQQCDEEMYILEETTTGEEEHQEEKGHEEYLEVDTSDQQECIGDTIEYLEDNYTIEMNSDQTEIVLESEKQYEETPSQQLALQEAAKASLKARRGRVRRGLNSLTTSDGTEKGGYICDVCGNFYEKRGRMMEHRRRHDGICQYACELCDAKFQVREQLRKHMYSHTGSKPYKCSFCSRQFFYESVLKSHENVHRGIKPYVCKVCDKAFAYAHSLTKHELIHSDIKLYRCDYCNKDFRLLHHMRQHEETKLHQNAVMLAESMKVEMVAEQGGGNEIRIQAH

SEQ ID NO: 21715 - DNA, 5268 bp, DROSOPHILA
tagattcgaatacacccatgggcatattcctctggctggtcatcatttcctttagacgtttaatagattctgcgcacagttcgcggaagtcatgcaggtcgttcagcttggtgaaacattgggtgcacaggtttctcgggaaaccgtcgttttgatccgcatcaaacgaagtgcacgccctgagcttctggaacagatctggaaccacgaagagatcgtgtccagcaccatgcttcaggtggacaaggcaggtgagacaaagcgattggacggagtacttgagctccatagtgcccatttccctcaattctcgggcagataacaatcgaagcttctaaacaaatttgttccagtgtgacaggcagtctgaccgtttcgctatgccattaacccattacggtgtagtggggtggcaagtaaacagcatacttggattcttatttttatattaacttgttttaatgtaagtgctttttagcaagaccatgcatgcgtctagttaaaatacatttatttattatttatttttgactttatttcgatacagaaatcttgtacgttcattttcgtatcaaattttcttgatgcccagtttgtatattttcaaatgtcgttgcttattattaaaagcaatttgttttacatgtttatatatacatactaatacaaaaaaatttgttttatattttttctatatatacataccattatctatatattgtaagttcagtttcgtttttgttactatggtgctcagtttgcaaaatatttttaaaaaaccctgaaatactatttgaagtatacaagcaatatctatttaattaaattagttgtatatatatatattttttttttttgtatattgcaacctaattagaattgcaaataagaaggtaagaaaaaacattgattgtccagccctgaaacgcaaaacaactacgcactcggacgagtaactcgctggcagaagtacttgcttattgcccactcgcccgattgccagtcgacgagtatacaattttttctgtgtcaatattattttattgcttactgaccggagagagacgcaaaaagctatagaaaaccgccccgatccgcagtgccgattgcgattgaaagcaagatgaacgagggcaggcagtactcgatccacagcctgtgcaggatctgtctgaaccacctgcagaacgacgccgcctacgatttgtatctggttccaggactttcgaagaagctatgcttctgcacatccctgtccgtggagcaaaacgacggattcccgaagaacctgtgcaccctgtgctacaccaagctgaacgagctgcacgactttcagaaacagtgcgtcgattccgtgcaaaagttccaggatctggtggccagcaatgtctttgcctgccagagcagcttcgacgtcttcgatcccaacgttgccgtgcaggactacccggccgaggaagaggaccacgtcaactatgacccgctgctgaaccacaagatggagctaatcgagaacgaggaggatgtcttcaagatgctggagcacgtcgacaaggaggccgaggaggtggagaaggaggccaaggtggaggaggatgacgggggcaacgtttccgtcaagatgttcgacgacgattcgtccatcgagagcggcaatgacaacgaccacgatctggacttcgagccaaatagcagcgatgatgacattccgctggcccagcgcatgaggggaccagctaccggatcaggaccccagcaggaccgttttagcaacctagacaaacccaagccgaggccccggggacggcccaaaaagataaaaccgcctccgccagaggaggaggagttgagcgactcatcctccgaatcagatgactccgaagacggcacatcgcggggcgacaagccgaagaggaagcgcattcccatcgaggaacgccacctgcaccgcatcatcgactgccacatttgccaccagaagttcaagaaggccatccgctacgaggagcacatgaagtaccacaacgacctgctgcccttccaatgcaaggtggagacctgcaagaaaggtataacgctggcttaagtataaatataagtatccgatctctatgaaatcccaccttacaggtttcactaccgccaatgggctgcgcattcacatcgaccacgcccacacagagctgtccgaggttcacgcctgcatcgccgagggctgcggcaagaccttcccgcgcgtccgtctgctcaccttccacatgaagaaggtgcacggtatcaccaaggcggctgccccgcttcgagatttcccctgcacagaatgcgacaccgtattccgctgccccacagcactcaagaagcacatgtataagcacacgggcgaggagcttccgtatccttgcaatatctgcggcaagcgttttgtaatcaatagtgctttaagggatcaccttatgcgtcacgcaggcatcaagaaccatgtgtgtccgtactgcggggtgggcaagacgacgcgccaggaatggaacgcccacatcctcacgcacaccaaggagaaaaagttcaagtgccgacagtgcgaccatgcctcgcacaacaaacaggcgttgtccaatcatgtaaaggtggtgcacgaaaagcgcaaggactttgcctgccagtactgcggaaagaccttcggcaagtcgcacgcctgcaaggtgcacgagaggagtcacacgggggagaagtgctgcgagtgcaagatctgcggcaagatattcctctgcgagaagagcctcaccaagcatttgaagacgcacgagaaaagggatctgccgccggcggagccccttcgccagcagcttaacattcccatgcccggccaaatgtccgtaccgatgccgggccagatgccgatgcagatgcagacggatggtttggtgccaatggaccccaaccagatgcctagtgaggacatgctgaaggcatgcggcggcgggaccgctgcagtgcctcccaaaccgaagaactcgcgacgcgtccagcgggtggacatttctcagctggcgggtactgcggtaaatccaataccatccgtatccgtgccctcgtggtcgccgcaagtgaacttcaccaagaaggaaggccagcacatctgtccaggctgtgggcgtggcttcaataatattggaaacatgaaacttcactacaaaatcatccacgagaaggtcaaggactttgcctgtcgcttctgcccgaagagattctccaaggcacagattctgcggcatcacgaatggatccacacgggcgagaagcccttcgagtgcaagatttgtggcaaacacttccgccaggagacggcactcaagaaacacatcaagacgcacgagaagccgaaccggagacacgtgcccgagcgcagtgcgcccactcagatcacgttccgcaagctggagccagacgccgagccgcgtaactttgaccagtatcaggatccggcggtggagcgggcagcggccaccgctgagctgctggcgcaccagctggaggagaacgaggccaagcggaaggcggaaattgagcggcagaagatcgcggcggcggcctgcgagcagctgacgaagctgcagcagcagcaggagatcatcaaggcgaccacctcgtacgatggctactatgcgcagaaagcgcaatccgagggcaccagcctggatgccctgaagatcgaccacgtctaggcagcaggattggctttactttactagcatatatgcatcataacctagccacatccatatgtatccacttccaatgcagctgacactgtccggaaaagttgtaggcatgcctcgaattgctctctagctggatcagattgtaggtttataggcactccagattattcgagtgcatattacaatatgaacacttcatactttttacgtactacgtttatacatacatgcaatatatgtattattttgttttccgtgtaatatctcccgtgcttacttagagtaatggattaaaagtaatattcataacgccattggagtttccatctggtgggcgggactaagagaccactttgcaataccagtgatttttacaaatatattttaataacaaaaaacaaattttttagcccgcaagaacattaatcaaaccttaatttaattaaaataagtcatttttagctgaaatccatctggatggttatgctgaattttatttcatatattccgttctttaaatttagacaaataaagatgataattgatttttaatcgaatattaagaaacattttgctgaacgaaatgatgtgaaagggggattttactggaaaagtttctattctgcatccacgtcgaaatcttcggatgacccttcattgtctgaaggattatttgactcctaaaacaaattggttaatcttatgtaatacatctttaaaacttagttgatgacttaactgtccagttattaccatccgtctgattcaaatccatcaaacttgagataattatcttagctgccttcctgtttttgttggccttcttcaatgctatactctgcttctccaggacctcctccaactctgcgatctccagtttaagcctatttcttctattcccggcatgttgcagtgccagttcagtgtccaataccttaacttcagcttcgagagcttttacggaatccttgtctggttgttgctccatttttttttgtatactcttactcagcatgacaaataataataaagctgctatagaaacaattgatacaaccatatttatagacataccaacgatttaaggtattttgaaaatccttaaaaaatttatatttgtttaaaaatgtatttaatatttaaactaagacatatgtattttttattttaaattctcagactctttgtattgtattgatctagtgctagtattgtgctcgtagctgtccggcagtctcactcgactgtgtgacttgactacgaatacacacactcgctgggtctaatacgcccatcgtaccctctccgctgcgcacatgcatgtgaatgggaaaaacaaaacaaaacgcctgagtgtgggtggcgagtgctagagctgcgcagtttttcagcgagcgtactcgtcgcttgcgggtaatcgataacccgaattgctgacgagtgcacacacacacgcacacgcgagtacacacaaatgtgtgttgtattggatttttttctcggcgaaagaacatttcgaattgctgtggttttcgcgatttctggcttt

SEQ ID NO: 21716 - DNA, 3207 bp, DROSOPHILA
cagtcgacgagtatacaattttttctgtgtcaatattattttattgcttactgaccggagagagacgcaaaaagctatagaaaaccgccccgatccgcagtgccgattgcgattgaaagcaagatgaacgagggcaggcagtactcgatccacagcctgtgcaggatctgtctgaaccacctgcagaacgacgccgcctacgatttgtatctggttccaggactttcgaagaagctatgcttctgcacatccctgtccgtggagcaaaacgacggattcccgaagaacctgtgcaccctgtgctacaccaagctgaacgagctgcacgactttcagaaacagtgcgtcgattccgtgcaaaagttccaggatctggtggccagcaatgtctttgcctgccagagcagcttcgacgtcttcgatcccaacgttgccgtgcaggactacccggccgaggaagaggaccacgtcaactatgacccgctgctgaaccacaagatggagctaatcgagaacgaggaggatgtcttcaagatgctggagcacgtcgacaaggaggccgaggaggtggagaaggaggccaaggtggaggaggatgacgggggcaacgtttccgtcaagatgttcgacgacgattcgtccatcgagagcggcaatgacaacgaccacgatctggacttcgagccaaatagcagcgatgatgacattccgctggcccagcgcatgaggggaccagctaccggatcaggaccccagcaggaccgttttagcaacctagacaaacccaagccgaggccccggggacggcccaaaaagataaaaccgcctccgccagaggaggaggagttgagcgactcatcctccgaatcagatgactccgaagacggcacatcgcggggcgacaagccgaagaggaagcgcattcccatcgaggaacgccacctgcaccgcatcatcgactgccacatttgccaccagaagttcaagaaggccatccgctacgaggagcacatgaagtaccacaacgacctgctgcccttccaatgcaaggtggagacctgcaagaaaggtttcactaccgccaatgggctgcgcattcacatcgaccacgcccacacagagctgtccgaggttcacgcctgcatcgccgagggctgcggcaagaccttcccgcgcgtccgtctgctcaccttccacatgaagaaggtgcacggtatcaccaaggcggctgccccgcttcgagatttcccctgcacagaatgcgacaccgtattccgctgccccacagcactcaagaagcacatgtataagcacacgggcgaggagcttccgtatccttgcaatatctgcggcaagcgttttgtaatcaatagtgctttaagggatcaccttatgcgtcacgcaggcatcaagaaccatgtgtgtccgtactgcggggtgggcaagacgacgcgccaggaatggaacgcccacatcctcacgcacaccaaggagaaaaagttcaagtgccgacagtgcgaccatgcctcgcacaacaaacaggcgttgtccaatcatgtaaaggtggtgcacgaaaagcgcaaggactttgcctgccagtactgcggaaagaccttcggcaagtcgcacgcctgcaaggtgcacgagaggagtcacacgggggagaagtgctgcgagtgcaagatctgcggcaagatattcctctgcgagaagagcctcaccaagcatttgaagacgcacgagaaaagggatctgccgccggcggagccccttcgccagcagcttaacattcccatgcccggccaaatgtccgtaccgatgccgggccagatgccgatgcagatgcagacggatggtttggtgccaatggaccccaaccagatgcctagtgaggacatgctgaaggcatgcggcggcgggaccgctgcagtgcctcccaaaccgaagaactcgcgacgcgtccagcgggtggacatttctcagctggcgggtactgcggtaaatccaataccatccgtatccgtgccctcgtggtcgccgcaagtgaacttcaccaagaaggaaggccagcacatctgtccaggctgtgggcgtggcttcaataatattggaaacatgaaacttcactacaaaatcatccacgagaaggtcaaggactttgcctgtcgcttctgcccgaagagattctccaaggcacagattctgcggcatcacgaatggatccacacgggcgagaagcccttcgagtgcaagatttgtggcaaacacttccgccaggagacggcactcaagaaacacatcaagacgcacgagaagccgaaccggagacacgtgcccgagcgcagtgcgcccactcagatcacgttccgcaagctggagccagacgccgagccgcgtaactttgaccagtatcaggatccggcggtggagcgggcagcggccaccgctgagctgctggcgcaccagctggaggagaacgaggccaagcggaaggcggaaattgagcggcagaagatcgcggcggcggcctgcgagcagctgacgaagctgcagcagcagcaggagatcatcaaggcgaccacctcgtacgatggctactatgcgcagaaagcgcaatccgagggcaccagcctggatgccctgaagatcgaccacgtctaggcagcaggattggctttactttactagcatatatgcatcataacctagccacatccatatgtatccacttccaatgcagctgacactgtccggaaaagttgtaggcatgcctcgaattgctctctagctggatcagattgtaggtttataggcactccagattattcgagtgcatattacaatatgaacacttcatactttttacgtactacgtttatacatacatgcaatatatgtattattttgttttccgtgtaatatctcccgtgcttacttagagtaatggattaaaagtaatattcataacgccattggagtttccatctggtgggcgggactaagagaccactttgcaataccagtgatttttacaaatatattttaataacaaaaaacaaattttttagcccgcaagaacattaatcaaaccttaatttaattaaaataagtcatttttagctgaaatccatctggatggttatgctgaattttatttcatatattccgttctttaaatttagacaaataaagatgataattgatttt

SEQ ID NO: 21717 - protein, 845 aa, DROSOPHILA
MNEGRQYSIHSLCRICLNHLQNDAAYDLYLVPGLSKKLCFCTSLSVEQNDGFPKNLCTLCYTKLNELHDFQKQCVDSVQKFQDLVASNVFACQSSFDVFDPNVAVQDYPAEEEDHVNYDPLLNHKMELIENEEDVFKMLEHVDKEAEEVEKEAKVEEDDGGNVSVKMFDDDSSIESGNDNDHDLDFEPNSSDDDIPLAQRMRGPATGSGPQQDRFSNLDKPKPRPRGRPKKIKPPPPEEEELSDSSSESDDSEDGTSRGDKPKRKRIPIEERHLHRIIDCHICHQKFKKAIRYEEHMKYHNDLLPFQCKVETCKKGFTTANGLRIHIDHAHTELSEVHACIAEGCGKTFPRVRLLTFHMKKVHGITKAAAPLRDFPCTECDTVFRCPTALKKHMYKHTGEELPYPCNICGKRFVINSALRDHLMRHAGIKNHVCPYCGVGKTTRQEWNAHILTHTKEKKFKCRQCDHASHNKQALSNHVKVVHEKRKDFACQYCGKTFGKSHACKVHERSHTGEKCCECKICGKIFLCEKSLTKHLKTHEKRDLPPAEPLRQQLNIPMPGQMSVPMPGQMPMQMQTDGLVPMDPNQMPSEDMLKACGGGTAAVPPKPKNSRRVQRVDISQLAGTAVNPIPSVSVPSWSPQVNFTKKEGQHICPGCGRGFNNIGNMKLHYKIIHEKVKDFACRFCPKRFSKAQILRHHEWIHTGEKPFECKICGKHFRQETALKKHIKTHEKPNRRHVPERSAPTQITFRKLEPDAEPRNFDQYQDPAVERAAATAELLAHQLEENEAKRKAEIERQKIAAAACEQLTKLQQQQEIIKATTSYDGYYAQKAQSEGTSLDALKIDHV

SEQ ID NO: 21718 - DNA, 4751 bp, DROSOPHILA
tagctgaaatccatctggatggttatgctgaattttatttcatatattccgttctttaaatttagacaaataaagatgataattgatttttaatcgaatattaagaaacattttgctgaacgaaatgatgtgaaagggggattttactggaaaagtttctattctgcatccacgtcgaaatcttcggatgacccttcattgtctgaaggattatttgactcctaaaacaaattggttaatcttatgtaatacatctttaaaacttagttgatgacttaactgtccagttattaccatccgtctgattcaaatccatcaaacttgagataattatcttagctgccttcctgtttttgttggccttcttcaatgctatactctgcttctccaggacctcctccaactctgcgatctccagtttaagcctatttcttctattcccggcatgttgcagtgccagttcagtgtccaataccttaacttcagcttcgagagcttttacggaatccttgtctggttgttgctccatttttttttgtatactcttactcagcatgacaaataataataaagctgctatagaaacaattgatacaaccatatttatagacataccaacgatttaaggtattttgaaaatccttaaaaaatttatatttgtttaaaaatgtatttaatatttaaactaagacatatgtattttttattttaaattctcagactctttgtattgtattgatctagtgctagtattgtgctcgtagctgtccggcagtctcactcgactgtgtgacttgactacgaatacacacactcgctgggtctaatacgcccatcgtaccctctccgctgcgcacatgcatgtgaatgggaaaaacaaaacaaaacgcctgagtgtgggtggcgagtgctagagctgcgcagtttttcagcgagcgtactcgtcgcttgcgggtaatcgataacccgaattgctgacgagtgcacacacacacgcacacgcgagtacacacaaatgtgtgttgtattggatttttttctcggcgaaagaacatttcgaattgctgtggttttcgcgatttctggctttcgggatcgtccagcatcgaattgagtgtccaaaatgaatgaggagagccagtactccatacacacggtgtgccgcacctgcctgtccacggtggacgactcggcggcctacgatctgttccgagtgcccggtctggccaaaaagctgtgcgtgtgcacctccttgtccgtggagcaggcggatggctttcccaagaacctgtgcaatgtctgcttctccaagctgaacgacctgcacgactttcagaagcagtgcgtcgattccgttcaaaagttccaagatctggtggccagcaacgcgttcgcctgccaaacaaacttcgatgttctggacaccagtgccgctgtggcggatctgccgggcgaggaagaggacaacgtgcacttcgatccgctgctcaactccaagatcgagatcattgagaacgaggaggacgtcttcaagatgctcgagtccgtcgaaaaggaggtcgaagaggtggagatggagatggaacagccgtttggccgagtatctcaggatgactccttcgagagcggcaacgacaacgacctcgacgcagacttccaaatcagtagtgacgacgacattccactggcccagcgcagccggcgtggagccactcgtggttccaaggcgaagggcaagccgaagtcggctgccaagcgacaggaggaggaatccgaggagtccgaggagaccagctcatcagacgactccgatggcaatccgaaggacaagcccaaacgcaagaggattcctgctacggagcgggatcgccaccgcctgattgactgccacatctgccaccagaagttcaagaaggcgattcgctacgaggagcacatgaagcatcacaacgacttgctacccttccagtgcaccgtcgagagttgccgaaaaggtaaactccgcccgcagatcctcgagaagtagatttatgtgattatttttccaatttcaggctttaccaccgccaatggactgcgcgtccatgtggagcacgcccacacggagacatcggctatgcatccgtgcacctacgagggctgcaacaagtcctttgcccggcccgtgctgctcagcttccacatgaaacgcgtgcacaaggtggacaccccgcagagggacttcccctgcacggagtgcgagaaggtcttccgctgccccactgccctcaagaagcacatgtacaagcacacgggcgaggagctgcccttcgcatgtgaaatttgcggcaagcgcttccccatcaatagtgtgctgcgcgaccatctgctgcgccatgcgggcatcaagaaccatgtgtgcccgtactgcggagtgggcaagacgacgcgccaggagtggaacaagcacatccttacccacacgaaggagaagaagtacgagtgccggcagtgcgaccacgcctcccacaacaaacaggcgctggccaaccacgtgaaggtggtgcacgagaagcgcaaggactttgcctgccagtactgcggaaagacctttggcaagtcgcacgcctgcaagattcacgagagaagtcataccggcgaaaagtgctgcgagtgcaagatctgcggcaaggtgttcctcttcgagaagggcctaaccaagcatttgaagacgcacgagaagcgtgatttgcccaagacgcaggggaccaatgccttaatgggcgacggggccagtggatcctcgacaatagccaagcccagtccgcacctgcgtggtcgcgtcgagcgggtggacattgctcagttggcgggaacggtggccaatccaattccatcggtcaacctgccctcgtggtcgccgcaagtgaacttcaccaagaaggagggccagcatatctgcccggactgcggcaagggcttcaatcacgtgagcaacatgaagctgcactacaaggtggtgcatcaaaaggtcaaagacttctgctgccgcttctgcccgaagagattcgccaagaagcagtacctgcggcaccacgagtacatacacactggcgaaaagccttacgagtgcaaggtgtgcggcaagcatttccggcaggagcaggtgctcaagacgcatatgaaggtgcacgacaagccgccccgtccgcctggcaagcccaaggagccggctggacccaaggcggagtccagcaccgcggtgaagcgccagcagccgaagaatttcgagcaataccaggatccggcggcggaaagggcagcggccaccgccgagctgctggcctaccagatcgaggagaacgaggccaagcgcaaggcggaggcggagctccggaagatccaggaggctgccttcgagcagctaaacaagctgcagaagcagtcgaacacttacgacggcttctacgcgcagaaggcggaggcggagggcacctcagtggacgcactgaagttggatcatgtttgagcggcagaatcaaacggaaatgcttgcgagcaaacccggcctccgtttccgatcatttcattatgtgtttctatgaaggacatatgagttatagttctctaaggattaccaactagttttcgtcactttgcaatttgatcttttttgtatttaaatcccccctttaaactgcttaagtttgtactttactaattgtattcatttaacaatgatttaatataataaacagtaataagtattgaacatttgaattttaaattcgccccagtgctggtaagcgggtattgttggtaaacaagacagaggtgagctgtaatgctgccaactcgtctgttttttagctacattccactagctatgcaacttatatgagacacatataaaactacgtatttaatttaggttaatacatacatttattaagaatcacacttaaaatggcacatattttttaaaacatttgaaatttgttattgatgctatccatatttctagccggtttaataatttagctattaaataactgtttgtacttggcatcactgtggggtattttttggtatttgttttggttcgtctgacgcgtaaagtttttctcggcttaatattccgcggatttggccagcagattccccctggaacaggcatcatgcaggaggaggccgaggcagcccagtactcggtgcacgcggtgtgccgcatctgcctgaatcgcctgccggagaatggcggcggcgcaggatcctttgacctgttcctgatacccggattggccaagaaactgtgtgtctgcacttcgctggccgtggagcagtcggatggcttccccaagtgtctgtgcgcgcaatgcttcagccggctggacgatatgcacgagttccaaaagctgtgcgtggactcggtgcaaaagttccaggacatggtggccaggaacgtcttttgcccgccagcgagtgcgcagatgaaaaactttgatttgctcaacgtggcggggaacgagcctgagctggtggggcaggacgaggaggatcgtatcaacttcgatccgctactggatcacaaaatggagatgatcgagaacgaggaggatgtgttcaagatgttggagcacgtggacaaggaggccgagcaggtggagaaggaagtgaagcaagatgaattggacgccgccgatctgatgaccatctttgccgcggaatcctcggaggagagcgaagaagatattgaccaagatgtggacttt

SEQ ID NO: 21719 - DNA, 2691 bp, DROSOPHILA
cgcgagtacacacaaatgtgtgttgtattggatttttttctcggcgaaagaacatttcgaattgctgtggttttcgcgatttctggctttcgggatcgtccagcatcgaattgagtgtccaaaatgaatgaggagagccagtactccatacacacggtgtgccgcacctgcctgtccacggtggacgactcggcggcctacgatctgttccgagtgcccggtctggccaaaaagctgtgcgtgtgcacctccttgtccgtggagcaggcggatggctttcccaagaacctgtgcaatgtctgcttctccaagctgaacgacctgcacgactttcagaagcagtgcgtcgattccgttcaaaagttccaagatctggtggccagcaacgcgttcgcctgccaaacaaacttcgatgttctggacaccagtgccgctgtggcggatctgccgggcgaggaagaggacaacgtgcacttcgatccgctgctcaactccaagatcgagatcattgagaacgaggaggacgtcttcaagatgctcgagtccgtcgaaaaggaggtcgaagaggtggagatggagatggaacagccgtttggccgagtatctcaggatgactccttcgagagcggcaacgacaacgacctcgacgcagacttccaaatcagtagtgacgacgacattccactggcccagcgcagccggcgtggagccactcgtggttccaaggcgaagggcaagccgaagtcggctgccaagcgacaggaggaggaatccgaggagtccgaggagaccagctcatcagacgactccgatggcaatccgaaggacaagcccaaacgcaagaggattcctgctacggagcgggatcgccaccgcctgattgactgccacatctgccaccagaagttcaagaaggcgattcgctacgaggagcacatgaagcatcacaacgacttgctacccttccagtgcaccgtcgagagttgccgaaaaggctttaccaccgccaatggactgcgcgtccatgtggagcacgcccacacggagacatcggctatgcatccgtgcacctacgagggctgcaacaagtcctttgcccggcccgtgctgctcagcttccacatgaaacgcgtgcacaaggtggacaccccgcagagggacttcccctgcacggagtgcgagaaggtcttccgctgccccactgccctcaagaagcacatgtacaagcacacgggcgaggagctgcccttcgcatgtgaaatttgcggcaagcgcttccccatcaatagtgtgctgcgcgaccatctgctgcgccatgcgggcatcaagaaccatgtgtgcccgtactgcggagtgggcaagacgacgcgccaggagtggaacaagcacatccttacccacacgaaggagaagaagtacgagtgccggcagtgcgaccacgcctcccacaacaaacaggcgctggccaaccacgtgaaggtggtgcacgagaagcgcaaggactttgcctgccagtactgcggaaagacctttggcaagtcgcacgcctgcaagattcacgagagaagtcataccggcgaaaagtgctgcgagtgcaagatctgcggcaaggtgttcctcttcgagaagggcctaaccaagcatttgaagacgcacgagaagcgtgatttgcccaagacgcaggggaccaatgccttaatgggcgacggggccagtggatcctcgacaatagccaagcccagtccgcacctgcgtggtcgcgtcgagcgggtggacattgctcagttggcgggaacggtggccaatccaattccatcggtcaacctgccctcgtggtcgccgcaagtgaacttcaccaagaaggagggccagcatatctgcccggactgcggcaagggcttcaatcacgtgagcaacatgaagctgcactacaaggtggtgcatcaaaaggtcaaagacttctgctgccgcttctgcccgaagagattcgccaagaagcagtacctgcggcaccacgagtacatacacactggcgaaaagccttacgagtgcaaggtgtgcggcaagcatttccggcaggagcaggtgctcaagacgcatatgaaggtgcacgacaagccgccccgtccgcctggcaagcccaaggagccggctggacccaaggcggagtccagcaccgcggtgaagcgccagcagccgaagaatttcgagcaataccaggatccggcggcggaaagggcagcggccaccgccgagctgctggcctaccagatcgaggagaacgaggccaagcgcaaggcggaggcggagctccggaagatccaggaggctgccttcgagcagctaaacaagctgcagaagcagtcgaacacttacgacggcttctacgcgcagaaggcggaggcggagggcacctcagtggacgcactgaagttggatcatgtttgagcggcagaatcaaacggaaatgcttgcgagcaaacccggcctccgtttccgatcatttcattatgtgtttctatgaaggacatatgagttatagttctctaaggattaccaactagttttcgtcactttgcaatttgatcttttttgtatttaaatcccccctttaaactgcttaagtttgtactttactaattgtattcatttaacaatgatttaatataataaacagtaataagtattgaa

SEQ ID NO: 21720 - protein, 774 aa, DROSOPHILA
MNEESQYSIHTVCRTCLSTVDDSAAYDLFRVPGLAKKLCVCTSLSVEQADGFPKNLCNVCFSKLNDLHDFQKQCVDSVQKFQDLVASNAFACQTNFDVLDTSAAVADLPGEEEDNVHFDPLLNSKIEIIENEEDVFKMLESVEKEVEEVEMEMEQPFGRVSQDDSFESGNDNDLDADFQISSDDDIPLAQRSRRGATRGSKAKGKPKSAAKRQEEESEESEETSSSDDSDGNPKDKPKRKRIPATERDRHRLIDCHICHQKFKKAIRYEEHMKHHNDLLPFQCTVESCRKGFTTANGLRVHVEHAHTETSAMHPCTYEGCNKSFARPVLLSFHMKRVHKVDTPQRDFPCTECEKVFRCPTALKKHMYKHTGEELPFACEICGKRFPINSVLRDHLLRHAGIKNHVCPYCGVGKTTRQEWNKHILTHTKEKKYECRQCDHASHNKQALANHVKVVHEKRKDFACQYCGKTFGKSHACKIHERSHTGEKCCECKICGKVFLFEKGLTKHLKTHEKRDLPKTQGTNALMGDGASGSSTIAKPSPHLRGRVERVDIAQLAGTVANPIPSVNLPSWSPQVNFTKKEGQHICPDCGKGFNHVSNMKLHYKVVHQKVKDFCCRFCPKRFAKKQYLRHHEYIHTGEKPYECKVCGKHFRQEQVLKTHMKVHDKPPRPPGKPKEPAGPKAESSTAVKRQQPKNFEQYQDPAAERAAATAELLAYQIEENEAKRKAEAELRKIQEAAFEQLNKLQKQSNTYDGFYAQKAEAEGTSVDALKLDHV

SEQ ID NO: 21721 - DNA, 11838 bp, DROSOPHILA
ttccactacttcagtttagttttattgtattgcgattattatttaaagtatttgtatatccactgcttgctacttgaacaccccagtacatcgaatacctatctttctacacgcgagctgaaatataaaaaaattaaaagtaataaaaacgcctaaaaactttctaaagataactttaaattgcttgtgccaaacttggatatactttctgtatcgtaaacgtgctgctcaaaaatgtaaatacatcgctaagtcacttagcgcaaagtaaatatttgctacactgactttttattatccttatgtacattttattaatggaagcaacttcccttcaatctatctcgtcgtctcaaaaactggaaagggtttggaattttagggttggtcccaattcaatctcgcgaaactcgaacagcatttttgttttacttttctagaacaaaaccaagcgaacaagaagaaataatgaacacaaaactaaatcggtgtaattagtttacaattttattttgaaataataaagacaaaacattcaacttatggacaaacgtaattaaacaatagttcaaattaaatacataatcatagtaattggtaatcggtacaaagaaatcagtaacattgttcatcagcgcagttgcgtttttccggttcaacgttataaagtattacgaaaaacgtccctagactaattagaattattaatgaaataaaaacacactggtgaaaggggagctgttggatagtaattatcaaataaaacaaggcaattggagagctgggccttacaataagttagctagtcatacacaattcatttagttaaaattacaaaaaatcttttatcaaatacattacaattccgaggatccgggatccgatccgtctggacccatttacaaataatctggctaaaagcatgaaagctttgcatacttttctggatttctctctgtcacgctccattcagcaaattgaactaaattagtttactaaattaattactcgttgtggtggctgagttgttgttaatgttcatgttgttactggcggccagcagctcgcccgtttggctccgactgtccattgaccagtcccagtccttgccctttggccgaaatttggatgacttgtgatggtgctgctgctgatggtttaagcccgtgtggtgcggtgaagacttttccttgggtgactttcccgattttcccaagagcggtgcaggtgctccgcccacagtattgggagcatccaagttaagtggcccattgcccgctgcatctgctgccgtcggcggtgcactggagttggagtaggccagcagttcatcacagtcgtactcccagtttctttcgcagaacttctttttgtagtgcttttccgaactggtcttggacttgcgctggtacttcagaggtataccacctaagtccccggacacgggtggtccactggccagtggtggagtggccacactggctgcactgggactgggagttctgggcaatccaacgtccgagagtggcggcgactcgatggcactgggatccactggcgacacggtcttaagggagctaccagcatgcagcgaggaggatgccgaggatttcatgctactgtcgctcatgtgatcggaaagatggtgctgctgctgttggtgctgcgcctgcaactgttgctgttgctgatgtgggtggctgcctccgctgccgccaatgccaatgttgttgtgctgggcatgatggttgtagaggctgttgcagctactaccaccgcttcctatgggcagctccagctgcgaggagctggacgaggtggacaaaaatgtgcgcactgcatctgagttgctgctgctgtgcgtaatgcccgagtccggagacgtgttgcaactaatcgaggccggcacggtatcgccatcgatgcttcgcctggtcttatccaattcagtgctggcgaaggccacgaggcggtcgaaaccagagctgactcgatgctgccagtgggtctcatcatcagcggcaataacatcgtctgtgaagaattaggataaaatattagttttatctcgctaacgcgaccaatactagtgcgatttttagatttcgtttgggtgatggtgatattgtgagtttgagtggatatttggaaaagtcaattggaaagggtgataacgatacactggcgataacgcgtgttgtcctaagcttttttcatatttcattatctttttggtacagctgcattgcgcgttgcgtgcaggagggtatgttcttgtgttcatttgtattaatgggtgtttttgtgttttatttgtttagtgtggtgattgaatgttgaaacaaaggagttacgtaatgaaagtaaaatatataaatcataattaaaagaaagaaaccaattaggcgcaacagaacttacctcatgctcgttaaattttcataaattttgttcgggatttttaagtatatatatatatatatttttttttttttttggcatataaattctgtacttttagtaggtaaattattaaacgcaaaaattaaaagttgtcttttgtaggttgtttctgatttgaaatctttgtttttcatcaggttttttgtactctgcttattatttatggttattacaagatcgtatcttcgcccaacaacaaacatgttttcggttttgctttttgtttagtttgtttgaggaattttgaggtatgcaagtcaatcaatcaatcaattcaattcaattcaattcagttcaatgcaagtcaattcaatgcaatcgatcattggttattggggtattgtggggcaactactactactatcggccataacatatccgttcagattttgattactatgggcagctgatagtttcgttgggccagacaaagtcgtgcgaaggcgacgtctgggatcgtaattagttatagtacgttgcgttgccaaatcgttaactgtatggagtagagcataatagaagggataataaagaaggctggataagatgaggggggggggggggcatatttttgtttgatttgtttggtttggttcttagcattaccaatttgcatttgcagatttcttcgaattttagtataattgaaaattaattatgcattaataacattccaggagttgcttttttgggttaattttgaaataaatgtttgcttatgggggtgtgtgtgtgtgtgttgtattcttatatatggtttttacaagagagcctttacgctttacacgggttttttgtgtgattgctgatatctctgagtgactattatatgcagtgggtatagatagatgattgatttggcatgacgcttagaataatagtggagctcgatttatctcagcatgttgaatgttgttggctttgattttatggtcgtttacgtttttatattgtactataatgtttgttgaggtttgtggaaaatgtacgtaaagcccaactaagagctttagaagatgtaaccaaatttcactcgcgatacactataagatttattcatttacatttggtaaaattcattgatgatcgccgtcagatttcaccctttgaagcttacaaatttcaatgtggatggcataaaatatatacaagaagcattaataaaaatcataacaaaataaaaaaaaagcaaatctactaaaacaaaaacaagcaacaattacattgaggactacaagtgttacgggcaaaaaacaaactagatagaacaaacaacaattaaaatgaacgagatgtgagaaaagatcattttttgtgcatgttgtatttacaaaatgtataaatgtataattatgttcagatgtatgtgtgtgtgtgtatgtataaagcgttttaaaagcaattcatggcacgtcagaactggaatcagatcctgagtgcgagctggaactcgacgatgaggatccgctatgggaacctccatcttcgacaaacgcagcaaccacttccggctcgagttctgaatccgattcctgctcttttcgcttcatggtaagatcttctgccaccgtttgggtggctagtcgttggtatttgtgctggtgaagaatatgtggctctagcgggaatgctacgtgtgcaggtggtggtgcttgttgtggtgcatatttgggtacagataccctggtcgagttttttgcttggtctacgtatagcttaccatcgtcggcggcattgccattgccattgcgttgtccgcccaaagtgggcatggtgctgtgaccgtgactaagaccatgtccaagatgagctacacgcagttgctgttgggtcagctgcagatgctgctgttgctgcgattgatggtgatgcagcatttgctgctgctgctgttggtggtgcgacagctgcaaaggcctttcgtcgcccaacagtgaattgatctcgggactcattagcaaaggtggatccacgagcaactttccattgttgctgttgcttcgacgtccgcaggacgatgaagatgacgagggcgtcggggagggcgtggtcgcatcatgagctggaggcggaggtagcacttgtccgttggcgtacaggtgggcatgggcatgctgctgctgcgtcgttggcggctcgtagtgtgccaatttcgagggacgtggcggttgctgatgcggcgccagcggtgagctgcgttttattcccactgaaacacaattaaggtatttagaaactatcgaattttcaaatttctgctagagtatcatggaacaacgaaaaaaacgtagttttggccttgtaaatttgtcaagttactagagctaaaagccttactatattttcaagtaatttttctgcaatcaacggaatgcttacgttctactttgtgcggtgttccattgatgcttgcaccatggtggtggtagctgtgggctggaggcgcctgatgagcatagtgcgttggcagttccatgccagcaggcggtcccgccgaagacgaggcagcggctgctgcacgtcgttgacgctcctcggtctcctccttgtactttctggcacggacatgatcctgcagcgatgctgctagacctacagatatacaaaatatgtttggtaaaccagttcgaagaagaaacattgcattcaataaaagttgagaagagcactcttattttaaacatatttaaaatttactggagcacagatttctagaaatttcaaaaaggctaatatttttaacgtataaaatttgattcgcctagaaggtccaagctcgtcggacaaaaacgagcggcaatttaccttccaatggaggattggcaccattaagacgcggtccccgcaaagaggacgatcctgctgatcctgcgcccttcgactgcttctgctgctgctcctcgtggaaataggcctcaatgctgcccttaagctcagcacggggcaaagccacaggctgatagtcacgtccagaacgagcagaggaggagtgggttgcgggtggtgccgttcctgcgttggctcgagcgccgccctgtgccttttgggcgtaggctacatgtgccaaagtggccagattgctgttacctccagctgctgctccaccagcacctagaccaggtcctctctcctgagcataactggtgggctgtggatcctgcgattcttcggagagcggacgaacatgaactctctctggtcgttgggcattcaagttgatcagcaaacgatcgttggagcgctcattaaggaaggcccgctccatgaagctagcgccactagtgctcatattcacagccgcattaatgatgctctgatgcgaaatctcaagcgttcgctcgatttccccgttaaccaaatcgccaatggtcttccctgatgtgggtgctcctccgtgaccaggaagcggcggtgtggcctggggcgtgacatgttggctcagcttctcctgcgacagatgccgccgcagagccatctttgcgggtgaaacttgcgtgtaatctggttgcgaggagttggagcttggcctgcttggcggacggatgcgatatccgctgtaatccgaattggcggaacttgctcgaggcagcagctccagcggttgcgtctgcgggggctccactattaattgctcacgactgctcgatcgctggagatgactatcagccggcggtgccttgaactcattgggatgatgctgatgcggatgctgatgctgcacatgctgcggcagacggtgttggggatggtggtggtggtggtggtggtggtgttggtgctgctgctgctgctgttgttcttctacgcgcatctgttgacgctgggccgcatgagcagcggctgctagcatgagttgttgttgctggagttgctgctgctgctgtaccatatagtgttcgtagctagtggcactaacagagctgcgtcgccgctggtaacctaggtccgccggagtagtctgctgtccagctggatacaaagatgccatgtgggaggggggaggaggtaatggtgcctgtctaactggcgaatacttcggttccttagctgcctggtacttccccgatatcgttgtctttgccactgccccgccgtaagccccataaggaagattcgctgggggaggcggcgcagtggatgcggttgctcctgcacctggacccggcagtggtggtgttattggggatattgttgtattggcattaaggtgcatcaaaccctgcgtggagacggtgatgatgttgtgcagattgttgggcagcgactgggcagggtttatcgctccagccggatgctgctttgatcgcttgggtgctggactgtgaagaggtgagggagagggtgacgactccactgccttgctgcgctgctcctgatcttcgtttaaggccgtggtgatgatactctttaaccgatcctcaaagttggcaaccttgggagattcctgtttgcgactagtcgatagtccgggcagctcacacttcggaagctgggaaagcgtcatctgttgttgctgttgttgtttgggtgctggcatcagtgttgtgtctttatagtggtgcccaggcgaggatttaatgctcactggagcagtggccggaggtggtgggacctctataattgctttattcttgccattcacttgcgatgagggcgcacctgctccttggaacttgccagcttcgatttggcggcaggtctcgactattttctgtgccagcacttcgggattgctttcctggattttacccacttcgggaacctctggccactcctgggaacgcgctcggtgctcgcgattgcgacgagagttcttcacggagttcaacttgttgctctgcgccgtaactgcacttgcacaaacagtggtagaggaggaggaagatgatccggtcgacacaatcatatttgttccttgtgccaagagcgtcgctgccgtggacctttcctctgctgtcttctgcaaaaccgaagtctcctgttcaatggtggacacctgggcgtaaagtttctttcgttgacttagcgtgttggcgatctcctttagcaccagctcctgggccgtggtctcggaaagttccgggggcacctccagcttgacctttccattaacagtaccacagagtttttgatactcgggtagattttttagttgtttgttaaggagcagcttctgttcgccctcatagaaggttacttcgtttcgcattcgacttgcagtgtgctgtagatccttatgtctacccacaatctcctttgcctgggcgatcaaatcgtttggtgagtttacatggatgcccagctcgttcattcgcactttaagtaaagccacactgtcatcgatcagcacttttatctgcttatccaactggctggctctgtttttcagcctggccatccgctcctgctcttgggcaatctgcttctgaacttgaggcacataggcacttgacttcatgtgctcgatcatcgatgtgtactgcgaacggaacacgtctagaaggatctgcaaggcataaggcgtgtcttgtggcgccgttggaatatccaactctgcatgcgacatgttttccgtgagcaaagcagtaagctgttgatccacggttccaggagctgcaggcaacttcttggtcatggtatccaaggaggtactcaacactgtttgcttgtgcagagcttctagtccaacaatctttaaagacttcctgccgcgcgcacccttcttcatgcgtcctttgcgaccaggtccggcgctagcagcccttggtggatcctctttggaactggactccttgcttggtacggataccgccgccgccgctgccgcctccgcttccctttgggcagcggcagcagatttgctggctatcgcagccttcctagtcaactttttgcgcttcttctgggttgtagcccgagcctgtcggccaactgatcctcctccaatgctaccaccattactgccgccattgctgttcgagttgttgttctcctcgtcgtcagactgcgaactcttgcctttggaactgcaccagtcggaccaaactttcctagtcatcgggccattggaggcggaggtggtattggtggcagtggtggtattgccaccattgccattcgttgcgtcgccatcgctttccgtgctgctttccatgtccaagctgcgttgctgctggttatgctgatgctgcagttgctggcgtgttttggaagctgcttgttgcccgctagctgcaagtactattcccgcaccgcttacattagctggcgactgggactgatgccgttgctgatgagctgcagttgcggtagctccgttcgactgctcccgatccctctgatggttgttgctgttggcgtggttgttgctatgatgattgttgtgatgatgttggccaacgtttgcctctcgcttggcgcgatcacgtgtggtgcgaacagttcctaaaaaaaaaaagaaacagcagttaatatctatttcaaataagaatgctctcttgtgtgcacctatcctatagcccttaattaattttagtattctatctcgttagaatggatttagtgcctttttttaactcatttttgagaaatccattgaatattgtaaatataggtaaatgatttgatttgattaaatagacggagcaaatataaaagaggcccctcctatacggacaatcctctttacgatttcacattttaaatcgttaacaatccacaaagtctaatactaaatatacacatattcagttatattccttttcaggttatcattacttaaacgtatttatcatcccaaacttcaattgatgatttcattgatatgatatgataaatacaaaagaatttgatttgatacattttctatcccaaatgattgatcaaaggaaaaatcatgacagcgattgattgattgggaatatttcatggtggcgaacatgactgtttctgtgtgtgtgtttgtgtttgatttccggttagtgcatccttcaactcagtcgtctactggttttcagaacttacccacgctctcgtgatcgttgccgcccttagttttcaggcgctgaaagtatcgctccaatatggtgcgatcgatcacatgcagataatacgaaacgggcttgcaggtccaggaaacggaccccttgaggggcggaatttcgctgacgtgcataatggtgccaatgtcactgaggtttctgcaagaattgaatttgagtaagtataaatgtataaaaaacagttggtcatcttagtaacaacaaacctgtctgtgatccgaaagttcagcgggcaaaacgacttggaggacacgacccgtgctccgtcgcgaagatctgcgaaccgttccttgagctgatggtccacagttggcccaaaggcgaagttatttacaaaaaccagcgtcgatgaggtgatgttttcacgatgctcatcgaccaggaagtcaccctttatcagcttgtattcgcaaaagcgttttccaaaccatcccatatactggcggaagataacatccatgcgttccgcatatcgcgccggcgtgtcggccttctcgatgccgatgcaggttttcaggggaaacgatccggccatctgcagaaccacctggcccacccccgagccgagatcgataaacgtgtcctccttgctgacagtgacgtgcttaagcatctgctgcaccagctcatagctcgtctcgccgtaaacctctggcgagaagggctcgtactggttgagtttatccggatcgagtacggcggcattgtaaactaattgcaatatgtgtcttagaaggctagggtgagcgaacttgttcaggcgctcggcgggcagtgaagttcctttttcctaagagcaaagagaacacattaggaacaagttcatgtgtgctaatattagcgggtatttgatgcaaagaaaaatatcaagtactacaataaattatatcttcagaccgcatattgcattatgatattaatttaaatctttaaaagaaaaaaaatctttaaaatctagtggcctttgctttgatttccctttcatgactaattttttttttgctttcgataccacaacaatgtaaatcaactcaccaatgcaacgatactgtcgacggccttgttgaagcgatcgaccagaccggtcatagtcttatagcaggcagtgtcaatttggtggagattggtttcctcgaaggccgatgacatcgatggcagttcatcgcagacgaacttaatggtgtcgatgatgtcgatgccattgtcgtgcttatcctgtccgtgtccgatctgcaggggccaggcgaaggaaatgacatcggaggagccagcgggcgagcgcaacaccaagtccttgacttggggtgtggccatatttttccgctttccttagccttagccagcctttttttttattatttttgtctattttgttgtgtttttggtgtgcgtgacaaaggggcgagatcggcgttgtttttgtgggggttttgggtatttgtcgaaaacaacgtctagttgcgacactgtcgtttgagattttgacgtttgatgaggcgtttatgggagtctatgataggtgctaagcgatttgatgatcaaaaattggcataggattcgtgtttcagtagcgtatattgtgtagaggcgttggcgtttcgttttacggttacgactatggtctacgtttatttcaagtggtttcttcttcttttttgtgtcaaatttagtgtcttaggaacagtggcagcgttgggttaacgtattgggctaatagaataatattatgcttcaactactctcgacgttgctctaaacgttactttaactgttacttttactgctgctgctgctctgcttccttttctgcttcctttgcgaaggcttctctttccggttccggtccgtcttcctcttctcacttccgctcttcctccagcagcagcgacaaaatacaaaagtaactgatgatagttgcgaagtttgatattttgctggatgttaagaaaacgatgcattttcttcagttttcgggaacaacattttccaaatgttttcctttccccctacagtttctgtttctgtatcgaattcttcctgttgctgttgcattatagattcccaccgttccgtttcgattcagtgcgtttcgtggcgcacgctcgttgccgaaaaccgttgcacatattgcacgcaactctgtccagtattggcaagtgtttcagtggaatctgctatctttacgcctttacaacacgcgcgccgtaatttatgtacagtttaaaagtgttttgttagtttgagtctgtaacaagagagaaaagaagaaaagagaatggtaaaaacataaataagcaacataatcaaaacaaat

SEQ ID NO: 21722 - DNA, 6714 bp, DROSOPHILA
atggccacaccccaagtcaaggacttggtgttgcgctcgcccgctggctcctccgatgtcatttccttcgcctggcccctgcagatcggacacggacaggataagcacgacaatggcatcgacatcatcgacaccattaagttcgtctgcgatgaactgccatcgatgtcatcggccttcgaggaaaccaatctccaccaaattgacactgcctgctataagactatgaccggtctggtcgatcgcttcaacaaggccgtcgacagtatcgttgcattggaaaaaggaacttcactgcccgccgagcgcctgaacaagttcgctcaccctagccttctaagacacatattgcaattagtttacaatgccgccgtactcgatccggataaactcaaccagtacgagcccttctcgccagaggtttacggcgagacgagctatgagctggtgcagcagatgcttaagcacgtcactgtcagcaaggaggacacgtttatcgatctcggctcgggggtgggccaggtggttctgcagatggccggatcgtttcccctgaaaacctgcatcggcatcgagaaggccgacacgccggcgcgatatgcggaacgcatggatgttatcttccgccagtatatgggatggtttggaaaacgcttttgcgaatacaagctgataaagggtgacttcctggtcgatgagcatcgtgaaaacatcacctcatcgacgctggtttttgtaaataacttcgcctttgggccaactgtggaccatcagctcaaggaacggttcgcagatcttcgcgacggagcacgggtcgtgtcctccaagtcgttttgcccgctgaactttcggatcacagacagaaacctcagtgacattggcaccattatgcacgtcagcgaaattccgcccctcaaggggtccgtttcctggacctgcaagcccgtttcgtattatctgcatgtgatcgatcgcaccatattggagcgatactttcagcgcctgaaaactaagggcggcaacgatcacgagagcgtgggaactgttcgcaccacacgtgatcgcgccaagcgagaggcaaacgttggccaacatcatcacaacaatcatcatagcaacaaccacgccaacagcaacaaccatcagagggatcgggagcagtcgaacggagctaccgcaactgcagctcatcagcaacggcatcagtcccagtcgccagctaatgtaagcggtgcgggaatagtacttgcagctagcgggcaacaagcagcttccaaaacacgccagcaactgcagcatcagcataaccagcagcaacgcagcttggacatggaaagcagcacggaaagcgatggcgacgcaacgaatggcaatggtggcaataccaccactgccaccaataccacctccgcctccaatggcccgatgactaggaaagtttggtccgactggtgcagttccaaaggcaagagttcgcagtctgacgacgaggagaacaacaactcgaacagcaatggcggcagtaatggtggtagcattggaggaggatcagttggccgacaggctcgggctacaacccagaagaagcgcaaaaagttgactaggaaggctgcgatagccagcaaatctgctgccgctgcccaaagggaagcggaggcggcagcggcggcggcggtatccgtaccaagcaaggagtccagttccaaagaggatccaccaagggctgctagcgccggacctggtcgcaaaggacgcatgaagaagggtgcgcgcggcaggaagtctttaaagattgttggactagaagctctgcacaagcaaacagtgttgagtacctccttggataccatgaccaagaagttgcctgcagctcctggaaccgtggatcaacagcttactgctttgctcacggaaaacatgtcgcatgcagagttggatattccaacggcgccacaagacacgccttatgccttgcagatccttctagacgtgttccgttcgcagtacacatcgatgatcgagcacatgaagtcaagtgcctatgtgcctcaagttcagaagcagattgcccaagagcaggagcggatggccaggctgaaaaacagagccagccagttggataagcagataaaagtgctgatcgatgacagtgtggctttacttaaagtgcgaatgaacgagctgggcatccatgtaaactcaccaaacgatttgatcgcccaggcaaaggagattgtgggtagacataaggatctacagcacactgcaagtcgaatgcgaaacgaagtaaccttctatgagggcgaacagaagctgctccttaacaaacaactaaaaaatctacccgagtatcaaaaactctgtggtactgttaatggaaaggtcaagctggaggtgcccccggaactttccgagaccacggcccaggagctggtgctaaaggagatcgccaacacgctaagtcaacgaaagaaactttacgcccaggtgtccaccattgaacaggagacttcggttttgcagaagacagcagaggaaaggtccacggcagcgacgctcttggcacaaggaacaaatatgattgtgtcgaccggatcatcttcctcctcctctaccactgtttgtgcaagtgcagttacggcgcagagcaacaagttgaactccgtgaagaactctcgtcgcaatcgcgagcaccgagcgcgttcccaggagtggccagaggttcccgaagtgggtaaaatccaggaaagcaatcccgaagtgctggcacagaaaatagtcgagacctgccgccaaatcgaagctggcaagttccaaggagcaggtgcgccctcatcgcaagtgaatggcaagaataaagcaattatagaggtcccaccacctccggccactgctccagtgagcattaaatcctcgcctgggcaccactataaagacacaacactgatgccagcacccaaacaacaacagcaacaacagatgacgctttcccagcttccgaagtgtgagctgcccggactatcgactagtcgcaaacaggaatctcccaaggttgccaactttgaggatcggttaaagagtatcatcaccacggccttaaacgaagatcaggagcagcgcagcaaggcagtggagtcgtcaccctctccctcacctcttcacagtccagcacccaagcgatcaaagcagcatccggctggagcgataaaccctgcccagtcgctgcccaacaatctgcacaacatcatcaccgtctccacgcagggtttgatgcaccttaatgccaatacaacaatatccccaataacaccaccactgccgggtccaggtgcaggagcaaccgcatccactgcgccgcctcccccagcgaatcttccttatggggcttacggcggggcagtggcaaagacaacgatatcggggaagtaccaggcagctaaggaaccgaagtattcgccagttagacaggcaccattacctcctcccccctcccacatggcatctttgtatccagctggacagcagactactccggcggacctaggttaccagcggcgacgcagctctgttagtgccactagctacgaacactatatggtacagcagcagcagcaactccagcaacaacaactcatgctagcagccgctgctcatgcggcccagcgtcaacagatgcgcgtagaagaacaacagcagcagcagcagcaccaacaccaccaccaccaccaccaccaccatccccaacaccgtctgccgcagcatgtgcagcatcagcatccgcatcagcatcatcccaatgagttcaaggcaccgccggctgatagtcatctccagcgatcgagcagtcgtgagcaattaatagtggagcccccgcagacgcaaccgctggagctgctgcctcgagcaagttccgccaattcggattacagcggatatcgcatccgtccgccaagcaggccaagctccaactcctcgcaaccagattacacgcaagtttcacccgcaaagatggctctgcggcggcatctgtcgcaggagaagctgagccaacatgtcacgccccaggccacaccgccgcttcctggtcacggaggagcacccacatcagggaagaccattggcgatttggttaacggggaaatcgagcgaacgcttgagatttcgcatcagagcatcattaatgcggctgtgaatatgagcactagtggcgctagcttcatggagcgggccttccttaatgagcgctccaacgatcgtttgctgatcaacttgaatgcccaacgaccagagagagttcatgttcgtccgctctccgaagaatcgcaggatccacagcccaccagttatgctcaggagagaggacctggtctaggtgctggtggagcagcagctggaggtaacagcaatctggccactttggcacatgtagcctacgcccaaaaggcacagggcggcgctcgagccaacgcaggaacggcaccacccgcaacccactcctcctctgctcgttctggacgtgactatcagcctgtggctttgccccgtgctgagcttaagggcagcattgaggcctatttccacgaggagcagcagcagaagcagtcgaagggcgcaggatcagcaggatcgtcctctttgcggggaccgcgtcttaatggtgccaatcctccattggaaggtctagcagcatcgctgcaggatcatgtccgtgccagaaagtacaaggaggagaccgaggagcgtcaacgacgtgcagcagccgctgcctcgtcttcggcgggaccgcctgctggcatggaactgccaacgcactatgctcatcaggcgcctccagcccacagctaccaccaccatggtgcaagcatcaatggaacaccgcacaaagtagaactgggaataaaacgcagctcaccgctggcgccgcatcagcaaccgccacgtccctcgaaattggcacactacgagccgccaacgacgcagcagcagcatgcccatgcccacctgtacgccaacggacaagtgctacctccgcctccagctcatgatgcgaccacgccctccccgacgccctcgtcatcttcatcgtcctgcggacgtcgaagcaacagcaacaatggaaagttgctcgtggatccacctttgctaatgagtcccgagatcaattcactgttgggcgacgaaaggcctttgcagctgtcgcaccaccaacagcagcagcagcaaatgctgcatcaccatcaatcgcagcaacagcagcatctgcagctgacccaacagcaactgcgtgtagctcatcttggacatggtcttagtcacggtcacagcaccatgcccactttgggcggacaacgcaatggcaatggcaatgccgccgacgatggtaagctatacgtagaccaagcaaaaaactcgaccagggtatctgtacccaaatatgcaccacaacaagcaccaccacctgcacacgtagcattcccgctagagccacatattcttcaccagcacaaataccaacgactagccacccaaacggtggcagaagatcttaccatgaagcgaaaagagcaggaatcggattcagaactcgagccggaagtggttgctgcgtttgtcgaagatggaggttcccatagcggatcctcatcgtcgagttccagctcgcactcaggatctgattccaacgatgttattgccgctgatgatgagacccactggcagcatcgagtcagctctggtttcgaccgcctcgtggccttcgccagcactgaattggataagaccaggcgaagcatcgatggcgataccgtgccggcctcgattagttgcaacacgtctccggactcgggcattacgcacagcagcagcaactcagatgcagtgcgcacatttttgtccacctcgtccagctcctcgcagctggagctgcccataggaagcggtggtagtagctgcaacagcctctacaaccatcatgcccagcacaacaacattggcattggcggcagcggaggcagccacccacatcagcaacagcaacagttgcaggcgcagcaccaacagcagcagcaccatctttccgatcacatgagcgacagtagcatgaaatcctcggcatcctcctcgctgcatgctggtagctcccttaagaccgtgtcgccagtggatcccagtgccatcgagtcgccgccactctcggacgttggattgcccagaactcccagtcccagtgcagccagtgtggccactccaccactggccagtggaccacccgtgtccggggacttaggtggtatacctctgaagtaccagcgcaagtccaagaccagttcggaaaagcactacaaaaagaagttctgcgaaagaaactgggagtacgactgtgatgaactgctggcctactccaactccagtgcaccgccgacggcagcagatgcagcgggcaatgggccacttaacttggatgctcccaatactgtgggcggagcacctgcaccgctcttgggaaaatcgggaaagtcacccaaggaaaagtcttcaccgcaccacacgggcttaaaccatcagcagcagcaccatcacaagtcatccaaatttcggccaaagggcaaggactgggactggtcaatggacagtcggagccaaacgggcgagctgctggccgccagtaacaacatgaacattaacaacaactcagccaccacaacgagtaattaa

SEQ ID NO: 21723 - protein, 2237 aa, DROSOPHILA
MATPQVKDLVLRSPAGSSDVISFAWPLQIGHGQDKHDNGIDIIDTIKFVCDELPSMSSAFEETNLHQIDTACYKTMTGLVDRFNKAVDSIVALEKGTSLPAERLNKFAHPSLLRHILQLVYNAAVLDPDKLNQYEPFSPEVYGETSYELVQQMLKHVTVSKEDTFIDLGSGVGQVVLQMAGSFPLKTCIGIEKADTPARYAERMDVIFRQYMGWFGKRFCEYKLIKGDFLVDEHRENITSSTLVFVNNFAFGPTVDHQLKERFADLRDGARVVSSKSFCPLNFRITDRNLSDIGTIMHVSEIPPLKGSVSWTCKPVSYYLHVIDRTILERYFQRLKTKGGNDHESVGTVRTTRDRAKREANVGQHHHNNHHSNNHANSNNHQRDREQSNGATATAAHQQRHQSQSPANVSGAGIVLAASGQQAASKTRQQLQHQHNQQQRSLDMESSTESDGDATNGNGGNTTTATNTTSASNGPMTRKVWSDWCSSKGKSSQSDDEENNNSNSNGGSNGGSIGGGSVGRQARATTQKKRKKLTRKAAIASKSAAAAQREAEAAAAAAVSVPSKESSSKEDPPRAASAGPGRKGRMKKGARGRKSLKIVGLEALHKQTVLSTSLDTMTKKLPAAPGTVDQQLTALLTENMSHAELDIPTAPQDTPYALQILLDVFRSQYTSMIEHMKSSAYVPQVQKQIAQEQERMARLKNRASQLDKQIKVLIDDSVALLKVRMNELGIHVNSPNDLIAQAKEIVGRHKDLQHTASRMRNEVTFYEGEQKLLLNKQLKNLPEYQKLCGTVNGKVKLEVPPELSETTAQELVLKEIANTLSQRKKLYAQVSTIEQETSVLQKTAEERSTAATLLAQGTNMIVSTGSSSSSSTTVCASAVTAQSNKLNSVKNSRRNREHRARSQEWPEVPEVGKIQESNPEVLAQKIVETCRQIEAGKFQGAGAPSSQVNGKNKAIIEVPPPPATAPVSIKSSPGHHYKDTTLMPAPKQQQQQQMTLSQLPKCELPGLSTSRKQESPKVANFEDRLKSIITTALNEDQEQRSKAVESSPSPSPLHSPAPKRSKQHPAGAINPAQSLPNNLHNIITVSTQGLMHLNANTTISPITPPLPGPGAGATASTAPPPPANLPYGAYGGAVAKTTISGKYQAAKEPKYSPVRQAPLPPPPSHMASLYPAGQQTTPADLGYQRRRSSVSATSYEHYMVQQQQQLQQQQLMLAAAAHAAQRQQMRVEEQQQQQQHQHHHHHHHHHPQHRLPQHVQHQHPHQHHPNEFKAPPADSHLQRSSSREQLIVEPPQTQPLELLPRASSANSDYSGYRIRPPSRPSSNSSQPDYTQVSPAKMALRRHLSQEKLSQHVTPQATPPLPGHGGAPTSGKTIGDLVNGEIERTLEISHQSIINAAVNMSTSGASFMERAFLNERSNDRLLINLNAQRPERVHVRPLSEESQDPQPTSYAQERGPGLGAGGAAAGGNSNLATLAHVAYAQKAQGGARANAGTAPPATHSSSARSGRDYQPVALPRAELKGSIEAYFHEEQQQKQSKGAGSAGSSSLRGPRLNGANPPLEGLAASLQDHVRARKYKEETEERQRRAAAAASSSAGPPAGMELPTHYAHQAPPAHSYHHHGASINGTPHKVELGIKRSSPLAPHQQPPRPSKLAHYEPPTTQQQHAHAHLYANGQVLPPPPAHDATTPSPTPSSSSSSCGRRSNSNNGKLLVDPPLLMSPEINSLLGDERPLQLSHHQQQQQQMLHHHQSQQQQHLQLTQQQLRVAHLGHGLSHGHSTMPTLGGQRNGNGNAADDGKLYVDQAKNSTRVSVPKYAPQQAPPPAHVAFPLEPHILHQHKYQRLATQTVAEDLTMKRKEQESDSELEPEVVAAFVEDGGSHSGSSSSSSSSHSGSDSNDVIAADDETHWQHRVSSGFDRLVAFASTELDKTRRSIDGDTVPASISCNTSPDSGITHSSSNSDAVRTFLSTSSSSSQLELPIGSGGSSCNSLYNHHAQHNNIGIGGSGGSHPHQQQQQLQAQHQQQQHHLSDHMSDSSMKSSASSSLHAGSSLKTVSPVDPSAIESPPLSDVGLPRTPSPSAASVATPPLASGPPVSGDLGGIPLKYQRKSKTSSEKHYKKKFCERNWEYDCDELLAYSNSSAPPTAADAAGNGPLNLDAPNTVGGAPAPLLGKSGKSPKEKSSPHHTGLNHQQQHHHKSSKFRPKGKDWDWSMDSRSQTGELLAASNNMNINNNSATTTSN

SEQ ID NO: 21724 - DNA, 34750 bp, DROSOPHILA
tttgattggttggttggtcgggttgtcggttgcgttggtgggattaatgatcaatcgaggagtgggtggtaagcatagagttatgcccgaaggacgtgtgtgggtgagggttttatgtataaatgtgtttgtgtctggtttctatagttaagttgtcttagtcactagagttgcaaacaaacaaagtgaagtgtttattaatatatctgatcaatgagttatgtgtgacgactgaatacgagaaataaatatctttatttattcgttgggtgttaagtttggaaagcgttagatattggtttcaatttcttttaggagaattctgaaagaagtcaagttcgtggaacaataaagaatcataagacttggtaggattttgttttctttgtttttgttgtgttcattttttttttttaaggtttttgtttttacttcaacaaaaatcattgatctttatttcattgtggtacactttcggttcaattgcaacatttacattcgaacgcataatacaaaatattcatataatcttaagattctaaacaggggacttaggcctaagatacacatgtaaaattcatatctcgtaaagagcgtttttaaatagggtatatggcttatccaacagtaatacaaataaaatctactaaaatgttcattttttttttttgtttgctttttttctactttttttcttcagtgtatgtaaaacatcaaaggcacaagtcaacgtgaaaacaaaggaaaactaatataaattttttttttataattaaactcgtatcaaatgataataaactcttaatcttcagcgaaaaagactgatagattttgcatgtgtctgtacttttgttttatcaaaattttgttttgttttttgttttaaaactcgcaatcgaaataagatgcaacgctattgcattttatttcgagtataagataacacataaagaaaataatagtttgataaaataaataaaagagtagaaacacaactaacctgtggaggcggtgcgcttgaaaattctttttcagaaccctgatcagggcagagcggccaggccaggccaacgattccggtcaggtttcatcgaacatacagtgtggattggaattggggatggtcagttatgagcagcatttgtatcaaaataaatagcaaaattttaaaataattgaactaaagtgatcggctgcctggcgtacgcaatcaaagggcaggcaaacgcaatcgttcgttatccgttgttcttaatggtttcttttcttctttcgtacattattgatttaaagttataaagttgctttcgccgatatggtgtgattttagagtgttactttctgagttatagtgcttcgaatttctcgattcactatgcatggtatttactgtatctcaatgaaacccgccggcttggctggcactccgaccgttgctcgctgatagggatgctcgcggttagtcgccaaacgacgctgctgcttaatggcgcctactaaaatatacgatacgatacatgtagatattggtttgcataggtttacatatcggttatatgtataaatagatgtgaacatcatcagctacagggtacaacttaggtctaatagatattgcatacatccttacttatctaccattcgcttgctcaaactgaagctgaaggcagcagctggaagccaaattgccaactgagggggaattatcgacctgtttttcgtattctgtattctctttcactttgtaacatttaaattctctgcttctttggaatgagtcgtttatatatgcgcttgtgtattcgatagatttgatctgatttttagatttggctgcaaaataagtgattttcaagccgctaagcctaggtaaggtaattcgtctccagttcattgctagatattttctaacaatgattattattctgtcgaatcatatattgcattttgttcctccagcttgctgactagtcgtgcgttcaattgattctggataatggtttctgttcttggacggctgcctttgagcctcgactaaactaagaactaactgaagttattatttaagcaccaacttgattcaaggctcctttccactaagagttatgtaaatatatatgtgtatatatatatatatatatatatataaaagcttttctgcaattctgttcaaattatacgcttttgacgagaaatggcactggctggaaaaattgaaacggtttccttttcgctcttcgttaggtacatttgtgcataaatactgtccctccatcgcaaaactcactacataaactacataaaaaacagacacttaactagattgcacttaagactcgaccctcataccaaaaaaaaactaaaatagggttattattattcagaagagaaaaattatgaagtttagccctctttaatttgaatactcatgggttccaaaaacgaaaatcaacaacttgcattgggtgccgctgttgttgttgttctcaactagaatatactcatataaaaaatgtttcgggtggaaaatcatatatgtatgtaggttggttacagttaaaattaaagcaactacaatttaagggcctaaaaatcacttatttttgccaatattgcatattgcagaaatgtattgcattgcggtctaaaatctaataaacaatataaaaagcatattcattgtcgagcaataattgttgtagcttaattctttgcttgtattttcttgagtatttctgttttcctgtttgttgtgccgttttactcatacgtttttgtctctacgtaaatatataattttaaaaatatatacagtctatacatttatgtgtgtgtgtataattctgtttcagtttttgtgtgactgtaactaaataactttaagctaaacattttctgtggggttttcctctacaaatcgtttctggttttcttgtttttgttcaacggaaaaataatagagagtgagaaaaaggagttcaaaagacggagccggcatgcatatatcgaccaactgcaaatatttatgtttataacaaatatataagataaaatagactttggataaaaataatgaaggttttgtttaattctgttagcatttggttagcatttcgatattattgtgaaatcttaaaagaaagccaggttaagaagcgtgaaaaatctcaatgcatactttatggcactgaacgtaaatagtaattgtgttagattcatgtagaatacagaaagactgaacatgctgcactgttttttacgatttgtaaatattctttattttatttccaattatattgaaactcttttgcaatttttaagatcaagaacattaacaacttcataactgcagcaagtccggactgtagcctgccatatgaccactaaaaataaatgcaagctcctaacaattaaatgccaaatctaaatcttttgcatgacaattaagcaagacaaaacaattgttatttaaaaaaaaaaatatatatataaattattctatatgcttgagctcgccggcgctgctgggctgtcatagcaaactcaatcgattgcacttggttaatgtgttaagaggaaaaacaaacgtaccgggcgtatgcgcaacgtgtaaattgtatttctagtgtgtgttaaatggtgtgtgcttttctgacgatatgcttgctatattattgctcgcaatttaactcgcatttaaatcctcgattcatgtggctatacatatctatctgcttagacgactaacttctgcctagatggatgaatgattcgcttagtgtgttggactttcgtgttgtgtggtttgtgtgtatgaggataaatcataatcgatatagagatagcaatggaacagagtgattcggatatgtaagatatgtgattatctggcaaacaacccaccgctatgatcagcatattccgtgagcagaggattgccggctagggcggcgtagttcgcataatcgtacggtgcgaagatcattccatggccggtctggtcgaaggcggctgtcggagcggcctgggcggacaatatgctggccgccgttgtggggacggtcatccggggattcaggatcaatggggcgccaagcggggcggcggcgggtgcacggatctgggcggcaaggccgggcaggccggtggatgtcagcaggcggctatcagaggcggcaaccaggcggcgccactcctcatcgcacactgcgggatacagataagaagcagagccaacgcatgagaaagctggtcgtcgaacacataaatcaaatacaaaataaagaaatgtaaatcgaatttgaatcagtttggtttcgttaacggttcagtttgcaaaatcgttaatggttagatcctcgctcattcgattttagctgctggttaacgttgttatcttttgtttttatttttatttttttttttttagctctgtctgagtgaagattgggttaggttatttggttggttttaattagatggatactttataaagagaggctttggttgacatacctgcgacagatttcgctgttgtgtccctataagtgccattaataatcgccaattccatgagttgacgtttctttagctcatcttcgccttcggcttgctgttagtacgagtgtatgtttgtgtttttttgtttttgtttttgatttgggggtttaatgtattaaacggaatacattaaagcagattaggttttgttggttgagagtatgaaaaataatacaagaaaattcattattaattatattggttaacattcaattgagtttagctgagaaatcatttaattaattattgatttaacatagaaaaaggagttgggataggcaacacgcattggtttttaattgtttcttgtttattttttcgtttactttaagctcttttgcgggcgcattatgaactttaaattaggcaaatatcagtttacgtttggcttctctgaagggctctcgttaatgaaaaacctctcgaaaaacacttaccggcacgagcaacttctgtacttcggcgacggcctgggccaacttcactgtggcacggttctcggtgtcctcgacggttatcaggacatgcaggtcatcggacagatgctcccagttaggcttgccacggttggcgtcctcctgaaaacggggaacgagaagttttagaatgtacacacatttttgaaatacttatataaaagtctgctacatttttacctaagtacctaaaagctgatggccttcttaaaataaatgctgtttgcaaagtatcttcatttttcacatttagtttagcaaacaatgtaaatgcaaaattgtgttatttaaaatcattccttggcttccttaataattcaatcgcatcaccttcttcttgctcttttcaatatgcaaaatattcaaaaatgcgagccgcgaaatgcgaatttattcgaaactgtgctaatgggcgcggaacaattacgagtgggcgagttccgacacacttaaaacattattgccatttttcatatcaccgctgttattacttgtggcaagaagagtttttggcgaacgtgcttgaactataataaattcttttgctattcctccttcaactcacattgtgacccacaatttataatcaattaggctcaaattggatagaaattcttttgaagtcgtccagtgctaattccacgtcaaattaacaactgtcaagttggccactgtacgagtgccggacaaagttttgtcatcaggaatcgagaagaacgaccttttcgttgttggccacttcggatgagtggccaagcaaaagcagcgcagaaaacctgagcaaatataaagaggggtcggtgtcggtctcacctcaacaaaaccatgcactgtgactaattttttttttttttttttgttggctgtcaggtctatttctatccgccaaaaatgcaagtaaacagaacatttctattctttcgcttttcacttgtgtcgcaggccaatatctttccgttcgctatgagtcagacattttgtgtgggtgtcctctcattcatttctgctaaattatcaaaatattgcatgaaaattgcgaatttgaaaaactctcctgtctgcctgccgctcatttggtccgccacatttatgaattacaaaaatacatttaatcgtctcgagagacttgattcatttttcattcttttccccgcatttgaatggctcttttcgtcgggggaaattaaatcatcagagcattttgagtgacaagacaaccaaataagtgtgggtataagaaaataatttggagaatttgctatctgatgtttggatttaaagtgaactttaaagatttttaagctagcttagttaaaaaaaatgaaaaatttatattatttaattataaatgtataaaatgtataaaatctataattaaatttttttattactttacaaaagaaaaccatgtggttatcatagccagaactaaaaacctctagacacaaaagagggacatatttttcgcctcataacgaagactaattcccatttggcacggactgaattttcatatccaagcgtaccatatacgcggctactatttatgataattaaaaatgaaatttaagtgctcggctaatggccgtaagaccaaaatgtgtatctgcttgcagtaatgccacgtttcctgtcaaatcgtttggaatccgtaatccacttgatcgaacgatgcacttaccttcttcttgtcgcgcatggaacccttgcctcggaccataatcttgcagccggtctcctgttccaattgcttggcggtcatgccacggggtcccaaaatgcgaccgacaaagttgaactggaatgaaaattaaattggagaggagatataaattagacgggcgaaattagaggaaatcattagcgaatcaacatacgacgagatctaattaactgactaacttgggtctaaagttcaacgtttccatttttatttatttaattattttttcctttttggcaaatttaaaacgcattagatcgattcgtgactcaggatgcataaatgccaggcggccagatccgctcaaagtcaaagttattaaagcgtatgacgctggtcagattcggttcgttgaaggctggagtcacccacaatccacggcatttggacacaacaatgggcaaacgaacgtaatatgacccgcggcgacacgcctgaatttggcacgataaaccaatcaccaatcagccagatagactcaaaagctctatgtgcatacagccaaatgcagtcactcagttagcaactcagttggtggcactcaaagaaaaattaaaaaaaaaaaaagaagaatcgtgtcaataattggggtcaagcggtcggaccgacattaaccggaattaaacgaaaatcactgaagattactccttaggtaggatagaaaaaacccaaaaccatttgggcttaagagcatactatttaatttaatgtaatcatattttttcccgtgtaacaggcggcgacatacaaaagaattttgcttaaactattagcggagcgtgcaaaaatcttttgacgcgcttgtcgatgatgatggacgtgcctggcatgttggccaacatcgattccatgcccaagccatagaagcggtgaccccaaccgtaagctgccgtggcgcccaattatcatatactttggttagattgcaacaatcgagccggaccgcaggctagccgataaattagatttattggccagatcaaaagcattgccatttgagttattgtaaattgctggctaaactagttctggtctcgccccgggcacgaacgtaacccacccacccacattcatctggagacccattgcgaatgcgatgatgtgatgggatgtgagatatggggatgttaagtgcgcagcgatgcgatcatcgacagcagacagccgtcggcaaagtggctcgaaaacagcagcagcagccgcagcagcagctgttgtcagtcactacgaatgtatctgtatctgtatctgtatctgagagactgcatctgcaactgaaactgccgcagcagcatcagcggcaatcgcaactgccactgctgcgatcgaatcaattgaaaattgccgcaaagaatgcagttaatgcctaatggctccggcaattttaattaaattttgcgaaaaaccatttaacctccatggagatgtccaaacaaaatgtggccaaactatggcgagaaagttgctaaaaccaaataaaaagaaatgttgctgcaatgccaccacataacatatgaatgtatgtgcgcataaaatgaattgcgctgcccaagaaaacatttgcattacttatcgcccccgtatcagttgcttaattaaaaatccctggctcagctgccatgtttgcacaagtgatctcttccatttgccattaagcggaaattaaaaaccattttcccccacatgcagcgctcaaaagattccacatacgccacgttgcgctgccacttgcgctctacaaatattgagaaatgccaaacaaatacgagtggccaaataaattataaatgattgcgcttcaagggtttccctctggcctcttcttttttagagtttgtgggggagcttaaacagagtggcagttttccataaggaaaactcgaaacaggagcaattaagattaagaatgtagcacttgaacgtaatggggacgaaaatataatcatcatctcgtgtcttaattaatattcatgcttttatgacaacctaatatatgtgaaatcacaaggcaatactaattaggtacaaaaaaagaagaaagttctgtgaatttaaagaaatcgtaataagcctattgcctttcaaatgtccatgagcatttttagaattttgcggtaccataatggaatcccttttctctattgtttgattatacacctaaagaaatactcttgttttaggttcagaaaatggttgaaataatttaaagtatgctctttgcgcttcggtcgtgtaatattgtatgaaccttttgccagcgcgtacttcaaaccaaagtgccatagtaaacagacaaaagacagatgaaaacgggagctgcaaggcaattcaagtggagtgtagccaagtgaagcgtacaaataaatattgtatagtgtatacacatacatacacatcgggaggcaggtggtggagtgactgctgctttattttacagattgtgggctcatcagatagggcataaggaaaatatttcatatttatacaatacgtacaacaattttcaatacggcaaaaggtacaaacaattgataagcgacttgcgacgcacacacagcagacaggtcaccaaaaattgctgaaaaggaaagtacaaaaacacaaatatacacgagaggctgtgataagaaaccgccctctactaaatggtgaccatgacaacaggccatttaattgtgcgtaaaacttttcatacgatacgaaaagcaagcaaaacccacacaatggaaatatttgtaattttttcattaccaggagctggatggaagaacattctacttaatagttagtgttcagattttaatcgcgttgcctgtgtgactcagtgagttttacgaatcttttcatttgagccgctcgccagtaaattgaaaacagaaatgcataagcaggcaaggcaggggtcggcatagatcaaatagattagtcgacttggctactactatgcatatagtacataaataaggtatatatagaggtacatatgtatgtgtgcatctacagagagagagagagagggagacactttagcacacataattgcgctgaacaaaaagctcgtctattacacggacggaaaaataaatcaaactttgacatgacaaacaacggcagcaaatttaacttgaatataatgcttgccacaatttgttgttttctgtttttgccacttggggttgtacctattaaattaccgaacaaccgaaaatgtacataaaaattgcacgtaattagcatttcaatgtttatgactaatttgctgcagtttgtagattaattggcttttgtgttaacggcttagacaataaaaaaaaaccaacacacaaacaaacataaagcagcgttaggtgatttgggcagacatcaacacaatgttgagatgtgctgctctaggcttgtaatttggctttaatatggccgcgatttcccacttgatcgatatgtataattgcggagtgaccttaaagcgaatcgaatgtcaaatggttcaaagatgtgggatgtagtcggtgtgggggtgtgaccacagcattaatcagcggaaagataattcactcaattcaatgcgatcgattaacaattgattaattaaagtctaaacatatcgctgggatgttgagcataataaacagcgcttgaaagtgttttaattttaattgaacaactgcgcgcaatagtttataaaaggtatattctataagcaactaatatatatacttctacagctcgttgtctcatcatgaaaacatttaccctcaatcgcatctaattgcccctcttccatatgtttaagtttaagcatcggaaaatgaaattgcgaaaattttaaaaaatgtcaaacataatttcagttctgtgcgaagcgaaatcaatcagaagctgaccgggcggctcagtgggtcaacatgtcgcatgtcggatgacgcgccacggggcgtatgagcaatgagcgctgacagcgaacaacgagcagaacgagatggatggaaatggaaagaggcagaccgatgctcgcccctatgagttggacttggagcgttaatagtttgctgtaattaattgtaaaactgttttaatgcctcgactgctggcgactttaattaagttgcatttgtgttttggacacgaccaaagaaacaagattcagcatatatcttcgctgccatatcctctgcatttggaaacgggttgacaaattgttgaccatttacatggcatattgttgtagtcggcctgtcggctgctggccaactgacaaatctctatttacattgctgaatgcattataaattattaactgctattatttgcgactggcagtgtttgcggtaatgccttgaaatttatgccccataacgtggcgcgcacaaacaaaccagcaaaccaataaacattccgcccagaacttgttgcacttccatgttattcgaaacgccatttgtcttgcttaagcacacattttcgaaattcgactggcgaccgtaggaaaatgtcagaatttttctatgcgaatttttagttattgctagcttttggctgctcgaaatgattgcaattaaatgggatgatttatgagaaaaaagaacccgaaacgcccgcacaaaatacacgacattcgttggacctccaaaaaagacaaatcggaacacctgaaatattggaaaatcaagcggaaaaatctgaggccctctgctcgtaaattttagccagagatttgtgccagtttttcgtttggaaaatattgaaaacatcatcatcacaaggttttttctttcgccccgtcgacccactgcccatttcacagaattatgtatgttctttttaatttacgaactcaactcattcatattcatatcatttgggtctagccctaataaagtcaaattttatgttaatgctcgactgtctattttcctttagcttcgccttacgcttttgtgatttagagtatttgttttatgcaacggccggccggtaattaattaaaaggcacatgttagatatatttaactttggtctaattaacttttacgatggtcaggagaggcaaacggttctataacctttataagtggtggtgacttggcaaaatatcgtttttcttgaccagcaagctctggatgttgatcgatttattttggagaagttttagaatgagaaataatggttccacaattatggtcgttgaaagggggattatttctaaatactacagcagtaagtgcaatgataatgaaatggcttgaattcatttaaatttctaacagacacaactgcttcaattaagatgggatttaatgaaaggttttgcgctaagtttgaggaatgctgaaaacgatttaaaaatcatttaattccacatcacttggttgggtcatcgccccacccaaactcctcgaactggcgccatttggcaaagaaaattatttgcacagctgccgaacagaagccacatgagtagaggacaccattgaacggagggcgatctgaaatgctttcgagtctaattaatgctatttaaatatgcatttatctggatcaaaagcgaaaaggaagaggaaaataacgaaacgaagctgctaaaaacataaacatcaagagcaaagtgtgtcatgcagttaaataaatttcctcagttccgccactgcgactgccatactgtcggcccataaataaataaaagaagaaaaaaaaacgaaacgtaacgtaacgaaactacgcccaaacaatttccaaattaacaaaactgaagaaaaacaaaagaaatatacatgtccgaatgatgggagcggggttggcggggaaggcaacattttaaattgcataaaattaaatcaaattctaatgtggcagggcttggccgcctgaacgacttgctccgacgcctacaatgaacgacaaatgaaacgagtgaacgccgtcaaacgacttcctaaaacgcttcaatgattttgtctaacccattttaatacgcgtatatatctccagctcgatctgaatctgattttttagagaaaatttgctttatagagaagggtgcatcagagctttgcatttgccatcttttctgggcctgtctctgccgccaagacaacttaacagatgactgactctattggcggtggagaagatacagatacatatagagcctacagatacaccttggcacattgctggcacggcacacctttaagccatttccggtgtagcccagttgttcagtgaacgcgttgtcaattctaattggcggaagtcgtgtgctctccccaaatccataaattagatcatcgttatcattatcgtcatcattatgctaagaacacttacatctggatgctcgcggactggcacataaaccttctcgttcatcgtcaccacagagccctcgggttcgggcagagtgagcggctccttcttgaccccattgatctggaacagtgaggcgcgcacgcgtgcaatttctgaaaagattaatcggagatagtgcggtattaatacgtgtttattgacgattataaatagaatcgaattgggcagaaataatgcaagtctacggttatataacttatatatacaatgtatgcatttgagtactcacagattgtaagagtatcatataaaacaggattatctttatactgaaatacatatatattggcaactgcccacccgtcgaatacttattaacgtatcgttactaatcattatgaaatccactcttacagcacagtttattaatttccgagcgtaataatacacaatcgaaaggcaaacaaacaaagcgttgataattttaattgcaggctctttgccaccacttcaatcgactgagtgcggctcaatttgtcattttagctaagtgcttgtattaaactacgtttaatttgcctctgggtggaaaacctacttaattagcatgaataaaacgtcgtgtgaatgtgttcactcgtccatcgtctgatgttatagcttatttattaggttaatccatgaaatcacttggtttatatttaaacaaattatgccattatattcctagcatcattgcaaaatgatgactgatccacaacaaccatcccaacccttcaaactgagctcatgcacacattatgccacagtgagccccactgcaactcacacttctgctgattttccgtagttggttggggtgtttctacccccaactgtgtcagttgacaggggctctcgaattgatatgatcaacattttgctgctgctgctggtgttgtttagttttgcataagctcaattgcattgtttgtcttttggcatgtgctttgacaatttgtcactaaaagtgggtaattgtgctgggtgtgttggcctttcggtggtgcgaggggggaaaggtgactgcatcgtatgtcacagaaatgatttaagaatttgccactaaatgacatcaaattaaatgcctgacttctctcactaaatgccaacactttgacacacaatttctctgatttctctgacactgtatgtgattgttgacatcagaaatctaaggaataaacttttcttgactaaacataacgtagcgtgtacttatttgaggaaacatttaaacacctaaacttaagtggtatttagatgcatataaataaattttcctaaattatagtcaaaaatgcttgcattgtgttaatccttgtacgagtttcttgacctgtaaaatatgcacgctgaatagcaatttgtttgacatttaaattaattatgcttgatatttttatctagccacctactggcttattttcttatttatttccccgaagctttctccgtgtgccacataaataaaattgcaaataaaaaatcatctgagcattctgagagctaacaaagaagacgagaagaaattgcacaaaatttaaatttactttttccgagcggtgcgaaaaagaaacgctggccaattccagagttcattgcgggccaaagaacccataaagaaaatgccaaagagccaaaatggagaatgaatcggagaattcaagccgaaccgacaaaagtcactccaaaacacttgactcgattattgatggagctagctagctgctggagatggcgaagagattttcccgaccacgacgaccacaattaagcgcagctgcagaagggcttttcatttgcctggctattttcgtgtaatttattgcgacacgcaagtagagcattccatcggtggcatcatcatcatcatcatcagcagcagcaacagccacatcatcatcatcagcatgagtagaatcatttcggtgattctaagccatatgagccgaatggcataaacgcaatcatgacagctgtcaattttaatcgagcgagtgtcaatcggcatccacatctattcaatctgcaacgtgaccgatgtgtggcagtggcacgaagattgtgcagccagattagatgaataagccgcgccaaattggtgtaaaattgcatttgcatacgatcgaaccgatgacggagtcagtcactgattcacttctggggccaagccagatgaatggattgatagcggcatttagataaattacaataatcaagaccctgccatatgcgcaggcggcttaattaatagcagcttagtcagcggcttggcatggtgagtctgtctatacatatatgtatctataggtctataattaaagccctggctcaaaatcacctgttgccaactgaccattttagggcatatacatattagatatgtattgtatatgtagagtgggcgggtagaacgagagcagtgccaatctaataattatcaatgaaagatcttttttattcattaacaagtcgagtcgtttgtgcttttaaggcaatctccgcatcttgttcgcaacgcgactcataatttacatacaccgcgcacttatgactcgatatctcttggccaactcgctgctggacctctatatatggctagggacggagctaccaaatttggcaccccaactagagaggttggcgaaaaaaaaaaacaaaatataaaaaaaaaactgctttgcgtgtgtattcaagtattattatcattttgtataattttttctgcgctctttttatagccagcccccacaaaagcacttatggcgaaccttactatggagtgttattagtcaagcaactaagaataaaaatgggtaaagctcaaggttggatgaggcgtggttaaaaaggatggacctgttcaaatttctgcatgacatcatcattgaatcgcatagaaatctagagattcctcgaagatttcacccttcttgaaggtgggcggacctaacataacattttccgacttcttgcttcgttgccacattttgcaacatttgaattttaaatttagcctcctgcacttgatgatgaacaagaaacaagaaacaagaagcacgaaaaacgaatgcgaacgacagacagccagttgagcgtcaataaattgtcaaattttatgcaccacgatttttggcaagggttctttatgtccgccagcaagtagggcataaaatgtgtacatactactggggaatattaatgtggaatcagaattaaaatattttacatatttcaagcaaacagaaaactagcttggactttcgtttggcaaatcggtttactgcaattctggtagaataatagtagagcggcaagctctaaaccaaattgcaaattactaaaaaccaatacaattttttccagtaaacttagcatatctcgacaccgtgatcagctatccattagcgaaaacctcgttcgcaccaaatacactaagaggatatacattatcgcatcctaaacttgtcaatctaataagatatgccagcggacaccttctaaaccaaattaaaaccgcactcagctcagcagcttagcgctgtgctgattgattgttttaagctgggagaacaatttgcattggatcacgacttcaggtgggaatcgatgggacggtggtttatactatatactctatatataaataaatatctgagtgtgcggcggctaatttatgaatgcaaaaccattcataccacacgaattagatgactgccagctgatgagcgtgtgggtgtttttttttttttttttttttttttttagccaagaaaacaatgtcaactgcgatcgtttgggtttttgtctcggcctccatacagctttgcattggctgtgtgggctggccgggagtcttaacaaattgtcaccagaaatggccggaacgcttgaaaacgtttaaggttcagcccgattgttgtgccccttctgtggctgcaattaagccaggtcccgcatatttggcaagcgacaaaatgtatttgattttatggtttttatttgctgttcgtcatgaactccattggccttgggcgcattcgcaaattcgcattgtactcgcatttaagcaaaaccgaaaataatgtttattgtgcgttcaagtaatttcatttattcatttgcatattttgtgcatatcttttcggtttgtggtttgcgcaaaggcattagcttgtaaaccaacagtgggtttaaagtagccaaaaatataaatatttactaaagcgaattgcacccaaaaattaagtttctaaatcattcttcgattaaagcacgtaatcaatatatggtctcattcattggcaatatcgatccacgaaccttaatgttatagcccgcactgtatgcaaatcgtttcgcatcaaggcaaaaataaacatttgttattcttgcttcttgttttgtgtttcagtatatattcagcattttaattaatgactatatacaggccagcgacagcaatgacagttttttatgcatttttattaataaatttctaccatcataaagctgtcagtgacaacttggttcacacgctccaagtcgcatagtctccaccattaaagtatcacatctggcacgacattaatatatcaattggttcatcagattttgttttcccctcaaaacccataaagttttgttaacatgattttataaatttaaattgcatatgcaagcgccatactttgtatctgccagactttaacccacattcgctgaacagaaaacaagagttgttgaaagttgtcgcaaaggaatgaaaaacatacgtaaataaaaaacgattccgttgactcaccaacagcagcaaccattaaaagtgaaataaaacaaagaaaaacacaattaatgctggcggaaaacataacagtgtagctaaaagaaaaacatgaaaccgaaaatgaaaaagaaaagaaatgctcccgtagaaaataggtcaacgaattgcgagcaaaacaaactcggaggaggaaatgataataccatcggatgaaaccaggagccaaaaaccaagtgctccttagagcgtaaaatcatcgaaatataaatgctcctgatcacaaaggaaacaagtgaaatgaaatgcagacaagcgaacactgtacaaacatgttaaagtaaattatcttgtgaccctaaggcgaaatgtacaaacccccaatattcctgccacaattgtaattggcttaaaaattaataggagtgcctcatgcatttgcattttcattccacaaaggacgactccctcgacaacatgtttaaatgcacgtattttcaaatttaacacgttcgcattttcacacaatgttttcctttgaattccgcaaatggtttgcattgcaaattgtttatttatgcaccgtgaaatatttccaatggtttttcgacgcgcgcaaaaaaaaaacaatagggaaaaaatcacggcaagaataaatcttcacctggcattgcgatatattcagggaaaatggccaacaaaatccgtcccagcaaatgggtaaacacttgaacaaatacagaaatgataaaacgcacattaaaccaacaataacagcgaattatatacaaattgttagttaaataaaccatatttttgctcggcagcattttctttatcattctgttttcttttttttttctactttttggatcttaaataaacatacaatttggggcttttcggcgatagagctctttttgcggttaacaattatccggtctggttttaggttatatacaagcgtatgtatggtcataaaaatagtaatttgctttattaacaaaaggcaaataaatattatggtaataatatgacagcttgcttattttgagaggtgagaatatttgcaaagtaacgttctttctattattagatggttcgataacttccattagtcataccattccatcgagagaaatgaagattgacagtccgcaaaagttaggcgctatagctaaccaaaaataacaataaagctcaagattaaatgtgcgaacattccacttggccagatgatcgtcgctatcgagttaaacacaaatcagaggtaattcaaatgaaattaaaataaaacgaaattaaaacgctgttaccagctcattgcaagcgacacttggaaccagtcaaccagtcgttcagctaataaatcccagtgattacaatcacaaggtacttatttagttaatcgcacacaatgccgtcatatttttttttttgttaatttgccgaaatatttttggatatgtttttattgcctgactttagtagccattgccatttaattaggaaactgacgaccaggcgttcgaagtttaatggacaccaaatgtgtcggatgctcatagtcatatcgcccctaagggtattaaaactaatgccccacccacaccgtaaatctcgccagaggcaaagatttcgaggagcagccgcatgtgacaaccaccgagtggctaaaggaaaatgtgtcgaagtaaaatccaagaaaatgcgccgggcaaacaatgcgaaatggcttttcacatgtcgcagacacacagacccactttgttccacattttttttttgatgaacttgctgcgagagtcacgccagaatgcctcatgaatttactcatgagtcttaaacttgaagatgagtcgagaatgagctgttgcttgaatcgaaaggaagtgaaatgctcaatttgaactttcagttttcagtttccgagacaatgggccaaaatggaaagttgttggctcaagcgaacatacacacattaggcgcacaaatacacacatgctacgcctcgaacgccatttatgtgggtggcacaaagtcatcatcatcatcatcatcatcagcagattacaacgatttttcacatgctcaccgccgcccgggcaacaatgaaagaaaatatctgtgcgaccaactgcggagcagccttgcagcctgaatgacattaagcttgcagagctgccacacaatcagttaagagcatcaaatgggggaaatgggctgggccaggcccaaacattcagtcaccaatggcagacacttcaacgacattaaatacgtgtcaaaacaatcggcagcaatcaaacaattaacgagaaacaaaaggtttcggctaaaacaacttcaggccccttggctatttatgtttcgtattggcagctacttttgtcgtttcggagtattctacttatatgtgttgtaatgatttagagtatatacaatgtaaatagaacctaatattacatggtggggcatgcctagtttattgtcacaacgtttttaaaaggaatatggtttaagaacctgtctatttagacgctccattgatgttttaacaagttccacaactcgtaaatatatgtattataggtattcccaacaattccagcgaagcttagaaatgattcacttggtccgtttattacatcccactgaaaactgcaactgaaactgacggctacattgagtcacggggcgaaacaaacagtttcacagctgtccggctcattagatgtgtgtccgccgtaataatccagccacactggaccaactttagttcgtgagagccgagggcaaacgttggcaatagcaaagaaaacaaacaagtttgcaaaattgctggccaaaagaaaatacatagctggcgaaaaataagaaaagaaaaaaaacaaaaaaacaagcaaaagccgatttaaatcaaactgcaaactgcaagttgcaacttgtcgttgccaaaaaacattgcaaatgtttggcatcgcttgttttgccatcgctggcggtattggctgagctgctggtggtggtgcagcagttgtcactggaaggcattgagtcgagcgaaacaactagccgctaatcaatcagttcccatgagcacaatttccagcaaaatgcccccacgtagacgtcgtggcccagtgaaaaggccccaaaaacgaaacaaataaatatgcaatcaatgcgtaaattgccacaaaataaatgccaaaggaaaagtagaaatgaggtccccaaacggctttcagaaagccaggatttagacttttgtgaacccagttatttatactccactgtctgcattacatatttttaagcttgcaagcgggctttgcaccttttaattgtaaatttaatggtcgttttttttggacgcctcttctaaaagaaaatttttcattttcagcaaacaaatcttttatttttcctcttttgagtggaaacaaattctgaccaaattatgaatacatacgacaagggacgagggctcaaagcatttgaaccaaagcaggaagccacaccctgaccctgttcccaaagaaatacacccaaataattaattaagagcggcttcctactaatgggtttagggtttgaattgtgctcaataaagcagacatctattgacaggcacaaaatgatgcaaaaaaaaaacgaatcgaacaaattgctgaataaaattgaagcctttagtgcataaatttcatagctcagttggtggggcagcgagagatgaatgacaatttactcatttgcttggttagtcacctacgaaaaaaaaaataaaaataaatgaaaaaacgagctaatgaaacggtagtcgtcgacgacacacgcgcccatttttataaagcaattaactgttgctgattttatggcccgcggctcataaaaaactcagctcgaccaacaatgatgatatgatatgatgatgggctggctgtgggcaccctttgatctacgctctgcgctcgtcgaccgattgcaatggctgcttaagccaattaaaagctaacaatatctagtatagccaatatgcgatatgtgtactcaaccaatcaggttagtggcttcaccagctcaccaacagccgacggcattttgttcttgtcgtaggtggcgataaggaaactcacctgcaagtaaacgaaaagcatatatttcagattagataagattaacacaatgcaatggcgctgatatagtacaaacaaaatttgaaagatgaatttatgagcaagcttgcggcatttatcctatctgacgagtatagttgcagctattcattcaaaatatttatttctagctcttaaacttattctttaaatcgatatctcccgaaaaaaaaacacttctattaccttgataatttgtaagtatttcattgattcatcgcgagatgaaggcatttcaactgctggatttaaaaacgcctaaaagcgcctcaatcagcggaagaaaactcttgagagattcaacttttgttatttccttgattcgtggccattattctatttctaagcatatttataggatgccccacactctgaaagttgctgcttttctttgggagctgccatcgcttctggcttgtttatttctggagtagccgaatgacttttccggactacgtgtgtggagcataaacaagaagatgatgattccgggggccggagacgaccacagagttcacgacctcttgtattataaatttacaacaaattgccttcgtcttgtttgagtttagcgattgcattggggactttgcttgattaattttcgttatacaaaatacacaataaattcgtacggtcagtttcgaaagcctgtgtaaacacacagattttctccaaggaaatataaaaacggctgcgttccatcaaattctcgttatcccttatagcgtgtttttattacaaattgtatatgtatggaattatgcgagcgcaatgtacatttataaatatatgtatatatatttttttttttttgttttgaaaactcacagcttgtgttctggcggaaattgagaataattatttttccgaatagaaactgtgaaatgttttcggttggtccataaactttggctattggaaaattatttgtagccaatggcatttggagaaagttgcagttatgcgccgtatttggatctggcaacttatggatgcttatgtcatgcttataatattttcccctcatccataataagctggcagacatttggtgcggcctaaatttaatagatcgaatgaaagagatgcgtaagtcgcgtctcataatcaatatatcgcccatacgccgtgtgtaacggcatcaggcatcaaggtgaaaacctctttcactctgacaacagcacttgatcaccacctacctacctaactacccgaaaacaaaatagaaatgatatattatgtactcaatagccaccaacacgtaattgtgtgtgtatgtagcgtaatgtgcttgaccaacattgaagtgtggccaacaaccaacaaccaacaactcgttttgaaacaaaagccaaagttgccgccttttctttttgccagcccgacgttgtgttgccttgaatgggatttattataataataaatgtcttttaagtacacacacgcacatgtaggtgggtagtcttagccactttgtatacggaatttgcctaagtgtgcgtgtgcaacttgttcttaacacctttgcgtctcctttccttgttctttctggctttttccgcccacgtttatggtttatttttagtctggcctctctcccttcccttttcatttcttttcttttctttaaatttatatttattttcattcgaccgcctgtctccgcctcaagtgtcgctttgtgtgacaaactatttatctgtgggcttcgaaatgtgcgtggaaaaaccggaaaagcctacgtaaagctatgaaaatgcaagtgcactcgacgttctcctgaagtcgaagtcaaatacacgtgcatatttagacatggtccatatgccaatgacatttagctgttttccagccgttgataagctatgagtcgtccttggccagttggagaaaaaaagaggaggatggagtggaagttgtcagtgtgggcagttgggtttatgaaagtgaagcttgggcagagaactcagggccacatgtgctcctaaaaagtgtcgtaaataaattaatgaagactctacatattacatattaagtaagacttaaacgaaatataattaaataaataagtaaattatagcgtatacgtaaattaaagtaattaattattggcatcaactattaaacgcattttattatacacaaatgcacaaataacacttataattcagagcccgcatttaagcattttaaatccgccccaataaggaaacttgtcaatttacataactgcctgaaaaaaaaaacaccctttaatttgaatctcttgcatacaattaatttgagttcagccactgcgattctcctcaatcgcagctgaaacagagttccttgaataacaacaaattaaaaaaaaaaatgtgacttcattgaggagctgggcaattaattcatacgcctacagcagccaaatgattgacatgagcaacgcttgggcgtccatataaaatggcttttaacccaaatacgcagatacaaacaatacgtggctggctaactcagcacgacattaaacatttatggcatatcaaaaaccaaagccaaagaaactgccaaaaatgaaaatcactcagccagaggaaagacacgcaaagtcacaaaaagacaaaaatgaaaaggaaaaataaaaaccaaaaaaaaaaaaattgaaagcaaatgcaacgacatttcctcccccgcaggttgatttgatttgcacagctgaaggcaattgcaagaaaaagggacttacttagcacattttatgttttattgttgtcatattcacaaacctttcactcgaaacttttcgatgggacaaaattgcaatgattttgtcaagtgaaattcggtaaaacagcgcaaaactaaaacggctgttaaaaattccatcagatacatatgcacacatacagatacaagcagctatagatacaaatacatccgacaggtaaacacaacaaaggacgcgacaacgacgaaatgactttggctcacaagatccattcatgatgcaaacagcaaacacgcgttcttgtagcatttcccaattgcactcagcgcgttgaaaaagtaacgaaattgagatacaaagatacatagattgaggacacttgagctacgagtgttacagctactttttagcagcaaaaaaatgtttgaaaaaccaaatggcatacgttgcattgactgacaaatactctttatttgaaagccaatgattataattgcagtattgctttattttatattgcaattgggaaatacatgttcgtatttctcaacggtatttgtatcttgatctaatgcttacaatttcctcttcccctcttttttatgttccccctcttattttttagcattacgctgctgttaattgtctcgaatcaatgatgctgctcatggctgtgaataaatcgagagataagaaacaaactacaactactcggccagagtatctttacctcaatctgtatccgtagcagcttttgtgtttttgtctatgctcacacgttgtcgctgtttttggctcaaagtttgttttgttttcccacatatgacgcattttttgggtcgttgttcgtgttcaaatgtgtgctggtatgatttcgttttaatgttttgtcatagttttgaatagcagagcacacgccccaaaagacccaaaaagtcagaaaaaggcgtttgtcgcccagtctgttgacaatttgacttttgttttaattttctcttgtgcggttgtcaagtgaatgcctcattatcttaattccccacttagaggttttatttgcactatattaagattgagaggtcgttgtggctgtcttcatgggtgtggaactatttttcgtttatgaaatcagtaataacttttgtagttaaagagaacggaatgtttgctgaccgttcgttattttcaatgtcagagccaaaacgatttttaatgtattttccctacgatcctctagcatcccggaaaatgtttttgctgcatttccagggtggaattttgctcgctgcccgcatttcacacgccaaatggagttgatgtctgggggatttttgaaagcaattgaaaaattaaattgattaccgatataaatcgaatggcaaatgcacatcggtacaataaaaatgattcacttgcggccgcttcaagtggcatccatcggatgcccatataagtatcttcatatgtcgaggagttgcaagttcgggttgagaatcccagatacaggcgaccgaccatatggcactgagagtcaaaaaggcaacttcaaaggcatcacatccacaatgttgcctctttgtatctctggctcaagtgtccctcccccttggggcccccaccattgtttttccctgcctgcgcgtttgttatcaaattgttcaatttgtacagctcgtcggctgcctgcctggtggcatattaaagcaattgtctaatgccacatggctgccgctgctggtagtcgcgtgcctcatcacgagggaggcaggaggtggtgcacagaggaaaataagtgggaagcaccaaattcatagatatatttcaaacaatctgtaaagccagctgaatgggatacattttaaataagattctatgacttttttcttaatattatgcccacaatttagttatttacaaatttgtctatcagatacttggtgtttcttccagtgccacgaatggggagtaggaggttggctaagcaatggggcgccatgctgaaagttccatgtgtttttttgctgcgtgtggggaagaaacccgagcatgtgaaaaatattttaattacgcgcttctttgtttcctccattaaattttttagctttttttgagttggctatttttgtcaaaagtaattcgttttgccacaatagcaacaccgaacatttgatgcagcctggctatcaaataacttgggcaaatgacgtaatcaccgggtttgagtgtgtgggcgagagctcgcttaaaagaacagatatacatacatacatatacatacaatgaaacaaggggtttccaaagaaaacgctaattgaaggctgagtgtgtattttgctactgcctggcaagttgtgcagctgccagacgaaaactcatgagtattacggttagaaattgatacgattttaatttaagccgccacaaaaaaatggccaatcaattgcgccattaaaaaaatgataagaatatgtacatttcaactaattctactactaccattattagataataagattgcagccccatttccatattaaattcgatcagccgcatcgaaaactgcgtcaaccccacaaactttcgccaacgatcaatgcccttttgatgcaatctactaactgtttagcttgatgtcgatggcttaaattgcttcatttttttagccatggtcaacttccgtgcaaacgcatcgttgcattttcgaccaacagccaatcacaaatcaaaacaaagcaaacagcgatcgatggtcatgacaaaagattttaattgaatttgaaaacgcaatgagacgtgtatgggcagaggctcgaatcgaatcgaatcgaatcgggttggattggattggatcgtagggaatcgcacggaatcgtttggggtcgattcgctattgtgcgggcggtaaggaggggagcgggcaaaacgtggagggttacgcgttccgcataacaattgtcaacaaatttatgagcacgtcagttagggaacctcatacccaaaacccgaaagccgtgcctatgaaaatactaaattaaaatgctcatggcagcttgcggctattactgatgcaccgaaaaaaaaatcgtttcatttcataagaacttgtgagtacgagtatatacatgaaacttgtattaatttaataataatctatctataggatgtttcctatcataattttaaggttttttaaatggttattggttctttgcaagataaaccaaacgtatcgatcgcaacgctgactaatgaatggaacggctcaaatgtatctttttaaagcaaggatgggccagccaatcatttccaatcatttgtttgcctttcagctccaatgtgtttgcattcaactcggatccgaagaccagcagccgcattaatgtcaacaagatacttcagtttccgattttaatgactctaccaatcggcaggtcaggccttcaaaattaaaatttttggtcagaagaaaaccaacgccctaaacggtgaaaatccaacgaaacaaaattccaacagctatggtggcaggcgaaaacccattttccaataatctaaatttagatgaaatgaaacacatttcaaattttcatgaaaaatgtcggacgaagtgaaagagaaaaaattctgtatccgacaaatgccgagaaacacattcggccaactatatatacacgtttctgtgcctatatatatttatatatgtatgtatatatagatacatagatcggccatataaacattcacgttgcgggtgtacgtaatttgattttggtcgacggctcttttctggcttttatctctcaggttgctcgctgcacatgatacaaacttggatgcgtatctgacagatgtatgtggatatacaccttgggttgcagtaacagcgagcacaatttctataattataacgcccaggtgtcggccccaccgaattcgaaaacaaaaactagaaatttatcatatctaaggggctttagatgactgcttgctgtcctctgcccaggtaaacaaacgtcatgcggaagatgtgatatctgctagacaaaactgatatctccgagtgcgatatagtacgtgcagttatgcttggtcgccggtaatccgagatccgagatcgtagagcttttgctcgggcctcttgacgtcttgtcgtcatttttttttttgtattcacacagtctaggcacacttcaactgtgcaaaatgcgacgactatgaatagcggagagccgaaagcagcagatacagatacggctgagatacagatacagattcgggcgaagaaacgtgctccagcggcgtgtgtcatagagctatagctacatatctaacagatacaatgcgagtgactgcctctgctggcggccaaaagttattcttctttttgtttcgtttggggcgtgagtcagatccaaaaagcaaataaaacacactcgtcaaaataacaacaaaaatttatgtcagcagtgccaaaagcgttgaacgaatgaagacgataaaaaaggcggcaaataaacagaaggcatactatgcttaaatacatatataaatgtacagtgtgtttcggcagtttagaaatatcaattgattttagttcaaagagcagacaagaaattaattaaaactattttgagagccaaacataatcattcaagcggaatatgtttaagtatttcgaacttttaggtaatttacaaccagtataataaatttagaaaaagaaaacttttttagtttttaaatattttagctcgctgtactccaactgcagtgctttacagctgtgaaacgcacagtaaatacgcagatatttccacacagacagccattcaaatgtaatcgcaggctgtgcatttcaagtgaacgggcgagcgcccaacaggtagccaactgatgattgcgagcagaacgccacgtccaaaaccccaagcaaacttagctgcacactcgcaataataaaaacaatatatacaaataaaaacaaaaaaaaaaaaaaaaaaaaaacagcaaccgcaacctcaaaaagcggctattgcttttgttagtgttgcttgaggtaaggcaggaacctaattagatctctcgcaatatctctgacagacacaaagtgtatgcaggtaaatttcagaaatattttaagctacttaacatttttttcagtttgtaacaaacacatcaaaagtcaacatattgtatatgtgttctcagaatgattaaagtaaaattataataaaatggcaatttgataggcgaatgttttcgaattccacgcatggatcaaataaagttaagtacatacgtattaaaatcaaagatgacattgatttaagcagttcgtaatacgttcgaatttgggatttcatcaaaagcaaactcatgaaagccaagggaaataggttaaaagaatcaacgaaatgacatataaaattccagtcgtggcagtacggataataaatttggcaccctctgggaaaagggcaaaacataaaaaatgttggagttgcccaaataaccccatgtgaatgtggggttggggtttggatttggcccgcatgtcaagctaacgaaaacaaaaacacagcccagcgacgacagcaattgaaaagagaaagttgcaaaaagagaaaaaaaaaaacaaaaacttctagcaagttgaaaagttgaaagccgttagcggtcggtccaagttagcgcagtcgaatacggtcagtattcgtaaatagtgaacgccactcgggttcccaggtcccaaatctcaaatcccaaatccagtccgacaccctcccactaagctgataagccaacgaggtgggtttgaaatctgtattttgttttgcgtattttttcagctctttggattttgtagtctggtggaacgagttttacaaattgtcaacgctttgcttttagcaaatacaatttgtagacaggcaaactagtttgcagttatgccgagacgaaaccaaaacaagaatataagcttttgggcgagttttccgacagtgcgatacctcctggtacctggtaatcaataatctgattggtctagataagaccaccgacttcttggatattttccaaatgaagagagaaatcaagatcttgcatcttattatacagaccatttgctatcacatttcaagtttaattgcaataattaaatgtaatttaaattgtagtagcaattataaacaaattgattaagcaatatggtaaaaaaaaacgtatattaaagtaatccaaacatacgctgtacataataagtgtactctggccatctagcggtaccttgcaatccgcaaataccgcaccagtatctgaatctgtgtatctgtgcaacataattttgtcattacgaggcgacacacaccctcttggccggcctgcatatgggcaacagatgttgggcaaatacagaaacgagagctccgatatgccagatacaagatacaagatgcgaccaggtagtgccacgcccctgcccctataccgcccctatcccgccccgaaagttgacttttgttggcttgcctttaagagtttttgcttcgttgccgtatatttattcatattttctttttttttgatttttttggttttcgaggcaaagcgtgggcagttgaggtacatttttcctctttcagataagtttgctacacgttcagtgcacagagcaaagcagatcattaaatggatccaataatattccagattcgaaaattttaaaacttttagcatatgtataaattcatacatgcttgtgaataaaatgatctcttatcacataataccacaccacattaatgtttctatctttgttgggggttccccccctggggtttcgcatctccttctgcgtctctcaaaatccaagcctccctcctttttggtttacgaatggccgagtcaacaaagaattcataatgagaacaacaaaggctgcactggcagtcaagtgtggagccaagaatacaaaaggagagagcccggagagaggtgtaagtagtgtgcgctccgcgaagaggcgcacaaaaaggaagtaactaaaaataacaaacatctcgtttcggtttgtaaggtggaatgaactcagaacccgcgatggagaagatgccgaaaaggagacgccgaggagacaaaccagacacccagagatccatgccccaaaactgattgaactacagtgatcacttggttagaggcaccctaatcattaacacgcctggcacacacgattgaaaatgaagtcaccactttaaaataacatatatactcatttaaactctcccatttacccaaatgtgttctaaatacctacagtctctgtaatacatgtttacaataaatcccgccagattctcggaattaaagtgctttgcaaatattttttgaacaattaaaaaagatataaaccaaactgtaatggcatcgatttgtatactacaatagtttaatgttcttttcatgaatttttggaatacaaacacaaagttctaatacattctagagttaaatatctgaacattataacaagaatatccaaatttcttctttcaccacatttcatcacatttattatatataacaatttcctaatggtactgtaaagtgtttgatgaataaaaggatattatcacaataacaaacagtaactgggtttatcgtttgattcagaaaaggctagctagtgatcgttatccttccgctgagtcttggatccgggattaggatgatgctgtgacttggagggatctcactcggtttgagttttagcgacttaccttcgtccagcaggcgttcgacgtgggtgaagacgttggggaaggcggccagttgcttgcggtccttgagcaactgggccagatagtcggcgatgctctgtgtgctctgctgctgctgctgtggggtcaagtgctgcggggtcatggggaccaccacctgcggcgcctgttgctgctgctgtgcctgagcctgagcctgggcttgggcttgagcctgctgctgttgcgcgaccgcaacaactgctgcggctgcctgttgctgcaagtgctgctgcagttgctgttgcacaacggctttgctctcacagacactcattttgttgcgtgcgtgtgtgatgtgtgggtttttgggaactttttgttttgttctcgacgagattctggttttcaactttcaactttccttgggtctctgctttctttacttggtgcacacttcttttttatttgtttttgctacttttaacacgttactgtgggagttgggaaattcattaagtttcgtacgcgagcgatattaaaaacggaaaacgaaatgaaaacaactccgcccaaaagtattttttccgatcggcagcaacaacaatgcagggcgagagatactgagagagcgagagagcgcagcaagtcgaaagcgaaggcagaaaattcctcggcgatcgctcactcacacacggacaataaacagtaaaactgtatatgcgacggagatgaatgaaagcagaatgtcaaaatagctgcctctctctctcaccctcgctcatttggctgctgcaacagcaagtacaacaaaaaagtatttaaataaattttatattcaaatttctacgttttgaagatacaaaggtataaattcctttgcctggagatgtaccgagtgcacaaggccacttaaccgatttaaaaatgcaagaaaactcgcagaaatatgcacagttgctgattatgtatttgttgttgctactggatggctttggattttattcatttcgttttgtttggaaagtattttttttaaacacacttttcttctctgaggactcctatcctttgtttatttgatatatgtgtatatggattttattcgagtcggggaatagcgaacggatctcgggactttactgaacgattcctcctaattttcctaccactgaaccgtgcgcaaagaaagagaaaaagaaactgaatgcgaagcgaagagcacaaaacgttgtaagtgtgagatcatgccagttcgatcgtggggtggtggtttcaatgtgctctcgtttctctgctctctcgcccagtgacgtcacaaagtgcgattgcttttaataaatatttaaaagccaatatttggttatatatttgggggtatttttgatctaaattaactaatttctaatatatcagtgcttttaactactcggtgacgtttagtcaatatttgcataaccatttccataaaaaatacgccaatacccatcttgtgacgtcagtttctctctgacttggctctctcgcaccctactgccagcatgcgagatcacccatcagcgttgccactccgcacaaacagagttgcgcagctggttaacatattacacatattttagccaaaagtgcgagtataaaagttaataaatggccaaataagttaatagcaactaaatacaaaggtgggccattaatattcttccaaatggaggctagttaatgcattaattgactaacaacattcagcgttgccacctggtagctgggtgggccacaatttggcgcgttggcgttgattttgaattaattaagacactgcgctgtggaggcattaattgcgcacggaaattgctggcagattagaaccaagcggcattttgtttcgccggacatatgcgggggctggcatctgggccccaagtccaaaacaccatgcaaatgagcccccgaactcgtactggccaaatgttggtgttaacttggttaactctgctgcaaaacgcgaaatgtatgtgggaaaattggcattcgcgagcgtttcgatggacgcaccatataagcgaccctaggccggcgacaacttttactttccatcgcgaaagacatttttcgctggcttccgtgtggttggcgaatttcacaaaaattcaacgcagtattaagatattgcgtactaaaaataattaattatcgataaagtgtatca

SEQ ID NO: 21725 - DNA, 1922 bp, DROSOPHILA
cagtttctttttctctttctttgcgcacggttcagtggtaggaaaattaggaggaatcgttcagtaaagtcccgagatccgttcgctattccccgactcgaataaaatccatatacacatatatcaaataaacaaaggataggagtcctcagagaagaaaataacgtgttaaaagtagcaaaaacaaataaaaaagaagtgtgcaccaagtaaagaaagcagagacccaaggaaagttgaaagttgaaaaccagaatctcgtcgagaacaaaacaaaaagttcccaaaaacccacacatcacacacgcacgcaacaaaatgagtgtctgtgagagcaaagccgttgtgcaacagcaactgcagcagcacttgcagcaacaggcagccgcagcagttgttgcggtcgcgcaacagcagcaggctcaagcccaagcccaggctcaggctcaggcacagcagcagcaacaggcgccgcaggtggtggtccccatgaccccgcagcacttgaccccacagcagcagcagcagagcacacagagcatcgccgactatctggcccagttgctcaaggaccgcaagcaactggccgccttccccaacgtcttcacccacgtcgaacgcctgctggacgaagaaattgcacgcgtgcgcgcctcactgttccagatcaatggggtcaagaaggagccgctcactctgcccgaacccgagggctctgtggtgacgatgaacgagaaggtttatgtgccagtccgcgagcatccagatttcaactttgtcggtcgcattttgggaccccgtggcatgaccgccaagcaattggaacaggagaccggctgcaagattatggtccgaggcaagggttccatgcgcgacaagaagaaggaggacgccaaccgtggcaagcctaactgggagcatctgtccgatgacctgcatgtcctgataaccgtcgaggacaccgagaaccgtgccacagtgaagttggcccaggccgtcgccgaagtacagaagttgctcgtgccgcaagccgaaggcgaagatgagctaaagaaacgtcaactcatggaattggcgattattaatggcacttatagggacacaacagcgaaatctgtcgcagtgtgcgatgaggagtggcgccgcctggttgccgcctctgatagccgcctgctgacatccaccggcctgcccggccttgccgcccagatccgtgcacccgccgccgccccgcttggcgccccattgatcctgaatccccggatgaccgtccccacaacggcggccagcatattgtccgcccaggccgctccgacagccgccttcgaccagaccggccatggaatgatcttcgcaccgtacgattatgcgaactacgccgccctagccggcaatcctctgctcacggaatatgctgatcatagcgtaggcgccattaagcagcagcgtcgtttggcgactaaccgcgagcatccctatcagcgagcaacggtcggagtgccagccaagccggcgggtttcattgagatacagtaaataccatgcatagtgaatcgagaaattcgaagcactataactcagaaagtaacactctaaaatcacaccatatcggcgaaagcaactttataactttaaatcaataatgtacgaaagaagaaaagaaaccattaagaacaacggataacgaacgattgcgtttgcctgccctttgattgcgtacgccaggcagccgatcactttagttcaattattttaaaattttgctatttattttgatacaaatgctgctcataactgaccatccccaattccaatccacactgtatgttcgatgaaacctgaccggaatcgttggcctggcctggccgctctgccctgatcagggttctgaaaaagaattttcaagcgcaccgcctccacag

SEQ ID NO: 21726 - protein, 405 aa, DROSOPHILA
MSVCESKAVVQQQLQQHLQQQAAAAVVAVAQQQQAQAQAQAQAQAQQQQQAPQVVVPMTPQHLTPQQQQQSTQSIADYLAQLLKDRKQLAAFPNVFTHVERLLDEEIARVRASLFQINGVKKEPLTLPEPEGSVVTMNEKVYVPVREHPDFNFVGRILGPRGMTAKQLEQETGCKIMVRGKGSMRDKKKEDANRGKPNWEHLSDDLHVLITVEDTENRATVKLAQAVAEVQKLLVPQAEGEDELKKRQLMELAIINGTYRDTTAKSVAVCDEEWRRLVAASDSRLLTSTGLPGLAAQIRAPAAAPLGAPLILNPRMTVPTTAASILSAQAAPTAAFDQTGHGMIFAPYDYANYAALAGNPLLTEYADHSVGAIKQQRRLATNREHPYQRATVGVPAKPAGFIEIQ

SEQ ID NO: 21727 - DNA, 4727 bp, DROSOPHILA
gcaggtgctcaagacgcatatgaaggtgcacgacaagccgccccgtccgcctggcaagcccaaggagccggctggacccaaggcggagtccagcaccgcggtgaagcgccagcagccgaagaatttcgagcaataccaggatccggcggcggaaagggcagcggccaccgccgagctgctggcctaccagatcgaggagaacgaggccaagcgcaaggcggaggcggagctccggaagatccaggaggctgccttcgagcagctaaacaagctgcagaagcagtcgaacacttacgacggcttctacgcgcagaaggcggaggcggagggcacctcagtggacgcactgaagttggatcatgtttgagcggcagaatcaaacggaaatgcttgcgagcaaacccggcctccgtttccgatcatttcattatgtgtttctatgaaggacatatgagttatagttctctaaggattaccaactagttttcgtcactttgcaatttgatcttttttgtatttaaatcccccctttaaactgcttaagtttgtactttactaattgtattcatttaacaatgatttaatataataaacagtaataagtattgaacatttgaattttaaattcgccccagtgctggtaagcgggtattgttggtaaacaagacagaggtgagctgtaatgctgccaactcgtctgttttttagctacattccactagctatgcaacttatatgagacacatataaaactacgtatttaatttaggttaatacatacatttattaagaatcacacttaaaatggcacatattttttaaaacatttgaaatttgttattgatgctatccatatttctagccggtttaataatttagctattaaataactgtttgtacttggcatcactgtggggtattttttggtatttgttttggttcgtctgacgcgtaaagtttttctcggcttaatattccgcggatttggccagcagattccccctggaacaggcatcatgcaggaggaggccgaggcagcccagtactcggtgcacgcggtgtgccgcatctgcctgaatcgcctgccggagaatggcggcggcgcaggatcctttgacctgttcctgatacccggattggccaagaaactgtgtgtctgcacttcgctggccgtggagcagtcggatggcttccccaagtgtctgtgcgcgcaatgcttcagccggctggacgatatgcacgagttccaaaagctgtgcgtggactcggtgcaaaagttccaggacatggtggccaggaacgtcttttgcccgccagcgagtgcgcagatgaaaaactttgatttgctcaacgtggcggggaacgagcctgagctggtggggcaggacgaggaggatcgtatcaacttcgatccgctactggatcacaaaatggagatgatcgagaacgaggaggatgtgttcaagatgttggagcacgtggacaaggaggccgagcaggtggagaaggaagtgaagcaagatgaattggacgccgccgatctgatgaccatctttgccgcggaatcctcggaggagagcgaagaagatattgaccaagatgtggactttgagcccaacagtagcgatggtgacgatgatgtgcctttggcccagcgcttacgggataattcgcggatgataccaaaagcaaaggcagccgtaattaaggaagaggaccaagagttcccaacaggctccgaagaggaggacgaggacggagaaaagtcaaagagtcgacgcaagaggattccgcctggcgaacggcacctgcaccgcatcattgactgccacatttgtcaccaaaagttcaagaaggccatccgctacgaagagcacatgaagcaccacaacgacctgctgcccttccagtgcaaagtggaaacctgcaggaaaggtgtgtaatgatggctccaaatcgcattctcgttttgatcactggcatttacaggtttcaccaccgctggaggattacgacttcacatcgaccacgcccacacggagctatccgaggtgcactcctgcaatgtcgatggctgcggcaagacctttccgcgcatacgcctgctcacctttcacatgaagaagatgcacggcatcaccaaggcagcggcgcccccacgggattacccttgcaccgagtgcgagaaggtattccgctgtcccatggcgctcaagaagcacatgtacaagcacgacggcaaggagttgcctttcccctgtaacatctgtggcaaaaggttcgtaatcaatagtgctctaaaggatcatctgatgcggcatgcgggcattaagaactacgtgtgtccgtactgtggcgtgggaaaaaccaccaggcaggaatggaacacacacatactgacgcatacccaggagaagaagttcaagtgccacatatgcgagcacgcatcgcacaataagcagagcctggccaaccacattaagatcgtgcacgagaagatcaaaaactatgcgtgtcaatactgtggaaagacctttggcaagtcacacgcctgcaagatccacgagatgacgcacacgggggaaaagcgctgtgagtgcaaggtaagggtagaaagatattttaagccagcgtcgtcattgcaacgttttgtttttaatattcttaggtttgtggaaagaagtttctctatcctaagagtctgaccaagcacttgaagactcatgagaagcgtgtgcttcgtgctattgagacctaccgccagcggcaggtggaaatgggcgagacgcctggtgaacagttcgacaatccacccgcgccaccagttgagggcatatccattgagccgatcatgtcccgaaacgctgccgacgaattgcttaaggtgtgcgccgaatccgtggccaccattcccaaagatccacgccgtgtacaacgagtggatctggcgcagttggctggcactgctgtgaaccccataccctctgtttcagtgccgtcgtggtcgccgcaggtgaactttaccaagaaggagggcaaacatatctgccccggttgtggtcagggattcaacaatatcggaaacatgaagcggcactataagatcatccacgaaaaggtcaaagattttgcctgccgcttttgccccaaaagattcgcaaaggctcaaacgttgaggcatcacgagtggattcatacgggcgagaaaccctttgagtgcaagacctgcggcacccatttccgccaggagacggcgctgaagcgccaccagcgcacccacgagaaccgtccacccgtcatttcgcccaagttttatgccgctcgcgaggagctggaagagcaggaacgcagcaagcgagaggcgaagcgccaggcggatgcgaagcggcgcgaaattgcggaggcggccaaggagcagctatcgtcgctgcacaagcttgaaagtagtgaccgcagcctgcactcctacgatgagtaccaggaggcagcggcggagcgagcagcggcatccgctgaactccaggcgcagcagtttgaagagaacgaagtaaagcgactggcggaggaggagcgccgcaaggttcaggaggctgcctacgagcaactgcaactgttgcagcatcagcaggaggttgacaaggcgcaaagctcctacgatggctactacgctcaaaaagcacatgccgatggcaccactttggatgctttaaaaatcgatcatgtctgagatttggccagcgtttaacgctgtcacagatggtaaatcaatcctgggttttttttatgaaaagcaataccttataatccttatgagaacagtgtgtgtaagatggatatgatatagttttaagctgaaaatattctttaatactatttaatataatgtccttaactgtagtacaaataatactgtacattattcaggagaacacagaatacctatgtgaattcgacttaagtttaatgattctggtctgaatggagaggttgcatgtcaaatatcatcttttcaatagatgaattgattgtggcagttatatatttatatataaagattgtttataagtagcttaaaaaataaatttgccctattaagagcttaaatctaatcggaattttttgttttaaattcataagttttactcctccttgagtatgaatagcttcttaaggctgtctagtgtcatgttctccagatcccagtgggtcgacagcgtagtcgtgtcatcggctgaagtaattagcgatagaatattctcctcaatcgtttcattcacaatgaaacgatgcaccttcgtgggtctaaaaacaattgtattgaaactgacagcaacttcacttcaatagcgcgcactcacctcttttgcccaaatcggtgaatacgacctatggcctggcgctcgtctcccggatttagaatgggttcgacgaggaaaacatgtgtggcttcgatcaggttcaaaccctttgagcctttggacagtggcattagtagacaggtaacattgctcaacggattctaaaggaggaaaaatgtttagcagtgataaattaaatttaacagcaagataaaaaccttgaaatcatcaaagtccttatttgtgcacttattgcggaattgaatgccgttgagactgagcgctctggcaatttcaatgagaatcgcctgccattgagagaatacaataatcttttcctgttcattttcacccttaattttcagcact

SEQ ID NO: 21728 - DNA, 2608 bp, DROSOPHILA
ccctggaacaggcatcatgcaggaggaggccgaggcagcccagtactcggtgcacgcggtgtgccgcatctgcctgaatcgcctgccggagaatggcggcggcgcaggatcctttgacctgttcctgatacccggattggccaagaaactgtgtgtctgcacttcgctggccgtggagcagtcggatggcttccccaagtgtctgtgcgcgcaatgcttcagccggctggacgatatgcacgagttccaaaagctgtgcgtggactcggtgcaaaagttccaggacatggtggccaggaacgtcttttgcccgccagcgagtgcgcagatgaaaaactttgatttgctcaacgtggcggggaacgagcctgagctggtggggcaggacgaggaggatcgtatcaacttcgatccgctactggatcacaaaatggagatgatcgagaacgaggaggatgtgttcaagatgttggagcacgtggacaaggaggccgagcaggtggagaaggaagtgaagcaagatgaattggacgccgccgatctgatgaccatctttgccgcggaatcctcggaggagagcgaagaagatattgaccaagatgtggactttgagcccaacagtagcgatggtgacgatgatgtgcctttggcccagcgcttacgggataattcgcggatgataccaaaagcaaaggcagccgtaattaaggaagaggaccaagagttcccaacaggctccgaagaggaggacgaggacggagaaaagtcaaagagtcgacgcaagaggattccgcctggcgaacggcacctgcaccgcatcattgactgccacatttgtcaccaaaagttcaagaaggccatccgctacgaagagcacatgaagcaccacaacgacctgctgcccttccagtgcaaagtggaaacctgcaggaaaggtttcaccaccgctggaggattacgacttcacatcgaccacgcccacacggagctatccgaggtgcactcctgcaatgtcgatggctgcggcaagacctttccgcgcatacgcctgctcacctttcacatgaagaagatgcacggcatcaccaaggcagcggcgcccccacgggattacccttgcaccgagtgcgagaaggtattccgctgtcccatggcgctcaagaagcacatgtacaagcacgacggcaaggagttgcctttcccctgtaacatctgtggcaaaaggttcgtaatcaatagtgctctaaaggatcatctgatgcggcatgcgggcattaagaactacgtgtgtccgtactgtggcgtgggaaaaaccaccaggcaggaatggaacacacacatactgacgcatacccaggagaagaagttcaagtgccacatatgcgagcacgcatcgcacaataagcagagcctggccaaccacattaagatcgtgcacgagaagatcaaaaactatgcgtgtcaatactgtggaaagacctttggcaagtcacacgcctgcaagatccacgagatgacgcacacgggggaaaagcgctgtgagtgcaaggtttgtggaaagaagtttctctatcctaagagtctgaccaagcacttgaagactcatgagaagcgtgtgcttcgtgctattgagacctaccgccagcggcaggtggaaatgggcgagacgcctggtgaacagttcgacaatccacccgcgccaccagttgagggcatatccattgagccgatcatgtcccgaaacgctgccgacgaattgcttaaggtgtgcgccgaatccgtggccaccattcccaaagatccacgccgtgtacaacgagtggatctggcgcagttggctggcactgctgtgaaccccataccctctgtttcagtgccgtcgtggtcgccgcaggtgaactttaccaagaaggagggcaaacatatctgccccggttgtggtcagggattcaacaatatcggaaacatgaagcggcactataagatcatccacgaaaaggtcaaagattttgcctgccgcttttgccccaaaagattcgcaaaggctcaaacgttgaggcatcacgagtggattcatacgggcgagaaaccctttgagtgcaagacctgcggcacccatttccgccaggagacggcgctgaagcgccaccagcgcacccacgagaaccgtccacccgtcatttcgcccaagttttatgccgctcgcgaggagctggaagagcaggaacgcagcaagcgagaggcgaagcgccaggcggatgcgaagcggcgcgaaattgcggaggcggccaaggagcagctatcgtcgctgcacaagcttgaaagtagtgaccgcagcctgcactcctacgatgagtaccaggaggcagcggcggagcgagcagcggcatccgctgaactccaggcgcagcagtttgaagagaacgaagtaaagcgactggcggaggaggagcgccgcaaggttcaggaggctgcctacgagcaactgcaactgttgcagcatcagcaggaggttgacaaggcgcaaagctcctacgatggctactacgctcaaaaagcacatgccgatggcaccactttggatgctttaaaaatcgatcatgtctga

SEQ ID NO: 21729 - protein, 863 aa, DROSOPHILA
MQEEAEAAQYSVHAVCRICLNRLPENGGGAGSFDLFLIPGLAKKLCVCTSLAVEQSDGFPKCLCAQCFSRLDDMHEFQKLCVDSVQKFQDMVARNVFCPPASAQMKNFDLLNVAGNEPELVGQDEEDRINFDPLLDHKMEMIENEEDVFKMLEHVDKEAEQVEKEVKQDELDAADLMTIFAAESSEESEEDIDQDVDFEPNSSDGDDDVPLAQRLRDNSRMIPKAKAAVIKEEDQEFPTGSEEEDEDGEKSKSRRKRIPPGERHLHRIIDCHICHQKFKKAIRYEEHMKHHNDLLPFQCKVETCRKGFTTAGGLRLHIDHAHTELSEVHSCNVDGCGKTFPRIRLLTFHMKKMHGITKAAAPPRDYPCTECEKVFRCPMALKKHMYKHDGKELPFPCNICGKRFVINSALKDHLMRHAGIKNYVCPYCGVGKTTRQEWNTHILTHTQEKKFKCHICEHASHNKQSLANHIKIVHEKIKNYACQYCGKTFGKSHACKIHEMTHTGEKRCECKVCGKKFLYPKSLTKHLKTHEKRVLRAIETYRQRQVEMGETPGEQFDNPPAPPVEGISIEPIMSRNAADELLKVCAESVATIPKDPRRVQRVDLAQLAGTAVNPIPSVSVPSWSPQVNFTKKEGKHICPGCGQGFNNIGNMKRHYKIIHEKVKDFACRFCPKRFAKAQTLRHHEWIHTGEKPFECKTCGTHFRQETALKRHQRTHENRPPVISPKFYAAREELEEQERSKREAKRQADAKRREIAEAAKEQLSSLHKLESSDRSLHSYDEYQEAAAERAAASAELQAQQFEENEVKRLAEEERRKVQEAAYEQLQLLQHQQEVDKAQSSYDGYYAQKAHADGTTLDALKIDHV

SEQ ID NO: 21730 - DNA, 6848 bp, DROSOPHILA
agcagttttcgtccgattttgtcgcatatccgaaaagtatgctttaaatatgatatcttttttataccaattcctcgtggagtaaaatgttatactaaattcgtaaaggccacaattttgaagtcttgagattttgttgatatcattctatcgatagccaaaaactgtcacaccctattgttctataaatattttgaatttatactattttaacacagtttggaagaagtatttattttttgaatcaatttaaaaatgttatgcaaatttccagcgagattccataagaattttgaattgatcccccgcacccacaatagctaagtaagaggtatctgatagtcgatgataccgttccgttttccctttgttttcgttttgaaataaactgacagactacgtgtcctggatcctatttagtttctatttacaaaaaaataaaagataaaatataccacagccaagaacttttaatttaataagaaacagcgattgattagcttaggtccattacgtttattttgttgaaagtaaattaaatttaggttacactgccacagcatttttaaatatatatatttgcatctatgccctaattgatttcgtttttatgggaacagcatttttgttgcataattaattatttttgggaaaaaataatcacaaatgtgtgtgagtgtggcatcggttttgacttgaaatataatttgatcatattttaaagactctgctcttcaaagaaaagatgagttgacaatctattgcatcaatggatttcagtttcatatgctacacagtaaacttaaaattagttaaaacgagaataatgtacaatatacaggccagtgcctctcaatcatttgatttaattgttttcattgtaatagtattgaaaagcagttctcaaaaacatcgaaataaaaagacgatcttagctaaaacgtaactatgttcgtgattcagtttaataggtgtgctgagtgttgctttaatattttgtttttttttttattttgtagaacaactgaatcaaagattcatgcgaatcaggtaaacaatttaatcttagatgtggtaacttggtattttttctcttccatctatcgtttacatttttggttgggagtttgccggcgaggctgtatttcgtttgccaattattgggttaattgtaaaatgtatataaaataaatcacaatttctatacgcacataaatgacgcgtgtgtgtgtatcgtgtctgtgtggatttttgtgggtgggtgccctggaagtgggacagcgcacagtccaacacaaggttcggctacatatttattaatattaataataaacatatgttaattgtttaaaacaaagaagctggcagccacagcgctgatcgcgaacccaaacgaaaaactcgtacccaggctgggctcatgtctcatctctcaaggatcgacgaccacctacaacctacaggctaaggactcgcggcgaactagctcgcctcatatgagaaactggcgatcggatgcgctgtgcggcagggcggccacgcctatgccgccttgcgtgggcgtttgcagaaacgccgaatcgtcgactgttgctgagtcagctgcaggcgtgctgattgctatcggttcgtagatcgaacgatgcggtggcatatcgtcttcgtccttaaaggagccgcttaaattcggattgaggatgttgttcgatgcgggcgaggctacagcaattgtccccgtcaccggcagacccatggcactggtaccggactcaacgcgctccagatagggtggcgccgccacactaataacagctggctgccggcggaagaacgagctaaaagcagtaaaaacaggaagttatgcaccttctaccagtgagcttcatcacaaatatataattacgcaaaatttattctcgaccagaccgagcgacgactctcagttaactgttcggctaggtgggccggtagattcggagcacgatcaaagggattgatgcgttcatgtgctccagaagacgtggccgggcgcacagtagaggccagcagagctgtacaagtaatagggtgtgttatttaaaaaaatcaaaaaaaatatttcggcagcagacgtaccgttctcatcgtcagagctttgggactcctcgaacggatttcgaccggcgtgaccacggcggaaggttccatgtcgcgtggttccagcgacagccgccgccgcaacgcttgagctgctcccagctgctccaccagccgaagaagccgagctcacttgacccacctgcctaccattggactgctgttgctgcagcagcggcgttgtgtcgtcatccgtatccgtgacattatccaaagaaggctgtcgactccgacttgcacgcgcttcgcccttcgtaaaaaccttgcgcttacaaatgggacacacccgacggttttcggtaagccatggatcaatgcagtgcgtgtgataggctgaaagtaataacgaattaatatgttgtctttgcattaaagaattttctggcgatgtcatattagtttaagcatttgtatatgatatattctgaaactactaaagctgagcaaataaccaagactgtatcccttacgatgtgagcagggcagcacgcgaagcttatcgtcctctatgaagtcctccagacagatcacacaggtgtcgtacttgttgtttgcgttgttcttggtatatcggagcactggcaatttcttcagcatgctctttggcagtcgatggcgacgcaagcggcgctgctcgcggatgcacttgtagatcatatagataacctgttcggcaatcaaagcaattcagttgtgtaaaacagcgttaaaactccagatttcttaccattatgatgaagcacataccgatcagaatggaaaacggcaatattaactgtgtattgatattgaagggcagctcatcgttgatgattagcaccacctcggtcgtaaagtaagtggccagcgctttacccgtcgtgtggcccacgaaaaccgagggtattcttatacccgttatgttttcggcggacatttgctctgtaattgaatatgggtttaaacaaatcatatttagacctgagcacctatgtgtaatcacttacccaagtcatcgccttcattattgtaaacaatcacagcagaataactcgcattctgggccactcgtatcttacgctcaaagacgcattcgccactacaaaagatttgagttaggtcgaactgaagtgtttatatctaccacatatagcttaccgcgctacaagtgccacaaatttggctgagggtgggtatttcaggtgcggtggtctgtccaggctatcacaaccgtaataagggcgcctagcgggaaccacatacactttgagaccatttgaaggcagattgggaccgaattgagctggcagatcattgaactcctcgatcaactgtgagtaaacaatatacgatgggcgtaataagtatttgcaatttgtaataatatttctaaaatattagcaagttaaacttgtcattaattgaacttgcctggctggttgctttccggtaaaccagcacgtggcccccgaccaaggtcgcctcatgacagaccaggcacaagcccaacagggtgagtatctggcaacttctcttggacattctgtcgcggaggacacacgttctggagatgatcgggacttggtctgtactgttattgctctagtccgctatgtccagtgctgtagcgatttgtcttcaacatccgcaccattcgcatgtctcatctgtgtcccaccgccagcgattctgtgcgcttggacttcggacttaaaacaaaagaaaatgttttttaacatattatgaatgattatttatttgggtgctataactatttatataaataataataataatttttgcaactcgagtattatcctgcgtgtagtcaacctaggcgtaaacctctccgcctacgaggccatggcaacaaagagctcagctgataagataaacggccaactgggggtattgttgatttgcttactctgaaaaaatttgcgtttcttcagtcacgctgcacttacagctggtttgtttgttgacacagtcaggcagacgacggttcgttcgggttttcgcgaatgcattaatggttacttcaaacagaacagaaaaatcaacgcgtttcgctccttggctgctattgtactcaatttgccatcaattaattttatcgcgatcaaataatagtggccgagatcttgggcggcagctgctgtagtcggaacaaataggttgatgagtcacgaacaccgctccatgctaaaaccagaacccagaccgcatgcacatttaactatttagcgtcgacgcaccgtcggtccacagttggggcagaaaaagtggaaagtttctattcgtacatatattacaaattctgctaatacacagccgaggggaggtgtgcaaatatgtcacaaaatgtttattaaagttacgatttgacaaagaaaacgtcactggcattagcacatcggtagacaatcggagcaaaggctccaatgagaacgtgactttgtttttattggatggttaaacaataaatgggaggccgacattcgttgttccaatgagaaattcaatctggggaggcgcgtgcgtttaatagaattacgccctacggattgcccaacagtctttgcattcaggtatgagttggtgatcctaccatgtaacattctatttccatttcatggcatgttataaagaaacgactacggtgtagaaggagtttgtttttaagatgatttcaactagaatgctattcctttgacaaacaagtagttcaacaaattattaaaatgttggttactatcgcatatgtttctacacaattttttagcaacttggcgatcttttgccaattaatagtatggtcatttcgcaattttcaaaacttgtatataattttccttgcaaaagcgcttgcaaaaaagctagagtagctatctggatatgtagagatacatatgtattgactggattgttttaaacaatcctgacatacggattgaatgtttagcgacgaggaatgcaattcgcgttaattcgctttgtttggaaggccgatatcaatttacacattacacagcgtacgcagcacccacccaccaacacacaaacacgcgcacacacacacaccttgaactttacaaggcacgagtgtggtttcaaggttttcctttttgggggagggcatacgctcacgcaaacacgcatacatacatacataggcactaggcaggtgtttcctgaatggtgtacaacggtgggttacaggtgaaaagcggcctcgattggaggcagcagcccacaagttattgcacttaaatttcgtatattcgcttttgttgttttttttaggcgcctctgtgtgcgtgcctgctactgtgcttgtgtgcgttcaattagcacaacaacaaagcagctgagcgatttccttttgctttcccgacgcccattcgcgtaaatccactggtcactcacttgattagggcttctcgtgctcttagttgaccgtttggagcgacttctggccagttcctgtatccaatcctattttttcagcactcgctcgcctcctcactcgtcgccatcgcactggtattgcgttgtactttgttttgctcccttttggggctcggactcctcgggttcctttagttggtggtcgtggttcagcggggacagcgcagtggctgcgaaaagagcatgacagtcgcgataagaacgctttgggtttggttcacttttctaattatcggatattagaatttacatcccacccgaacacagacacatatacagggctagagctggaactaaatcgatgtatagctgctgctggcttcctgacggcgatgttttcgtacatcgattactcccatatttcgatagctatcgactaaaattttaaaaatattaaaatccagtattctcagcaactgtttcagatcattgtacagaatttagaattctcaacttcagaacctgaaaccatatagaaatataatactaagatatagcattaataactagtttttaagattctagaagtacaaatacaatgaattggttaaaatcagtttctgtgcaaaatactacttgccttttcgaattaaccaagaaaattaaccgattttcagtggtgcgtttatattttgtgttgaacaataatgcatttgagttatgaaacattaaaatcacatgactgcgggctacttgatccagagatacattttcccctggatggtgtgcttgacgggattgatcttcttcaggattttcgtcatggtctcgaccaaacggtcgctggagacaggcgtcttcttgttcttgaacttggtgagcaactcggtggcggtcaggggctttcgcttaagataccgacgcaccgcctcctcggtgatgccgtagtccctaaacaaaatacatgaaattagaattaggaattccagtatatcacggctttactcactctactttgccgccagagaaggaagtgggcagcgatgtgctaatctcgttcttaggcctctttgctggcgtgctggtgggactgttgcttgtgtccgaagcggtgagatcgctgggtaagctgttcatcttgcgcttgctggcatccgtcgagagcgttggagtggccgagcgagatttattggcattgctgctgctggcgatgaccttgctgctcgcagcgctctctttctccttttccttttccttgtctttgtccttgacgacgaccttcttcttgggcggtccgttgctaaggtcgtcctcggagtctg

SEQ ID NO: 21731 - DNA, 2574 bp, DROSOPHILA
ttcgggtgggatgtaaattctaatatccgataattagaaaagtgaaccaaacccaaagcgttcttatcgcgactgtcatgctcttttcgcagccactgcgctgtccccgctgaaccacgaccaccaactaaaggaacccgaggagtccgagccccaaaagggagcaaaacaaagtacaacgcaataccagtgcgatggcgacgagtgaggaggcgagcgagtgctgaaaaaataggattggatacaggaactggccagaagtcgctccaaacggtcaactaagagcacgagaagccctaatcaatccgaagtccaagcgcacagaatcgctggcggtgggacacagatgagacatgcgaatggtgcggatgttgaagacaaatcgctacagcactggacatagcggactagagcaataacagtacagaccaagtcccgatcatctccagaacgtgtgtcctccgcgacagaatgtccaagagaagttgccagatactcaccctgttgggcttgtgcctggtctgtcatgaggcgaccttggtcgggggccacgtgctggtttaccggaaagcaaccagccagttgatcgaggagttcaatgatctgccagctcaattcggtcccaatctgccttcaaatggtctcaaagtgtatgtggttcccgctaggcgcccttattacggttgtgatagcctggacagaccaccgcacctgaaatacccaccctcagccaaatttgtggcacttgtagcgcgtggcgaatgcgtctttgagcgtaagatacgagtggcccagaatgcgagttattctgctgtgattgtttacaataatgaaggcgatgacttggagcaaatgtccgccgaaaacataacgggtataagaataccctcggttttcgtgggccacacgacgggtaaagcgctggccacttactttacgaccgaggtggtgctaatcatcaacgatgagctgcccttcaatatcaatacacagttaatattgccgttttccattctgatcggtatgtgcttcatcataatggttatctatatgatctacaagtgcatccgcgagcagcgccgcttgcgtcgccatcgactgccaaagagcatgctgaagaaattgccagtgctccgatataccaagaacaacgcaaacaacaagtacgacacctgtgtgatctgtctggaggacttcatagaggacgataagcttcgcgtgctgccctgctcacatccctatcacacgcactgcattgatccatggcttaccgaaaaccgtcgggtgtgtcccatttgtaagcgcaaggtttttacgaagggcgaagcgcgtgcaagtcggagtcgacagccttctttggataatgtcacggatacggatgacgacacaacgccgctgctgcagcaacagcagtccaatggtaggcaggtgggtcaagtgagctcggcttcttcggctggtggagcagctgggagcagctcaagcgttgcggcggcggctgtcgctggaaccacgcgacatggaaccttccgccgtggtcacgccggtcgaaatccgttcgaggagtcccaaagctctgacgatgagaacgctctgctggcctctactgtgcgcccggccacgtcttctggagcacatgaacgcatcaatccctttgatcgtgctccgaatctaccggcccacctagccgaacagttaactgagagtcgtcgctcggtctggtcgagaataaattttgcctcgttcttccgccggcagccagctgttattagtgtggcggcgccaccctatctggagcgcgttgagtccggtaccagtgccatgggtctgccggtgacggggacaattgctgtagcctcgcccgcatcgaacaacatcctcaatccgaatttaagcggctcctttaaggacgaagacgatatgccaccgcatcgttcgatctacgaaccgatagcaatcagcacgcctgcagctgactcagcaacagtcgacgattcggcgtttctgcaaacgcccacgcaaggcggcataggcgtggccgccctgccgcacagcgcatccgatcgccagtttctcatatgaggcgagctagttcgccgcgagtccttagcctgtaggttgtaggtggtcgtcgatccttgagagatgagacatgagcccagcctgggtacgagtttttcgtttgggttcgcgatcagcgctgtggctgccagcttctttgttttaaacaattaacatatgtttattattaatattaataaatatgtagccgaaccttgtgttggactgtgcgctgtcccacttccagggcacccacccacaaaaatccacacagacacgatacacacacacgcgtcatttatgtgcgtatagaaattgtgatttattttatatacattttacaattaacccaataattggcaaacgaaatacagcctcgccggcaaactcccaaccaaaaatgtaaacgatagatggaagagaaaaaataccaagttaccacatctaagattaaattgtttacctgattcgcatgaatctttgattcagttgttctacaaaataaaaaaaaaa

SEQ ID NO: 21732 - protein, 536 aa, DROSOPHILA
MSKRSCQILTLLGLCLVCHEATLVGGHVLVYRKATSQLIEEFNDLPAQFGPNLPSNGLKVYVVPARRPYYGCDSLDRPPHLKYPPSAKFVALVARGECVFERKIRVAQNASYSAVIVYNNEGDDLEQMSAENITGIRIPSVFVGHTTGKALATYFTTEVVLIINDELPFNINTQLILPFSILIGMCFIIMVIYMIYKCIREQRRLRRHRLPKSMLKKLPVLRYTKNNANNKYDTCVICLEDFIEDDKLRVLPCSHPYHTHCIDPWLTENRRVCPICKRKVFTKGEARASRSRQPSLDNVTDTDDDTTPLLQQQQSNGRQVGQVSSASSAGGAAGSSSSVAAAAVAGTTRHGTFRRGHAGRNPFEESQSSDDENALLASTVRPATSSGAHERINPFDRAPNLPAHLAEQLTESRRSVWSRINFASFFRRQPAVISVAAPPYLERVESGTSAMGLPVTGTIAVASPASNNILNPNLSGSFKDEDDMPPHRSIYEPIAISTPAADSATVDDSAFLQTPTQGGIGVAALPHSASDRQFLI

SEQ ID NO: 21733 - DNA, 9880 bp, DROSOPHILA
taagatttctttaataagtattactttttatagacttgaaatggtcaacaagcaagttctatgaaattttgaaattaatgatgaaaattctgtgtgttgtacaatattatattttcttataaataataggatatatttttcctttcagaatattgagccaaccttattttaattctttaaaatattagtaaaaatgatgcgagatttgcgcttttggtagatttcaaaaaatttgtattaattgaaaatgttaaataaaccacaaatggggtgagtctttgctaaatgctcaacacagaaagttgttttatgcttatatttgttaaggtatatttactaatctccgcacagactacgttttggtaggctaggaaatttaagacatttccgaatattaggagtacggaccgacgacgagatacatttaaagttcgtttcagcagaatcttaaatattaaaaacttagcgggcaagtaaatacaccgcgttcagctgattatcgatagctaggaaatttaagacatttccgaatattaggagtacggaccgacgacgagatatatttaaagttcgtttcagcagaatcttaaatattaaaaacttagcgggcaagtaaatacaccgcgttcagctgattatcgatagcaaccaggtggtcactctaatagacgttttcatgcgagcccgctgcggtcacaccaacttctcgaccgatttttcccctccatctagggtcactctaattttggacgaggttaggtaagacacgcgcggatgccgcgctgcgtaggataaatccgtcattagcataaccgcattgaagctaagtcttcgggaaaatgcttaagcttgtgcaatacatagccccccgggtgggcggcgccacgccccgaccgactgcctgcggctggggcaacttgctattgatttccccgagaagtggcgcgagctccgagaaatgtataacgcaacgtcgccattttcttttctcctccgccagcagcagcggcactttcgcttcttcttcttcgctctgcaccgaacaacgacaacagttccacgggagtcgcaggaatcgtgagacaatactgttcccaagcacatatagtagtctccaagctcagtcgcagcgtgcgtttcgagacagctcgaaaccagattcagacgactacgtagattccatcccgaaagcagagcagcggacgaggacgaggaaatcgcttttcaacgatcccgacgaaagaactgaggaaatcaaaattgaaggagtaatgtgagtacagccgcaagatttcatatgaaatgcgttggttttttccactcactgtcgccattttatcacccttcgtgccattcctctttttttttttttttttctgtacacctacgaagcgaggtgatgagtaattagtgtgagcgaaagagagagtttggggagagagagaaaaacacatggtttgctaaattttgtcagtcggaggtgaggttttcagccatttgttgtttttttctttgtgtttgcccccgcacatccgcaaaggagtagcaaaagcaacaagaacgacagcgcacgtcataaaaagaatttgcctgatttgtgaaacgtgttcttgcttcgtttgctattttatagcgttttaatttgtctgtatgccccgaacatgaacacgcgcactcacacagcggcacatacggacttgcttgtatgcgtgaatgcctgttgacggcggcattttctcgtgctcgtagaacagttcgaacagtgtgtgcgagcgtataacagtcggcggctgtcactgactagcgccgtcctgctcactcgccagcatgcctttccatcacattctttccatggctcacacgaggttttgtagagatatcgcgatgtttttggtattggcaattttataatttgatgtaaccatcccgacatagatttatacttactatgcttaatttgggaagtgaatggggttaatggtttgcttcgtttggttatctaatgcgtacattgaaatatataatttcagtataattctgtatactgaggacaattttagggaaaagtagggttattctcttaaaattttctctacactataagtaaaggttccatgcaaacacatttaacttacagattatcaaaaatgcattttatcgatcattttatctattttgctacgctctttttgtgtttacttatcatgaaccatgcttgttatgcaataaaaattatttattagaaagttatactatagtattgataaaaactcaagtaacaaccaaatattaaatggtaatagtaacccagttcgtgaactacgccatcacataaacggccccattagtctaaaatgtcaaatgacgccaattgattatgagctccccctttggcgagcgcgcgattcgtcttttcgcatgtcaaaaagcgacaggtagacacacagaaagtcaaaggtgcccccagggactgtcccctcctcccctcgggtgtttgcccaccgttgaaactaggggcaagacatttggctgtctcataaatgttcagagcgttccgcttcgctagttgggcacaaacgttagcgtgccagtgggtcctacaaatagacgtttagggcggtacggtgttccaaattgacagagtaatagacaaaaaaaaacgtgggcctggatcgtgggtgatttgcatggtgcaccccatagtgatgcccactaggatcacgaaaatggagcttacatacgaagtaaagcgaatataaagtggaaatttatagaagttagttcgtaacacaataaacataatttatgttgtaaattttgttttatacaactttaccatccaacttaatcttgcactatatttattaccacattgtatatacactccgcagagttaatattatttttccctaattattgcaaagtgctaacatatataggtcggtaccttcgccagttctgactggaactagaactgcgccaggttgattaatgccagagcaataaacgcagggctttgtacatggggctgtttagtttagttgagcatttaggggctgataaactggggtgaaaaattggtgggagggtgggctgtgaatagaaaccctgctcgaattgcatgttgttgtcaatcaaatttgccttactgtttgcattattcgaaatttatttaatttccctaacacgcaattagtttttatttaagtttattgcggttgtagcacagcacaactcccatgtcagctgtttagcagcgtcgaaagaaatcgaaaagcgaagacttaccttccaagccaagtcgcagttgaaatccaagtcccaactggcagacgtctagaaacggcagcatgcgagcaaagtaagccaagtcactcgtttctttttttcctcaattttctgtcaaagaaatacttaagaaaagaaagtgcagctgtctacgccgagccggaaaaaatgattccagttaagcatggtttaattctcgaaggtcccttttatcaagggaaaatttatgacacacagtttctgggtaatgtgtgtgcagcgcaaaattattttagatggcagataaggaggaattgattatacaaatgtacaacgcgaaattaaaaagtttgtgagaaaactatcaaactatatcaacttcagcgaaattcggttacaaagctcaaagtgggatattttcttaaagattccactgaattcacggcagcgaaataacaagtcgtgaagtcgttcaatttccatgaataaggaaaaggcccttgatacttgacactaagtaaacttcggcaatgcaagataagcatattagaattaaattactttaatctcatttgcctttaccaaagccaattaccatcgcaaccattaattttgccaaagttatctagaataaattacaatacaaaaaggcacacagggtacgcgtgaatttttaatttatcaagttaatgggaaaaacacttgtaatgccactaatttaattttttttatctcgaataaaacagcatcaagataaattggtggtcaaagatcaaaccagtacaagaaactgcaaactactaccttaagttcaaataagctgcaagatgatgatgatgtgagatttcttttcttgagcattccgtttctattttgcatacttagatactcatcgatcttcctttattatttcccagggcaccacacgatcgcgactttggtcacagtggacgtggcggtcgcggaggcgatcgaggcggcgatgatcggcgaggaggcggcggcggaggcaatcgcttcggtggcggcggtggcggtggcgattaccacggcataaggaatggacgcgtcgagaagcgacgcgatgaccgcggaggcggcaaccgatttggaggtggtggtggattcggggatcgccgaggaggaggtggcggcggcagccaagacctccccatgcgtccggtcgacttctccaacctggctcccttcaagaagaacttttaccaggagcaccctaacgtagcaaaccgatcgccctacgaagttcagaggtatcgcgaagagcaggagatcaccgtgcgcggacaggtgccgaaccccatccaggacttctccgaggtccatctgcccgactacgtcatgaaggagatccgccgacagggctacaaggcccccaccgctatccaagcgcagggctggcctatcgccatgagtggctcgaacttcgtcggcattgccaagacgggatccggaaagaccctgggctacatcctgcccgctattgtccacatcaacaaccagcagccgctgcagaggggcgacggacctatcgccctcgtgctggcccccactcgggagctggcccaacagatccagcaggtggccaccgaattcggttcctcgtcgtatgttcgcaacacctgcgtcttcggcggcgccccgaagggcggccaaatgcgggatctgcagcgcggctgcgagatcgtcattgccacacccggacgtcttattgatttcctctccgccggctctactaacctgaagcgttgcacctacttggtgctggacgaggccgatcgcatgttagacatgggcttcgagccccagatcagaaagatcgtctcacagatccggcccgaccgacagacgctcatgtggagcgctacctggcccaaggaggtcaagcagcttgccgaggactttttgggcaactacatccagatcaacattggatcgctggagctgtccgccaatcacaacatccgccaggtggtggacgtttgtgacgagttcagcaaggaggagaagtaagtggaccttaattctaattgtaattgtctagttgatactagaatttagagaagttcctcttataaaatttcttaatttaatatttcctcctatcaatacagattgaagaccctcctgtcagacatctacgacaccagcgagagccccggcaagattatcatattcgtggagacaaagcgacgcgtggacaacctggtgcgcttcatccgcagcttcggagtccgttgtggagctattcacggtgacaagtcgcaatcagaacgagactttgtgctccgtgagttccgctcgggcaagtccaacattctggtggccaccgatgtggcggcccgtggactaggtaagtttgctctcgcagcggcgtagaatatacaccgtagtttgcggccgaaagatttggatgggcctgtttagcgataaggtcacacttgctagggccattgcttacaacataccatcactaccagaggacaccgcacctaacgatcacccagcatcattacacgcacccactacatgcgagcagaacctaatcctacccgtaaaccaacctacccaccatccgaacttcctaaccacacctaatgatatatcccggtatctacccacatctagcgagcgcgccaactcagaaacagttttttttagacatacgccaaatgccgaaatcgaataatcaacttgaacttttaccccaccccctgaccctgacctgcaacccgcccccacctgcaacacccggcccaacccctgctaaaataatgtatgaaatgcgtaatgatcgtatatgatccatatgcactgcggtgtacctgttactacgcaacttttgtctttgtgcgtgtctctgcctctttctctctctcccccccccctctctctctctctctttcttgtttctttctcgtttacagaggccgattttggtagtatgatggggaggataatgaatgagcggcgaccactgcgaacactcgtgacttgagcgacttttgccaacatcagaatcagatctgttatgatatatgatgatagcacatcctgtgtgatatcttgcgcaaaaggaccgatgaaagttctcagattcagacggtcgagagacacgaatatcgaatatccccaacatcatgcatcatatgtggcctctgcagtccccgactttttgttgagaaagagtgaaataatatgatatgagacgtttttgcgaccaaagactaccatctaccaaccaaaaaccatctaccaatcaaccaaataagatccaacaacaacaactgaaccgaaccatcagagagccagctttttcctcagcagtggatggcggaaggcggcgtgcaaagtattgacggggtggcctggcccttgagaaagcactagaattggacatgcaccaagtcgacagcaaaagccaaagcaaagcaagcaagcaaaaacaagcacattgacaccaccacccccacaacacaaaccacactcacaaataagaacacctgacatttgctttaaccagagtgaggacgagaagatccatccggagatggatgatgtgtgtgctttcgaggatccagacgaagatgctgctgctgggtgctgcgtcctcccaaaagctcactaccaccacccactgaccgcgtttgccgccgcatcagttaagcccactgctcctggacgaaaaggcggcccgcttgttgttgttaaccctcccaaaaagttcaatctttatataatggtcgtgtctcctctcggtggtcacctccaaaatggtccatgtgagaagagagcttagtcagaggcgcacgcggctcaatgcaacaaactctccgcttcgccgtgcgatcgagatcgctaccttgctgtttctggggagagtttggaccacgagctgcgcgccgccaatcagagattttgattgagagaaaattgagtgaaacaatttatagcaccaagaaggtaacgtacattttgaaacattttctttttttctcttaaaaaaaaatacaaacaacccacaaatcaaaataccatagactcaatagtatgcaaaagtataaaaaaaaaaatttaaaaaaaaaaaagaaaagacaagtgtgttcaaagtgttcaagacatctcggaaaaacgctaaaaattgttgcaagcgagcgcgcatagcggaaaaatcatttggcaatttgaaaactgttcgtcaaataaataatacaccccaattaagtaagaacacagccaggagctcgaaactaatctatgcgccttctcttttccccggacacctgtagacgtggacggcatcaagtatgtcatcaactttgactacccgcaaaacagcgaggactacatccatcgcatcggtcgcacaggacgatccaacacaaagggcacctctttcgccttcttcaccaagaacaatgccaagcaagccaaggcgctggtcgacgtactccgagaagctaatcaggtgagttcatagcgtggtatcaggttacaacaccatttgggcagtcaaatctagtttgggtaaatctacatctaggtcttatattccaaatcttagaattagcatgcagatcccttaaccacatcgatttactgctctttttgatactgacccttagaggtaaacacaattctgatggtttcttatttctttatcaggaaatcaatcctgccctggaaaatctggcccgcaactcgcgctacgacggtggcggcggacgctcccgttatggaggcggtggcggcggcggtcgcttcggcggcggcggcttcaagaagggcagcctgagcaacggacgaggcttcggaggaggcggcggcggcggcggcgaaggcagacactcgcgcttcgactagatcgcggacaattagatgagcagtaaaagaagctataggaacaggagatttcagtagctaaactaaaccgcactaggtcctaagttaaattaagttcatagcttaagttaagatttcgtactactttcaccaaaccgctgacggttatttttagacttaaattcagactccctgattaatgaaacactacaaaatgcgagctatttgaacatagcgaatttatgtttaaatgatttgtaagttatttgacgctggccgcgaggtcggtacaacacaatccaattgagaacatcaaaaacactttacttaaacgcaaaaaccaattttcaaatatcatgtgataatttcttaatttaacgcaacgtatcactaaactaaaagcaaaggaaatcgtagcgcgaggagtacgttgatgtagtggaggaaaaggaggaagtaaggatcattcccgtctgtcccgttttgatgacaatgaacaaaggctgacctgacgagcgacctttgtttgataaataaattcttcaaattacttttggaaaattaacttttggataccttttatggctcaacacgagaacaagaatgtgtaaagcaaacaaagcaaacgggaaatcacattaactactgacactaaatacaaaagaaaaacaaactgtatgtacaagatgagaagttctctttcaatttaatttttcggaaaaaaataaagtttgtgtatacctattacaacctaaaccaacaacaaagcttctgttttatgcattcagctcaactgaatcgtaagcgactgggtcccacaaaggaatgccatttcccatgaaaggttgcgggtgtaaaataatcgtgatggcagcaatattttcgcagacatcattaagtgcgagacctggtcgctcgtggcagtgtcatcagcgatgccctcaccccttcaaaaatgccagataagacatggtgtcctccagggtgggaataccagagttcccaaccaagttgtctgctagccaagattcactcagcgactgcaaatggcataggcttcttggcattactagtgaatttcgtgaatttgaaataaataatcgaaataactgattcatatttaagatttccgcttttaaatcgttttcgaaatcgtttagactgagggatgtacattcacttcaattactctgatttgaagtcttaactacgttccaggaatcgatagttggcaacattcagtgaaataagcacggcggaccgtcttctgacaccacattcagacgcaatgaagccaatttacgttcgacttggcctgcttcgttgcgcgggttaaacgacctttctttgtccagggtcctcatccgagatgcttatgacaagttagctgtgttcttgggaccagatcaatccacttaccccgtttgcaggacggcgatttccgaggaccgataatgacgctgctggggacgtgaatgtggtcggattggagttcctgccattcgctggctacgttgggacgtcgcgctccggccgttgcggcgaagttgagaaggaagtcatttgtctaattgcttgaattgggctgtgcgcttgcaggacgaaaaggatgagcgggggagttttgattggtgatacgtaaagccaaagcaactttggcaaatttgttatcaagttttgaggcaaaagtttgtttgggtcagtcagtgctggaaaatttctctcttctttctcttcgcttgataccttgaac

SEQ ID NO: 21734 - DNA, 2823 bp, DROSOPHILA
cagcagcggcactttcgcttcttcttcttcgctctgcaccgaacaacgacaacagttccacgggagtcgcaggaatcgtgagacaatactgttcccaagcacatatagtagtctccaagctcagtcgcagcgtgcgtttcgagacagctcgaaaccagattcagacgactacgtagattccatcccgaaagcagagcagcggacgaggacgaggaaatcgcttttcaacgatcccgacgaaagaactgaggaaatcaaaattgaaggagtaatcatcaagataaattggtggtcaaagatcaaaccagtacaagaaactgcaaactactaccttaagttcaaataagctgcaagatgatgatgatggcaccacacgatcgcgactttggtcacagtggacgtggcggtcgcggaggcgatcgaggcggcgatgatcggcgaggaggcggcggcggaggcaatcgcttcggtggcggcggtggcggtggcgattaccacggcataaggaatggacgcgtcgagaagcgacgcgatgaccgcggaggcggcaaccgatttggaggtggtggtggattcggggatcgccgaggaggaggtggcggcggcagccaagacctccccatgcgtccggtcgacttctccaacctggctcccttcaagaagaacttttaccaggagcaccctaacgtagcaaaccgatcgccctacgaagttcagaggtatcgcgaagagcaggagatcaccgtgcgcggacaggtgccgaaccccatccaggacttctccgaggtccatctgcccgactacgtcatgaaggagatccgccgacagggctacaaggcccccaccgctatccaagcgcagggctggcctatcgccatgagtggctcgaacttcgtcggcattgccaagacgggatccggaaagaccctgggctacatcctgcccgctattgtccacatcaacaaccagcagccgctgcagaggggcgacggacctatcgccctcgtgctggcccccactcgggagctggcccaacagatccagcaggtggccaccgaattcggttcctcgtcgtatgttcgcaacacctgcgtcttcggcggcgccccgaagggcggccaaatgcgggatctgcagcgcggctgcgagatcgtcattgccacacccggacgtcttattgatttcctctccgccggctctactaacctgaagcgttgcacctacttggtgctggacgaggccgatcgcatgttagacatgggcttcgagccccagatcagaaagatcgtctcacagatccggcccgaccgacagacgctcatgtggagcgctacctggcccaaggaggtcaagcagcttgccgaggactttttgggcaactacatccagatcaacattggatcgctggagctgtccgccaatcacaacatccgccaggtggtggacgtttgtgacgagttcagcaaggaggagaaattgaagaccctcctgtcagacatctacgacaccagcgagagccccggcaagattatcatattcgtggagacaaagcgacgcgtggacaacctggtgcgcttcatccgcagcttcggagtccgttgtggagctattcacggtgacaagtcgcaatcagaacgagactttgtgctccgtgagttccgctcgggcaagtccaacattctggtggccaccgatgtggcggcccgtggactagacgtggacggcatcaagtatgtcatcaactttgactacccgcaaaacagcgaggactacatccatcgcatcggtcgcacaggacgatccaacacaaagggcacctctttcgccttcttcaccaagaacaatgccaagcaagccaaggcgctggtcgacgtactccgagaagctaatcaggaaatcaatcctgccctggaaaatctggcccgcaactcgcgctacgacggtggcggcggacgctcccgttatggaggcggtggcggcggcggtcgcttcggcggcggcggcttcaagaagggcagcctgagcaacggacgaggcttcggaggaggcggcggcggcggcggcgaaggcagacactcgcgcttcgactagatcgcggacaattagatgagcagtaaaagaagctataggaacaggagatttcagtagctaaactaaaccgcactaggtcctaagttaaattaagttcatagcttaagttaagatttcgtactactttcaccaaaccgctgacggttatttttagacttaaattcagactccctgattaatgaaacactacaaaatgcgagctatttgaacatagcgaatttatgtttaaatgatttgtaagttatttgacgctggccgcgaggtcggtacaacacaatccaattgagaacatcaaaaacactttacttaaacgcaaaaaccaattttcaaatatcatgtgataatttcttaatttaacgcaacgtatcactaaactaaaagcaaaggaaatcgtagcgcgaggagtacgttgatgtagtggaggaaaaggaggaagtaaggatcattcccgtctgtcccgttttgatgacaatgaacaaaggctgacctgacgagcgacctttgtttgataaataaattcttcaaattacttttggaaaattaacttttggataccttttatggctcaacacgagaacaagaatgtgtaaagcaaacaaagcaaacgggaaatcacattaactactgacactaaatacaaaagaaaaacaaactgtatgtacaagatgagaagttctctttcaatttaatttttcggaaaaaaataaagtttgtgtatacctattacaacct

SEQ ID NO: 21735 - protein, 577 aa, DROSOPHILA
MMMAPHDRDFGHSGRGGRGGDRGGDDRRGGGGGGNRFGGGGGGGDYHGIRNGRVEKRRDDRGGGNRFGGGGGFGDRRGGGGGGSQDLPMRPVDFSNLAPFKKNFYQEHPNVANRSPYEVQRYREEQEITVRGQVPNPIQDFSEVHLPDYVMKEIRRQGYKAPTAIQAQGWPIAMSGSNFVGIAKTGSGKTLGYILPAIVHINNQQPLQRGDGPIALVLAPTRELAQQIQQVATEFGSSSYVRNTCVFGGAPKGGQMRDLQRGCEIVIATPGRLIDFLSAGSTNLKRCTYLVLDEADRMLDMGFEPQIRKIVSQIRPDRQTLMWSATWPKEVKQLAEDFLGNYIQINIGSLELSANHNIRQVVDVCDEFSKEEKLKTLLSDIYDTSESPGKIIIFVETKRRVDNLVRFIRSFGVRCGAIHGDKSQSERDFVLREFRSGKSNILVATDVAARGLDVDGIKYVINFDYPQNSEDYIHRIGRTGRSNTKGTSFAFFTKNNAKQAKALVDVLREANQEINPALENLARNSRYDGGGGRSRYGGGGGGGRFGGGGFKKGSLSNGRGFGGGGGGGGEGRHSRFD

SEQ ID NO: 21736 - DNA, 4150 bp, DROSOPHILA
caccttgaactttacaaggcacgagtgtggtttcaaggttttcctttttgggggagggcatacgctcacgcaaacacgcatacatacatacataggcactaggcaggtgtttcctgaatggtgtacaacggtgggttacaggtgaaaagcggcctcgattggaggcagcagcccacaagttattgcacttaaatttcgtatattcgcttttgttgttttttttaggcgcctctgtgtgcgtgcctgctactgtgcttgtgtgcgttcaattagcacaacaacaaagcagctgagcgatttccttttgctttcccgacgcccattcgcgtaaatccactggtcactcacttgattagggcttctcgtgctcttagttgaccgtttggagcgacttctggccagttcctgtatccaatcctattttttcagcactcgctcgcctcctcactcgtcgccatcgcactggtattgcgttgtactttgttttgctcccttttggggctcggactcctcgggttcctttagttggtggtcgtggttcagcggggacagcgcagtggctgcgaaaagagcatgacagtcgcgataagaacgctttgggtttggttcacttttctaattatcggatattagaatttacatcccacccgaacacagacacatatacagggctagagctggaactaaatcgatgtatagctgctgctggcttcctgacggcgatgttttcgtacatcgattactcccatatttcgatagctatcgactaaaattttaaaaatattaaaatccagtattctcagcaactgtttcagatcattgtacagaatttagaattctcaacttcagaacctgaaaccatatagaaatataatactaagatatagcattaataactagtttttaagattctagaagtacaaatacaatgaattggttaaaatcagtttctgtgcaaaatactacttgccttttcgaattaaccaagaaaattaaccgattttcagtggtgcgtttatattttgtgttgaacaataatgcatttgagttatgaaacattaaaatcacatgactgcgggctacttgatccagagatacattttcccctggatggtgtgcttgacgggattgatcttcttcaggattttcgtcatggtctcgaccaaacggtcgctggagacaggcgtcttcttgttcttgaacttggtgagcaactcggtggcggtcaggggctttcgcttaagataccgacgcaccgcctcctcggtgatgccgtagtccctaaacaaaatacatgaaattagaattaggaattccagtatatcacggctttactcactctactttgccgccagagaaggaagtgggcagcgatgtgctaatctcgttcttaggcctctttgctggcgtgctggtgggactgttgcttgtgtccgaagcggtgagatcgctgggtaagctgttcatcttgcgcttgctggcatccgtcgagagcgttggagtggccgagcgagatttattggcattgctgctgctggcgatgaccttgctgctcgcagcgctctctttctccttttccttttccttgtctttgtccttgacgacgaccttcttcttgggcggtccgttgctaaggtcgtcctcggagtctgtgctgtcagagctgaagtctgtggacgagtcaccgctgccattcgacttgcccttcttgtcgtcctttgtgggtttcttcttctttttgtccttggatacctcgtccttgcccttatccttcttttttttctcgccgtcggcatcctccttgtccgactcatcagacttcttctcatcatcctcctcttcatcggaggtaagcagcttgcggagcgcatcttcctcggccacgcctttcatgtccttgtccacctttgcctctggatctggttcgctagaatagggtataagaaattagtagatgtggtccaaattgtattgccattatcagaatcgtttggggcacatactcttcactggagctggtgtcgtagtccatttctctgccctcctcgtcaccatcgtccgactcctcgaaggcctcgtcatcaacatccctctttttctttttcttgtctgcgcccttcttgccctttcccttggccttgccatcgtcgctgtcttcctgctccttcttctttttatcctcctcgtcctccgaatccgactcatcctcggaatcaatccattcatccatgtcagtgatcttgagctccttggattttttggtggctgccttaattagcttagcctcctccggatcctgctcctcttcctcatcgccgcgcagacgctttcgcaacataagggagaagtagttcatcacctttttgcgccgaccaaattcctgttcggcctcctccgccgacagcgatttgtagcgctgaataggctggaagttgtaccactcggtcaaggggtatgcctcaatggcgccgtctggtgcatgggtgaacacatagaaagctgcattctcgcctacgccgccctcgcggatgcctttgaacttctttccagtcttgccacccactttaaggatccatggctgtgcctctggacggtactttctcgctataatgccaaacttcttgcggcgcgcctcctcgcgctgatcccggttgtactccgatccagcaccaaacttgggctgatcctcctccatgccccggaactccttcatgttgttttcccgctccagtttcacatttctccactgcgcgaaatccacattgagcgtggcgttgaaccgcatcacatggtgcttcttgggcatcttgggcacgcggatcttgaactcctgcacgttggcggatgacgaggcggatcctgaggcgacagaggctgcggcggcggcagctgcggacgtggagctcccgctggcagcgctcggctgcatgaaatcaagcgaagaccgcaaataagtgttggcgccggaagcggcagggtaaagacttaccgtcgactttgacgcgctcgacatggcttaatgtttgctaatcatatgttgcttctatctggatattttatacttttccccaaactcttacaattcgcggcgcgggcagaaaagttggattttctagcgatgtccgataacagaagtgcagttattctttggaagcaagtgtatcgtatcgtttgggcagaaaaataatatttattccaagagattttgataaacaaattggaaaagtagatattataagattgcatattcaagccctacaaggtatttaaaaacttcaaagttttgtaatgttctatcaaaataaagtgacagccgatatccgttcacagtcacggttatcgattacctctttttagataaacgattgtcgccatagcaaataacgataaattcacaaagcgctgtctagtttgtttggatttcatttgcagtttgtcgcttaaatgttagggaaaatgtcgcggaacgtgacgctctcggatgaacaaagtcggcttaatgcgcgtctggaggcgcacatggtttacatatgtccggaatgcggcaaggcgttccgcactcaggcggagtggcgacagcatctgaacacggcaagttgcgggttttgtgcaaatcaagttctgctttaataatggtttgaaatgtgcccacagaaacacgactatctaaagaagacgtactcagatttcaacttcatccagatcgacgagcgattccatgagtgccagctgtgcttcaaatgggtggagaatgcccacaagacaatcgccctcctgcagtaccactactttatgcatctggagcacagtgaaacctaccgctgcgtgcactgccgcatggcgtacacgaggcgccgggctctgaacgtccacctactggacacgcacatgcgggagatcgagaagtacgagaacaagctgcgccagatgaagcggcagcaggcgaaacccactacagcggccgcaccagctggaaatgcagagaagccgatggctgtgaagccgcgtgggcgtcccaaaggttccacgaacagaaagcaaaatgatctgctgcaaaaggcgctgatggacattgatctgaacacagaaatggaaaagtccccagtgacagcactagcggctcctgtaaacgaacctaagcccatttcaa

SEQ ID NO: 21737 - DNA, 1950 bp, DROSOPHILA
caaagaataactgcacttctgttatcggacatcgctagaaaatccaacttttctgcccgcgccgcgaattgtaagagtttggggaaaagtataaaatatccagatagaagcaacatatgattagcaaacattaagccatgtcgagcgcgtcaaagtcgacgccgagcgctgccagcgggagctccacgtccgcagctgccgccgccgcagcctctgtcgcctcaggatccgcctcgtcatccgccaacgtgcaggagttcaagatccgcgtgcccaagatgcccaagaagcaccatgtgatgcggttcaacgccacgctcaatgtggatttcgcgcagtggagaaatgtgaaactggagcgggaaaacaacatgaaggagttccggggcatggaggaggatcagcccaagtttggtgctggatcggagtacaaccgggatcagcgcgaggaggcgcgccgcaagaagtttggcattatagcgagaaagtaccgtccagaggcacagccatggatccttaaagtgggtggcaagactggaaagaagttcaaaggcatccgcgagggcggcgtaggcgagaatgcagctttctatgtgttcacccatgcaccagacggcgccattgaggcataccccttgaccgagtggtacaacttccagcctattcagcgctacaaatcgctgtcggcggaggaggccgaacaggaatttggtcggcgcaaaaaggtgatgaactacttctcccttatgttgcgaaagcgtctgcgcggcgatgaggaagaggagcaggatccggaggaggctaagctaattaaggcagccaccaaaaaatccaaggagctcaagatcactgacatggatgaatggattgattccgaggatgagtcggattcggaggacgaggaggataaaaagaagaaggagcaggaagacagcgacgatggcaaggccaagggaaagggcaagaagggcgcagacaagaaaaagaaaaagagggatgttgatgacgaggccttcgaggagtcggacgatggtgacgaggagggcagagaaatggactacgacaccagctccagtgaagacgaaccagatccagaggcaaaggtggacaaggacatgaaaggcgtggccgaggaagatgcgctccgcaagctgcttacctccgatgaagaggaggatgatgagaagaagtctgatgagtcggacaaggaggatgccgacggcgagaaaaaaaagaaggataagggcaaggacgaggtatccaaggacaaaaagaagaagaaacccacaaaggacgacaagaagggcaagtcgaatggcagcggtgactcgtccacagacttcagctctgacagcacagactccgaggacgaccttagcaacggaccgcccaagaagaaggtcgtcgtcaaggacaaagacaaggaaaaggaaaaggagaaagagagcgctgcgagcagcaaggtcatcgccagcagcagcaatgccaataaatctcgctcggccactccaacgctctcgacggatgccagcaagcgcaagatgaacagcttacccagcgatctcaccgcttcggacacaagcaacagtcccaccagcacgccagcaaagaggcctaagaacgagattagcacatcgctgcccacttccttctctggcggcaaagtagaggactacggcatcaccgaggaggcggtgcgtcggtatcttaagcgaaagcccctgaccgccaccgagttgctcaccaagttcaagaacaagaagacgcctgtctccagcgaccgtttggtcgagaccatgacgaaaatcctgaagaagatcaatcccgtcaagcacaccatccaggggaaaatgtatctctggatcaagtagcccgcagtcatgtgattttaatgtttcataactcaaatgcattattgttcaacacaaaatataaacgcaccactgaaaa

SEQ ID NO: 21738 - protein, 577 aa, DROSOPHILA
MSSASKSTPSAASGSSTSAAAAAAASVASGSASSSANVQEFKIRVPKMPKKHHVMRFNATLNVDFAQWRNVKLERENNMKEFRGMEEDQPKFGAGSEYNRDQREEARRKKFGIIARKYRPEAQPWILKVGGKTGKKFKGIREGGVGENAAFYVFTHAPDGAIEAYPLTEWYNFQPIQRYKSLSAEEAEQEFGRRKKVMNYFSLMLRKRLRGDEEEEQDPEEAKLIKAATKKSKELKITDMDEWIDSEDESDSEDEEDKKKKEQEDSDDGKAKGKGKKGADKKKKKRDVDDEAFEESDDGDEEGREMDYDTSSSEDEPDPEAKVDKDMKGVAEEDALRKLLTSDEEEDDEKKSDESDKEDADGEKKKKDKGKDEVSKDKKKKKPTKDDKKGKSNGSGDSSTDFSSDSTDSEDDLSNGPPKKKVVVKDKDKEKEKEKESAASSKVIASSSNANKSRSATPTLSTDASKRKMNSLPSDLTASDTSNSPTSTPAKRPKNEISTSLPTSFSGGKVEDYGITEEAVRRYLKRKPLTATELLTKFKNKKTPVSSDRLVETMTKILKKINPVKHTIQGKMYLWIK

SEQ ID NO: 21739 - DNA, 3360 bp, DROSOPHILA
ccaaggtgtcacatatcaaaactatccaacaaacagacagaatcaaatacgaactcaaacacaaacaagttgaaagacagacagaccggcagacagtaagaaagacagttgagcacgcgaaaaatagggtcaaaacctaaataccttgactaaaggatctgagtatagtcatagtggtagaattgcaacttaacaataatgagatctatagtttgatgtatatgtttgtattgaaatagtaatatttagcgtatgtatctaacattcgagctaatggtaagggttcagtttggcccatttttccggcatgtaaccatttgaagagcctgcttttggtaaaatcggaaagatttcaagcggaaaccaatttgtgaaattcattgtacttaaacgtttagtgtcattgtgagcctgacaacaataagttgaaaaagagattcactgaagcgatgcccttgcagctaaactataaattggtatattactcatatgtatatatgtatgatatacgatttgcattaaactgctgcctcttaataaatagtatatttttacactttaggccgactcgaaagcgaaagcactccgtcagccagaaagagagttttggtagtactgaaggtactgaaaatcattgaatggtcgttggccaaagccgctaactccgcttaaattacgtgagcgtccatccgtgtttgagccgggcttaatcggagagtttcgtagtgtttaagctgggcttcatcgaggcgacttagtgctgtttgatcagagagtaatgggtgtaaaaaaaagtgagagggcatagatttgggttttgtttacacgccgccgattgcgtggcgtctgcccaacgtcggcgttatttagtcttattttcgcacatttcgcataaattaaggtgccaagactgcagactttggtagccgcctgggctccgggctcttgggccatcgagccaggttcagttaccaatttcgtgtgcagccgttcggtttgaatgcggcatgaatgtggcgtggaaagagtgggcaaacagcgatcgaatggaaatatagtcacagccaagccgaatcccagctctataatgtgtgctcagttgagtggatcagtggtgctgctggtgcagcttcaggtggctgtgcttctggtggcgctattggtgctatccgcaacaacgctcagtgaaagcgccaagctccctgtccgccagtatcccgctggagtggatttcttcgagcatgagttcaccagtgtggcggaaggtgcgttccactcccagtttctcccatgtctttattaatcactaagtccatttttgtttgatttgagttgtgaagccctaaagatcttttctagtttaatctccgaactaaagaatcttttaggaatatcgtattttctcattctgttcagtgaattcgcaatgtgagtgttaaaaggacaatgcaataaccaaaatataacatcacatcgatacgtgggccttaaaatttcaagaaaataccatatggcatattatatattctaaattagttttgaaacccctttcagatgaatacgatccctacggacccgacatcggtgacgatgacctgggaatcgacgatccggagaccatgccccgcttgttccaaggcgacatcgccattgatccgtacacctacatcaccctgcgcctgggcgtcaatccaatgaggcatccaaaacgactgtggcccaatggaacgattcccttcgagataagtccgcggtacgcaaatcaggaaagacaggccattattcaagccgtaaaaaccttcaactccctaacgtgtgtgcactttgtgccgtacgatggggaggtagatgactacctgttgatcgagccgcctttggaaggaccgcaaggatgttggtcctacgtgggccgaagaggaggtgagcaggtggtgtccctccagagacccgacgagaatagtgcccactgcttcagcagcgagggcagaataatgcacgagctgatgcacgccatcggcatataccacgaacagtcacgagcagatcgggacaactttgtcaagatccactgggacaacattgtgccgcggtttaggaaaaacttcaagctggtgtcgaagaagaaggggaagtacgccttcgactacgactacaactccgtgatgcactacggcgagttttacttcagcaagcggaagggtgagaagcccaccatgacccctctacaacctggagttaggatcgggcagcgaaagaccatcagcaagatcgactgcctcaagatcaacgagctgtacggctgcttgcagggccgcagggccaagatgtaccgcagtttctgccaccttctcgggttgtaagtggacgtggacctagactgggatatttgttatgaatcacattgatttgatatttaataaactttaataaaataatgcgtagacccttatacatattcattcttggctgacccacccaccaaactaactaaacatatccattacttgcaggtccgggtatactaggttcaattatgaaaatttaagagatagatagaaatgtgtgggcatgcatacgaattttcttgatcactaaaaggtttgatcttgccacatgcgcaagtgtcatagaaatattttgcttaacttagcagagatagacgtggtttaaagtattgccatctcatatgcacctgtataacactgctagataaagcagtgcctttactgcttgctaatgcggtcacttggtgatcacacttatatatttccataccccaaaggaggataaaattataacatacctgagaacacccgggatctttagtcatctttgcaacatgcttcgtataaaaacgaaattgaatataatctgtttttattgttaacttcactaaaatagttcgtaatgcaattagatatatttatttataaaattattaataagaaacgtattacttaccggtttttcatatttcactttaagaaattgagcaaaatccacttgacacgttctacaatcaaatgcaaattcagtgttcgaaactttgctagaagaaggctgtaacatttattcttgtatttttgaacactcccaaggaaaagtgcggcagggaattttagtactgaagaaggacatatgaactggatgtttgggtggctacgtgttatctgctatttttgtctttatcaattgatttgttaaaaatgtcacacagcaactccaccttttggagagggttctctccgaattttaaaaccgattgaccatggcctttacagtacaattacgatatacgatagttcgtggtaagatatttaaataaagtacagtgaggtagttggtaaatttgtaagagct

SEQ ID NO: 21740 - DNA, 1071 bp, DROSOPHILA
atgcggcatgaatgtggcgtggaaagagtgggcaaacagcgatcgaatggaaatatagtcacagccaagccgaatcccagctctataatgtgtgctcagttgagtggatcagtggtgctgctggtgcagcttcaggtggctgtgcttctggtggcgctattggtgctatccgcaacaacgctcagtgaaagcgccaagctccctgtccgccagtatcccgctggagtggatttcttcgagcatgagttcaccagtgtggcggaagatgaatacgatccctacggacccgacatcggtgacgatgacctgggaatcgacgatccggagaccatgccccgcttgttccaaggcgacatcgccattgatccgtacacctacatcaccctgcgcctgggcgtcaatccaatgaggcatccaaaacgactgtggcccaatggaacgattcccttcgagataagtccgcggtacgcaaatcaggaaagacaggccattattcaagccgtaaaaaccttcaactccctaacgtgtgtgcactttgtgccgtacgatggggaggtagatgactacctgttgatcgagccgcctttggaaggaccgcaaggatgttggtcctacgtgggccgaagaggaggtgagcaggtggtgtccctccagagacccgacgagaatagtgcccactgcttcagcagcgagggcagaataatgcacgagctgatgcacgccatcggcatataccacgaacagtcacgagcagatcgggacaactttgtcaagatccactgggacaacattgtgccgcggtttaggaaaaacttcaagctggtgtcgaagaagaaggggaagtacgccttcgactacgactacaactccgtgatgcactacggcgagttttacttcagcaagcggaagggtgagaagcccaccatgacccctctacaacctggagttaggatcgggcagcgaaagaccatcagcaagatcgactgcctcaagatcaacgagctgtacggctgcttgcagggccgcagggccaagatgtaccgcagtttctgccaccttctcgggttgtaa

SEQ ID NO: 21741 - protein, 356 aa, DROSOPHILA
MRHECGVERVGKQRSNGNIVTAKPNPSSIMCAQLSGSVVLLVQLQVAVLLVALLVLSATTLSESAKLPVRQYPAGVDFFEHEFTSVAEDEYDPYGPDIGDDDLGIDDPETMPRLFQGDIAIDPYTYITLRLGVNPMRHPKRLWPNGTIPFEISPRYANQERQAIIQAVKTFNSLTCVHFVPYDGEVDDYLLIEPPLEGPQGCWSYVGRRGGEQVVSLQRPDENSAHCFSSEGRIMHELMHAIGIYHEQSRADRDNFVKIHWDNIVPRFRKNFKLVSKKKGKYAFDYDYNSVMHYGEFYFSKRKGEKPTMTPLQPGVRIGQRKTISKIDCLKINELYGCLQGRRAKMYRSFCHLLGL

SEQ ID NO: 21742 - DNA, 5675 bp, DROSOPHILA
cgcatctctacgacgcccagccgcgactcagacacggaaatgtccaccaacggcctcacgaagctcatatcgtacttgtgtccgaagtgcggcaaggaaatcgcctcgatggacggttggcgggcacacgtattcaagaagcacgacttcgagcacataatcgagaacagttttaagatcctggagtccgggcgcaaggccatgtgcctgcagtgccgtgaggtgcaaccaacgaccgtgcgctcacaactgcagaagcactgcttcaagcatctgccctaccggtcgtacctcaagtgcacactctgcgatcgcaccaagaccagcacctcaaagatcctcaatcacattcgctacaaccaccaggaggagctgcagcgtaaaaacaagacgcagctgcttattaagccggagcccatgtgggccagtcccaacaagtccggtcaagcggccatggcggatgacgccggatccgaggacgatcagggcgagcaagctgtgtgcgagcactgtgacagagtctttaggagcaaatggcgctacgaacgacacattgcctcttgcaggagatctggagctggcaagtcagtcgaagggaccgttgaagccttgttgaaccatctgcgagaagggcacatgcgaatgaacgccatctggaagacgatgcaacgtgaaaagccttaggtatagtctagttaaagttaagtcggtccatcgttttgcaaatatcatcaagtgtaaaatatacgtaagttttcaaatccttgtgcaaatattgtgctaggaaaagatcataattaacacatacgacttacatgcctatgaaacatgtatcaatctgcatttaagttgttatatgttaactatatagcgtatacaactaaataatatatagatattttaaatccatttctcataaatatgtttttcaagaagtacatttatattttttttttttttgctgtgaattataggacaggatcgataaaggcatttaaattcatgggcacgacctttgacagtgtctcaaggagcagtagcgattctggttgccgccacatccgaggtacttcatcttgaggcacttcctggttctctggttatagtaccacatttcgtccatggcagttctccggcaatgccttcccccaaatccttcgttcttgccgccttcgcaactcagacgacctgtgtgaaagtgtagatcagctataaaagtacacttactaaatgctgttattaaacatacccctaggacgaccatcgcagcgattctggccacatgcgagagatacgtagagcacaacgcaagctagaaccaaaagtaacttcattttcaacggattgctctttggagggtcgacttgatatgactgatctgtaaaacgatggacttatataggggcggctgccaacatttttcccagttccctagaacgagtaaaaaacatcttgacaatcgactctattgttaaatgttttgaggctatcagataatagtataaaaaaggggcttaaattaaactttttaaaggcataagatgtgggatgaaccattcaaaaacgttgctggaatgaaaatgtattttccacttttaacttaaaaaaaaaagctgcaagatcgatctttcgctcaatcctattgatttcgtatcagggcaaaaacacttgtgctgaatgtaaatatgatttaaccagaattatatttacccaattaattaacattcttttcgttagtcactttgtattactaatacgaggaatacttttctgactaattcattttataaatcagattaaggattaaatttaacatgacgattatttattatgtttaatttaaaacatttcactttaaagcaattgttattcagttaggtaagcttcaaggcatagctatccattgcggagcccaaaagccacttggcttacgactgcgcatgtggctacctatcgagcgtctcattattgctctgcgtctggagaaagccctttccatggttctaatagttgcgtcgccttctgcgccttcctgttgcacgcggtcatcatccacctcgtgattgctggatatgaccacgatcttccggcgaccatggaacatctcagcccgctttatcagcgccaggaagcgggcgaacttcttctccagcgcagccctgtccagaggctttggcatgggttccagtagcccttcggcatgagcttcttcccctcctggcgattcggaagcgggtgtccctccagctgttggtgcaggagtggagccttctccctccaccggggtgactcctggagtggctcctggcgctgctccgtcgactgctggagtggctgcagcttctccaggtgcagctgctcctccttcggcggcaggcgctgctgctgctccatcggctgctggtgctggtgccccaccttcagctggcggcgttccatcagcgttttcgccgttgagcatgacgaagtcccgttttccaagagttctagttttaatttcgggactggacgcgtttcctgctttcggcgtaaccttctcgtagacctcggactcggcgcagagatgtgcatatttcgggttcgctccggtcttgcaggactccgccgcctttttcccgggctcgtagacgggcgagcccacaaccggggcgtggccatagttgcacgcgaaaaacgtctgaatccagccatgccgggactgctgaacgatggcacagcccacggattcagcgttctccagcacgatctgtaaaaagttgtacttcggcgacctgatagatgggaacacaagttgaagttgattaattccgttttttcatatagtaataaatcatgaaacccacatttattttatgtattgaatgttcttagatgtagcctggaaatttacaagcgaatctttatataaaatatttaattttcggaccaacaaataattaaaactttctaaagataagttcatggggttgagttcttctattaaagcttataaaaaacaatcgttatggatatggattatggaataagctaagataaataaactaaggtaagtcccctcttaattaattgcaatcaatatcatctgcaagagtcatccggcagaatgcaatccctcgccagagaagagagcccaatggaatccacatgcaatcgttttattcttgagaagatcgcgaagcgtacggccgcatataacataagaagaatttcataacggagtgttgttaaaagaaactatatcatatcaaatattaatatcaataaaaaaaatgtgagtgaaatcaacatcaagactaaattactataattttccagcgggtggtcatgaaaataaatggattcctctcctttaaaagttcatgtaaaattgtcaaaaggcatttgtcgcacactcgcgtccattattttgcaagccctaatattattttagaaacaaaaaaaaatatttatattatcaacatttatgttgtcaaaatataatcaattggtgtttatagtaattttgaaaaatttaatttttaatttaagaagaaaagtgacagaattataacattcagatactttgtctcctaataacaacaggtacaatttttcggtctttttataaatttagataagatttagaaaggattacaaaatattaaaaaataaataataatcatttcaggttgaaatatttaccaaatcccgtaaggacgcccgagtaaacaaccctatatattccttaagtggtactcactgagattcctgctcgacatacttcatgatgttcaccatcgaagttctggatttttcccgcaaccacacccctatgatatccctaaggatatcctccaactctggcaattttcctttaatgcctcgatacccaaccgtctggccagcgttttgcgtgaacttcgtgttccggcactcgtcgtgcctcaggacacaatccctcacattgaattcagctaggtaggccagttccgggttccacttcaaggtgcccatccgactggcaggactcagtccgttgaaccctcctttggccacgctatccctcaactcattaaatcgccttaataggaatctttccacctttgggcttatcactatgagctcagcgtccagagagcacttgtcgtgcagttcctgaagatattattggtaacaagttaggatagtaacgcattttggaaacaaaaataacccagaacttttagtatgacattttgtaacgaaggtatacctctcaaaagccaatcaattcgaaattaatattcgtcactaatcaattttatcaacaaattttatgacattgaaaatttgaaaaagtcctaaattaatttatatttggctttctttcaaccatttataccttatatagtgtatgcgaacaaaaaatgttgttttgttaatttgaattagttggttgttatcacgtggcacacattttagtttagtaacttacgattgatgcgttgcaagccacatgtttgagttctttgtggcacaaggagggatcgcagtagtccggtagttccgttgaggagctgtttcctggctcctcttgaccttgcgaacctccaggagatgggtgaccagcttcggtgaccgctggacttggtgtcgtagtggctgccgtttgaatggtcaaacaactggcaatcagaaaaacgacaagggccaacatttttcatccagagaccgtggcgtattaacgttagtttttcaaaacgtagatcaaacggttcggactgtgaaatcacaatttgcaaagatcaaatgatacagcaaaaccaatggtagaatttttagcagattaaacattatattgatagtttggttcgtctcataaaaagccggaacaaattattgggcaaagttttttaaagcttaattttggatttccaaaaaaaaaaaattgaaatcttaaaagttcacgttattctacttaataatattaacgttttgagattatcattcgtgccgaaaatttactaaagtaatttttctgcaaagaacccccctagttttttatgaatactagagctgggaattcatcgatattattcacaaaacgtacgctagcttatcatgaacatatattgcatactaatagtattgcttgttttctaaatattagctttaaagaagttttggaattgcttgtgattttaatcgattgttatccattattgatagcacagttaaaccaacaacagggagtgcttatttacttgttgctgtttgacaacagctgtttcttgttttgatttgaacatacaaacatatataaacatatatgtttatatagaatctatagatgttaattaaccggagcaaaacaagagtgaggtaaacttaaattctttatttgaactgatgggcaaggacagtcgaaccagttaaggattatataaaaagtggttatatatctagatggtaatcatcgtgtatttcgctggtatggtatggatattaagagacgcactcttgggagagcgaaagtaaataaaccggtcgctgatagcatttaagttgggctccactccactcccacccttctgcctacgtggactgctctttcgatggccagttgattggcaactgccgttttgcttgcacttgcctcctccgctggctgctaatcgtgagccattagtttatcgctccttatagctagaagtaga

SEQ ID NO: 21743 - DNA, 1644 bp, DROSOPHILA
atgttggcccttgtcgtttttctgattgccagttgtttgaccattcaaacggcagccactacgacaccaagtccagcggtcaccgaagctggtcacccatctcctggaggttcgcaaggtcaagaggagccaggaaacagctcctcaacggaactaccggactactgcgatccctccttgtgccacaaagaactcaaacatgtggcttgcaacgcatcaatcgaactgcacgacaagtgctctctggacgctgagctcatagtgataagcccaaaggtggaaagattcctattaaggcgatttaatgagttgagggatagcgtggccaaaggagggttcaacggactgagtcctgccagtcggatgggcaccttgaagtggaacccggaactggcctacctagctgaattcaatgtgagggattgtgtcctgaggcacgacgagtgccggaacacgaagttcacgcaaaacgctggccagacggttgggtatcgaggcattaaaggaaaattgccagagttggaggatatccttagggatatcataggggtgtggttgcgggaaaaatccagaacttcgatggtgaacatcatgaagtatgtcgagcaggaatctcagtcgccgaagtacaactttttacagatcgtgctggagaacgctgaatccgtgggctgtgccatcgttcagcagtcccggcatggctggattcagacgtttttcgcgtgcaactatggccacgccccggttgtgggctcgcccgtctacgagcccgggaaaaaggcggcggagtcctgcaagaccggagcgaacccgaaatatgcacatctctgcgccgagtccgaggtctacgagaaggttacgccgaaagcaggaaacgcgtccagtcccgaaattaaaactagaactcttggaaaacgggacttcgtcatgctcaacggcgaaaacgctgatggaacgccgccagctgaaggtggggcaccagcaccagcagccgatggagcagcagcagcgcctgccgccgaaggaggagcagctgcacctggagaagctgcagccactccagcagtcgacggagcagcgccaggagccactccaggagtcaccccggtggagggagaaggctccactcctgcaccaacagctggagggacacccgcttccgaatcgccaggaggggaagaagctcatgccgaagggctactggaacccatgccaaagcctctggacagggctgcgctggagaagaagttcgcccgcttcctggcgctgataaagcgggctgagatgttccatggtcgccggaagatcgtggtcatatccagcaatcacgaggtggatgatgaccgcgtgcaacaggaaggcgcagaaggcgacgcaactattagaaccatggaaagggctttctccagacgcagagcaataatgagacgctcgataggtagccacatgcgcagtcgtcgtctgagttgcgaaggcggcaagaacgaaggatttgggggaaggcattgccggagaactgccatggacgaaatgtggtactataaccagagaaccaggaagtgcctcaagatgaagtacctcggatgtggcggcaaccagaatcgctactgctccttgagacactgtcaaaggtcgtgcccatga

SEQ ID NO: 21744 - protein, 547 aa, DROSOPHILA
MLALVVFLIASCLTIQTAATTTPSPAVTEAGHPSPGGSQGQEEPGNSSSTELPDYCDPSLCHKELKHVACNASIELHDKCSLDAELIVISPKVERFLLRRFNELRDSVAKGGFNGLSPASRMGTLKWNPELAYLAEFNVRDCVLRHDECRNTKFTQNAGQTVGYRGIKGKLPELEDILRDIIGVWLREKSRTSMVNIMKYVEQESQSPKYNFLQIVLENAESVGCAIVQQSRHGWIQTFFACNYGHAPVVGSPVYEPGKKAAESCKTGANPKYAHLCAESEVYEKVTPKAGNASSPEIKTRTLGKRDFVMLNGENADGTPPAEGGAPAPAADGAAAAPAAEGGAAAPGEAAATPAVDGAAPGATPGVTPVEGEGSTPAPTAGGTPASESPGGEEAHAEGLLEPMPKPLDRAALEKKFARFLALIKRAEMFHGRRKIVVISSNHEVDDDRVQQEGAEGDATIRTMERAFSRRRAIMRRSIGSHMRSRRLSCEGGKNEGFGGRHCRRTAMDEMWYYNQRTRKCLKMKYLGCGGNQNRYCSLRHCQRSCP

SEQ ID NO: 21745 - DNA, 3011 bp, DROSOPHILA
tcttgaagttaaaggccacactcacccaaccagcgttgcagccctggtttggatagggaaagcagtccaccaagtgcttgggcgaaaggtcaccaactttccgtacttcttcgccagatgcgcctcaagaacacccgaggtggagaaggcccaggagctcaggcactcggtgccctggttccccactggcgatatatagctggttcaagcccatcctgaatcccgatctgccctgggaatagagtccgttgtgattggcaaccgcctgcactctcttttcgagtattcgccggtggtatcggtcctctaggccgtaacgcttcttgtatctggccttgtaccgcgcccactccacatcgctcaccgaggtcagtccgaactccacgaagagcagattgaaaagtacttgaagtaccagcaaccgaagggagatcatgcccaatgcagacttacaactgattggcagcttgaaaagcacgagatatggagctggacggatggtttttccatcttaactgcttataatttaaatcgatggaatcgactatccgctaccctttacttaactattgcgtgattcttgattagttcatatgagtatatttatattataaagttttttttgatggtctgatacttttaaaataatatattaaacaaattcattttgattacaatgtttgaaaatgtattttatatagataaattttcagtaagtaaacttagcaagcattatagctaatataattatagctattagaagtaacttacaaccagcctataaccagaaaccatataaataaataatataattttatacataagcaaaatattgcattttaatcgtaatcttttccaatttcccaaaaccaataagcagttcacataaataaccccagataatgcattcgcagccgccaggcaaacataaagctcttgatttctagtttttccagctcaaaatcatttacaaatctactttaaacgcgatcagttcgcaatgggcacgcctcgtctgaccgtagtacacggtctaatccttctgctccttgtggagctaggtttgactgcggtcagcgatacggagtgggaccagtacaaggctaagtacaacaagcagtacaggaacagggacaaataccaccgggcgctatacgaacagagggtcctggcggtggaaagccacaaccagctctatttgcagggaaaggttgcattcaagatgggactaaacaagttctccgacacagatcagagaatcctcttcaattatcgctcgtcgatcccagcgccgctggagacgagtaccaatgcacttacggagactgtaaactacaagaggtacgaccagatcaccgaaggaatcgactggcggcagtacggctatatatcgccagtgggagaccagggcaccgagtgcctgagctgctgggccttctccacctcgggtgttcttgaggcacatatggcgaagaagtatggaaatctggttcccctttcacccaagcacttggtggactgtgttccctatccgaataacggctgcagcggtggttgggtgagcgtggcctttaactacaccagggaccatggcatcgccacaaaggaatcctatccgtacgagcctgtatcaggagaatgcctgtggaaaagcgacagaagtgcaggcacattgtcgggctacgtcactctcggcaactacgatgaacgggaactggcggaggtggtctacaacattggacccgtggcggtgtccattgaccatctccacgaggaattcgatcagtactccggtggagtcctcagtattccggcgtgcagatctaagagacaggaccttacacactccgttcttttagtcggctttggaacccatcggaagtggggagactactggataataaagaactcctatggaaccgattggggagaaagtggctacttaaagctagctcggaacgccaacaacatgtgtggagtggcatcacttccccaatatcccactttttgaataaaatcgtagagaaatatgatgtcagtaggatcatatctcccagttgaaataaacgtattttatatcgcttttgcattaatgtttattcacattagctaaaattgtagattacataatcataagggtttctcggaagggtcagcacgtcaaatgcgcttactgagaagcatttctaccaagaaagcccagagtttaaggactctgtcagagcaacttgcctcttagatgaaaacgaaagtttaacaaaacgaaagcttgcttcgccaagccgaagctttatttaccctttcgactacttattaaaataattctgtataccgtacaaataaccgaataaaaacaaagtatcattctattatcttcaattaactttgaaattatttgttgtcaaaaaactaaaatgaattatatataatgaaagtacttttttgtcataatattccgatgtacatgtccgatatacttattatatacatacttcctgcagtagaaacaacactttgattgacttatccagataacttaacaacttcatgactagcttgcttagatacggacggacgaataaaaggagagacctggctaaatcgtcttggctgtttatacttatccaaaatatatatatgtactttatatgatcgcaaacgtttcccttccccgttgcaagcttctgacggaaatcaatataccccctcctacaatggtatattaatgggtgagtgttctattgaaaatcgaactgaattcttatcgcaaattaatggcattgcacttgcagttcctcgaagtcaatgtagataagccctctgaacataattaaatggaatatgtgtctattttatataagtgtgttttgtttgtattatataggtaggtattattatgctttgaactggatggattatagcgaaggtatgagaatgaaaaggaacattccataatgtgttggcaggcctgttttataaccaaactgtagggaagtaaagctttgatgtaa

SEQ ID NO: 21746 - DNA, 1011 bp, DROSOPHILA
atgggcacgcctcgtctgaccgtagtacacggtctaatccttctgctccttgtggagctaggtttgactgcggtcagcgatacggagtgggaccagtacaaggctaagtacaacaagcagtacaggaacagggacaaataccaccgggcgctatacgaacagagggtcctggcggtggaaagccacaaccagctctatttgcagggaaaggttgcattcaagatgggactaaacaagttctccgacacagatcagagaatcctcttcaattatcgctcgtcgatcccagcgccgctggagacgagtaccaatgcacttacggagactgtaaactacaagaggtacgaccagatcaccgaaggaatcgactggcggcagtacggctatatatcgccagtgggagaccagggcaccgagtgcctgagctgctgggccttctccacctcgggtgttcttgaggcacatatggcgaagaagtatggaaatctggttcccctttcacccaagcacttggtggactgtgttccctatccgaataacggctgcagcggtggttgggtgagcgtggcctttaactacaccagggaccatggcatcgccacaaaggaatcctatccgtacgagcctgtatcaggagaatgcctgtggaaaagcgacagaagtgcaggcacattgtcgggctacgtcactctcggcaactacgatgaacgggaactggcggaggtggtctacaacattggacccgtggcggtgtccattgaccatctccacgaggaattcgatcagtactccggtggagtcctcagtattccggcgtgcagatctaagagacaggaccttacacactccgttcttttagtcggctttggaacccatcggaagtggggagactactggataataaagaactcctatggaaccgattggggagaaagtggctacttaaagctagctcggaacgccaacaacatgtgtggagtggcatcacttccccaatatcccactttttga

SEQ ID NO: 21747 - protein, 336 aa, DROSOPHILA
MGTPRLTVVHGLILLLLVELGLTAVSDTEWDQYKAKYNKQYRNRDKYHRALYEQRVLAVESHNQLYLQGKVAFKMGLNKFSDTDQRILFNYRSSIPAPLETSTNALTETVNYKRYDQITEGIDWRQYGYISPVGDQGTECLSCWAFSTSGVLEAHMAKKYGNLVPLSPKHLVDCVPYPNNGCSGGWVSVAFNYTRDHGIATKESYPYEPVSGECLWKSDRSAGTLSGYVTLGNYDERELAEVVYNIGPVAVSIDHLHEEFDQYSGGVLSIPACRSKRQDLTHSVLLVGFGTHRKWGDYWIIKNSYGTDWGESGYLKLARNANNMCGVASLPQYPTF

SEQ ID NO: 21748 - DNA, 9885 bp, DROSOPHILA
gcataattcgatttgcattgccggccatcggttgaccatcgcattaggaaatcaagctaatggagctgattaattttaagctatgagttttgtttgcaacagccaacggcggcgtatactcgatttttattaaaaattgtatatttggtgaacagaacattttagtaccatttaaatgaatttcaaatcaactcatttttgatcagtttccgttactataatggagataatttctatcttacttaataacaaataacaacaaggaaaatcgtacaggttaagttatccattccattccaacctatatgcttcttataatttattggaagcagatgcagcattgtcgtctggaaaacaattagatattgataaataactatgtattattagtaaggtgaagttcagccatgaatatataacgatataacttttggattgctagatgccgtgccctagccgtgattagttgcagatacaaattgaatgctagttgcgcactcacacaatcacacatatactcgcgcacacactgtgctgttaactttttcaggcaaaaattccatttgcaacccccaccttaaaaaagtacataaaaaatatgaaagaaaagaaaaaaatgcaaagcgcaggcagccggagtttgaagtaaaaaaagatcaattgacaaatggtttgcgccacaaaacaatagacgtcgacgtcgactgcgactgcggctgctctgccagcgcaggcagcgctgcataccaaacaggtaagctgaggtaaataaaggtaagctaggtgggaaaggccagagagagtgaaggagagaggtacgccacgcagcaagcgaaaagctggctgctacgaataccgttgcaatgccgctgcccgcggcgacgcagaagccgacgtaagcgccgctgcgccaacgacggcagcgacgttaacgtgtggattgttcgcgacgttgcgcatgcgcagcggtataaaaagctaccgctcgacgaaaaccacacacatttcaagtcgcggtgccagtggagcgcagtcagttcagagtttttgagcttgaatttcagtctcagttttttcaagtgcggttccgtcggtcccgatcccaactaaaatacaaataactacactcgcaaaatgaagaagtttctcgtggtgtttgtggcattattcggagccggtatgtatctttagctagctaagtgaaatgaagaaaaaagaaagaggagcggccagtggaaaatgcttttccgcttgcgcaacataaaggacacttgagtgctgaatatcagtgtgcaaaaatcgagagtgtgcttgtgcaacgacgggtaaatcaactatcactgctccacttttaccagcgatcgaagctgaaactgaagctgaatccaaatcgagatcgaaaagcgaaaagccaaatgctaaaaagaaacgaaacgaaacgaaaagcgaagccaatcagagggaaatgccattgagcaagtcccaacccaggcttagttttccacgcagatatacagtttcgattgcgatgcagggtatctgtatctgtatcggtgtatctatgcatctttgcattcgattcgattcggttcgattacattacctcatcggaaagccttaaaagctgggagaggttacaacagcgacgatcgtctggctccgctgcacctcgattgcgaaattggtattggtaaggtaatcgataccaagattcgagctgcattagataaccagccagtgcgcagcctcggatttccaactccaatttcgactatgccaaaaggtgtggtcaagtcggaatacgccaattctgacattgacattgaaaagcactttagactgacaaccgcctcctcaaagatgagatacaactgggctaggctggggaattttagctacgcaactatgtagccactccccgaaagccaaatccaaacccgttcgttttttggttattcaacctcaaaatgcttgcgaattgcgtgccatgcattttttctgccaagtcgtgtatggccgtaaaaagcatttcgctactcaatttaattaccagcaatttccaagttattaaacttaacaacaggccgaaatatacgatatacctcatatacctcaggccattttgatgaggagccgccgagcactgccaagttcaagttagcattaattatgcaatggcactcgtcagttcactcaagtctacttgaatgtctgactttaaggcccgacttacctttaagtggtcgaaaatgttacaactaggccgctaatcgcgacgataaacaatttaagggggtcgggaagggatgggggggcaaagatttccaaaaaacgagagcgcgcacaataaatttccgcattcgactcttgattatttttcccttcttgcggttcggtatcaaaatctaacaccaaccgcagctggaaaaaaatgtggccaaagacaaacaaaataaattgtgccattttgtttttttgttcttttatttttgcttttttgctattgccacacaggcagcggcagcaagtcacgcctgaaaggtttttattttgtggcaacaaaatcaaatgaaaagggccgacatgcaactgggcgtgccgaattctataggttgcattaggccaggccagccagcacacgcgctcggctatctatgctgatttatggccaacagcggggaggcccaaaatacaacgcttttaaaactcaatttgcatgccacttttgcccgggacagtcgtgccctgaaaatcaatttttctcaaagcgccagcgtcgatgcgttaaattcgaaataaagtcaaacgtattcagcggtaaatacacaaaaaccggctaagtcttcttgggccaacatatttattgcccgatatatgacaagtatcagcaattggtgatttctagtgacatagacaagtcggaaaacatagttatgctgcaacaaaatttgacttatattgatcgcgcttacaaggtttcgtaagctgtgcttcgtcactacgtcgactccctgccacactgttgtaaaatataacataacaaatattagatatttcaacggtaaatagttttcatatatcttgtgtttcaaatctcgtaaacatcatcgaatcggttgagtatttttttttgtttgcgcactttccgggcaacacaacaaaagcgactatcaagtaatagacaaacaatagaccgaacaatccaaatacagattaacccacattcggacacccggcccacaacaatgtgggcaaatatttaaatatcattacgatgttgtcagcgcagcgtatgcaaaaacagtttttggaagacggcaacatttagcggaaatgctcgagtgccgttgttgccgggcaaatgtaaatacctagcgggccaaaggctccccagcgaaacgtgcttaaatgtcagcaattttcttgatttatacggcggcgatgtcttgccagacaagaagacaaacagcgataaaaataacaccacgccaggcggagttgcaaacagcccggcaaatgatagatacacacttgtgccgccgagtgcctccaaaaggggcaacctgcgactctgactgggattgtggctgcaactgtaggagcaggagcaggagctggccgcgattatgggtccgggtccttcataatgcctttaaatttgcctgctggtatgcgaaatgctagtgggccgggcggggccgccttccgatcggggttcattgctctgatactggtatttatgggctgacaactgagttggccggcatgcgatgggaatttgtcatcatttgccacgttaggagtatcttcccggcagggcgacctaagatatgtagcttgagattgcggattgaagataaaaagcatcgaatgcgaatcgatacgttagggtcatgaattattgaaaagcacgggcatttggctatttcgctaacgcactcatttgataatttcaaattatgaattcatttacatctagacagtctgtcatttgagcaacacataaattaatttcatttaatcgagctctgcggagtttgtaatttgtgccagagctgtgtacatttttggttaattaaatgattatgttactggacgaccggacgtacgaatgataaacagcgaccggggtcagccaatgccaatggtgtgcaatcaaccaataagaccaacacaaatgtcggtttaactgttaaattgtcaataaaaatgtattatttaaatgcacataaacagccccacatagacacccatccgcattgtttgcgccaaagaagcaaaaaatgtaattaagctctccgcactgatagataaaccaattatggccaaacagtaaattaaatggcctgccacaccaggcaatcagtctaactagcttataaataattcgctggctcacgtggattgcagtgcagattgtgccatgtatgtatgtacgtatgtacatatgtactcctatgcagtactcgcacactcaaattgcattggcatgccggtcaaactatttattttcaaggtgcgccgggcagcaccgccgagaacaaaagacacccgatgggccagactttcagagtgggttagtagtcggtctagaatctggccgaaccggttcccaacgagaatgtgggctagctgggctcttggctttcgttttcgttcgacttgcggtctgctcgaggctaatttagccgttatgtcatgtcaacagaatctcaactcttgttagataatggaaaagtagcgcgtgatatgtttagatgctatcggtttcagctgaatttgaacagagtgctacgtatttactttaaacttcacttaaaattttagttattgctaatagcttttaagaaaataaaatgaattctctagaaaacaatacgatgatcaaaacaacccgtttctggaaatctttaaatacaaagtggtgataaacacaggagccagataaggcacttataaatgttgttaggagggagttttaatttaaaaaataaaaacatcaagtccttattatagttccttgcctgcttgctgccacattaggcttggcaaaatattgcgcatacgcactgtgcaccaggtgtctcagtaattgcctagaaaacatgtggccagaagcgcacacagctataagtgcacaatcatcatgtgtacaaagacattaggagtgcggtccattcctgtggccgctgcagaaagcaactggccggattgcactctttccgcacagttgcaggtgaaacaaagttgtttcgcagatggaatggcgaatgttgcagctgcctggataagtgctcgccaatggctgtcctcgaaccatgaaatgcccggctaattgatgtcgcagactaatacgaaagactcgaagaacggggctaataaattggaattccttgaatttaaaaatataacaaacccgagtgttgcgatattaaattcaaatttaaattgtgtctgcgaacaaactgcgtaattaacaaaattacaataaacaaatgcgaagcgcaaaacgtagaccgagtaaacaatcaatgttttttgcgactccgagttggctaaatgactgcctaagccaaccatttatgtacgtatatggcaatacagcatttattcgcttaaaataaatacgcagcgaaaataacagttttaattaaagtccgcaaataattttgtgggagccgcagttttgatttattcgaggttgttcatgagccccggaatctgcgcaaatgtaaaatttgatatttgattagtttacacacaaaatgaaaattgcatgttgtttatgcagaccagcgaaccagttgatttttctatgtttttattcaattgttgcattcatgtggttacccaggcgctttgcacctgcttttatggcgcccaacgagggtcccttttggcgccccacgtggggcctgaccatggacttagcccacggcttaggcaattgatgcgcacttttgattgaacattgcacattggaaatgaaacgtgaccgcaactctgcggctttgcaattagattatcacagacacacatacacataaacgggacaccagcgggcgaatttcttttcaatgccagactatacgtgggtaattattttttgactgctgccatttgattttccatcccagatatatagaaaatgcgggaaataccgcattagttaaatgtacaaatgcaatttagttcgttacgccctgcggttgcattgagctcagcttccacaaaaacagacgaggccgccgcatgaagaggaaaggggaataagtccttggtggcgcatttcaggtgcttcaactccctgtcacagggttcgctgtaattccatacccaaaaacgagggagagtaaagcatcgcacgaaacaaaagtaaatgcagttggccctgagctgtcagcgatctgtgtgtctgcgactgctgaaagttgccttcgagatttattggcaaccgtcgtctctctgtcaggcatcagactttttaaagtgaatgccttttgggccacatgacgaacggtcgtgcccaacgtcatcatcgtcgagttcgtcttgccgtcataatgataattaccatcttggatacgtgtgtatctgcatctgcatggcttgagattccttaattcgtcgacgactttccttcgaatggctttttgtacgttacacatttacacattttctggacaacaatgaaaatggaattgtacaaataaagagttaccattccctacacctatgtatactataattgccacaattattgaaacaagggcacttctcacgttttattttacgctacttaattgtagtggattctaagttttagccagtttcttatttcttgattttcattgcatcttttacagctgtggcccaaagtagctttaagtgtcccgatgactttggattctatccacatgacacgtcctgcgacaagtactggaagtgcgacaacggcgtttccgagctgaagacctgtggaaacggtctggctttcgatgccacagactccaagtacctaaccgaaaactgcgactatctacacaacgtggattgcggcgatcgcacagagctgggtaagtttaaagtaaattagggaataaactaaggtaaacagctcaatgaacgctaaattttaataacaaattcttaccatacacattactcatgaaatgttatattcccattgaacagagcccccaattaccaccccccactgctctcgcctgtacggcatcttccccgatgagaacaagtgcgacgtgttctggaactgctggaacggcgagccctccagataccagtgctcccccggattggcttacgatcgcgatgctcgcgtgtgcatgtgggctgaccaggtgcctgagtgcaagaacgaaggtgggttcaacaatccaactagtgctaagagacaaataactaactatgactatcccctcattgcagaggtggccaacggattctcttgcccggcggctggtgagctggccaacgccggatccttctcgcgccacgcccatcccgaggactgccgcaagtactacatctgcctggagggtgtggcacgcgagtacggatgccccatcggcacagtgttcaagattggcgacagtgatggcactggcaactgcgaggatcccgaggatgttcccgggtggtaagtttaaatctttattttcaatatctccctaggccggcactgttttgatgtgtcttgctttgcacttcgaacgccaaaataaaaaaggttaagaggtcatcttgcttctatttggggatactagggatattcgcctggagacaaaagcttcaaaacagtaggaaatcttaccaatacttttcaatgcaaatatgcttacttcgatataatctcatcgcaatcaaatcaaaagattcaaaaaaggttccaatataataaatatgcaaaaagttgctgtaaagcttcaattataaatatataatccctcttaaggtgcagaccccttcaaatatccttggatatgacctttcgatgtccagcattctgaatcaagtttgaggttttctggcacgcttacatcactaagcacctatccccacaccacataaaagtcttaactttcactatccactgtctatactcaacacatatcacaaccacgtctcacttatccatatctctggcctattcttacatatctctttaccttggtcccatttactattacagtgaggactactacggcgatctggatttgaagagcatccgcaagagcgaacttctagctggactgaacagtgaaggtcgcactaagggcgcgccaaaaaccaaagctgcctcctcctcctcataaacataacatctacaacaagaacctacaactttaacaacaataactaaacaacaacagcaactataactacaaaacaatacaacaagatcaatcaactcagataccccgttcccattctgccaaaaatcccccacatcacaaatcagattagaatcaaaagatagaacctcaaaccgaaattcgtaccacatcaagaactattttcctgccattttcgaacttctcagttgactcctgtactgtgcttctaatttatgaatctataaatctctctcgtttcgtctgagtcaaacattgctgtctcttcatgtttccgttttcaacaagtataaaacacatcgaaattgccacgcaaattcaggctcgaagaactaacacaaaattttgtaaacaaaatatagagaacatcgaggaatgaaagaaatcgttcaatatgaagcgtaaaatttagagatttgtacatttaagtgatccttgtttataagattataattttattttatacataaaaacgaaaaacaacaaaaatatataaagaaaaaaacaatacaattctaatttttctctcactttctctcctatttgaaagcctttaaacacattaaagtgcattcaagattccagagaaaacaatgataggtaggttagcttttgttttccacacacgcattaggggaagaaatgataaacagcgtacttaaatattttttaacaccaattattcaatattatcaaatcagcttccttgcccactttttgtggagtctaagttatactagtttaatgatggactcttaattttttataagaatttttggcatattcttataaaaaatgtttaactgagaagtaagtatcgtgtgtttagtagtaggaaacttgacaaattcgattttttttcttcgctgtcgttagagtctgtaaataataagtaaacataaaactttgccagtcatatttgcggcaaatgggaagttgtctggcatttcgaggcggccaggaagtctttgccttcgtcgccgttgacgtcttttcaaatgcacaagaactttgttaattattcattagattctataaacaaaaacgcgatacaaaaactttaaatgaattttcaaattatcaacacaattgcaggcagaaccagccatacacacagccttacaagaagcgaagggaaatggaaaatgggagcggggacagggaaaccgtgggcagtggcacctcgataaaggtcctggaggggcctggaatcgggtagggcttcctttcgcccccactcacaaaaactcacaaaagctggtaactttaacttttgcctctgtgtgtgaatgtctctcgctgtatgggtgaacctgggcttgtgtgcatttatggcgcactggaaaaaagttttaaaactaattaaataaaaattataaaactatacaaactcgaggcacaagttgtcgcaaaagggcatttcctgctctcttctgtctgtatgcgtgtgctcgtgtatgtggccgagctgtgtgtgtgtcgcataagctctttttggcatagaaaagcc

SEQ ID NO: 21749 - DNA, 1460 bp, DROSOPHILA
cacatttcaagtcgcggtgccagtggagcgcagtcagttcagagtttttgagcttgaatttcagtctcagttttttcaagtgcggttccgtcggtcccgatcccaactaaaatacaaataactacactcgcaaaatgaagaagtttctcgtggtgtttgtggcattattcggagccgctgtggcccaaagtagctttaagtgtcccgatgactttggattctatccacatgacacgtcctgcgacaagtactggaagtgcgacaacggcgtttccgagctgaagacctgtggaaacggtctggctttcgatgccacagactccaagtacctaaccgaaaactgcgactatctacacaacgtggattgcggcgatcgcacagagctggagcccccaattaccaccccccactgctctcgcctgtacggcatcttccccgatgagaacaagtgcgacgtgttctggaactgctggaacggcgagccctccagataccagtgctcccccggattggcttacgatcgcgatgctcgcgtgtgcatgtgggctgaccaggtgcctgagtgcaagaacgaagaggtggccaacggattctcttgcccggcggctggtgagctggccaacgccggatccttctcgcgccacgcccatcccgaggactgccgcaagtactacatctgcctggagggtgtggcacgcgagtacggatgccccatcggcacagtgttcaagattggcgacagtgatggcactggcaactgcgaggatcccgaggatgttcccgggtgtgaggactactacggcgatctggatttgaagagcatccgcaagagcgaacttctagctggactgaacagtgaaggtcgcactaagggcgcgccaaaaaccaaagctgcctcctcctcctcataaacataacatctacaacaagaacctacaactttaacaacaataactaaacaacaacagcaactataactacaaaacaatacaacaagatcaatcaactcagataccccgttcccattctgccaaaaatcccccacatcacaaatcagattagaatcaaaagatagaacctcaaaccgaaattcgtaccacatcaagaactattttcctgccattttcgaacttctcagttgactcctgtactgtgcttctaatttatgaatctataaatctctctcgtttcgtctgagtcaaacattgctgtctcttcatgtttccgttttcaacaagtataaaacacatcgaaattgccacgcaaattcaggctcgaagaactaacacaaaattttgtaaacaaaatatagagaacatcgaggaatgaaagaaatcgttcaatatgaagcgtaaaatttagagatttgtacatttaagtgatccttgtttataagattataattttattttatacataaaaacgaaaaacaacaaaaatatataaagaaaaaaacaata

SEQ ID NO: 21750 - protein, 258 aa, DROSOPHILA
MKKFLVVFVALFGAAVAQSSFKCPDDFGFYPHDTSCDKYWKCDNGVSELKTCGNGLAFDATDSKYLTENCDYLHNVDCGDRTELEPPITTPHCSRLYGIFPDENKCDVFWNCWNGEPSRYQCSPGLAYDRDARVCMWADQVPECKNEEVANGFSCPAAGELANAGSFSRHAHPEDCRKYYICLEGVAREYGCPIGTVFKIGDSDGTGNCEDPEDVPGCEDYYGDLDLKSIRKSELLAGLNSEGRTKGAPKTKAASSSS

SEQ ID NO: 21751 - DNA, 3941 bp, DROSOPHILA
gctttgttcagatggcgctgcagctcgccttctacaagtaactagatgatcttcctacagattttcaatatagccgaatacatttacgttttgcagaatgcactcggaaccacctgcgcaatatgagtcggcgcacttgcgcatattcgacggcggacgaaccgaaactatacgctcttgctccaacgaatccctggccttttcccgcgctatgcaggacccaaacgttaccgatcaggaacgcgccgccaagcttcgtgaggcagtagtgtctcatcagacgtatgctaagctggctcttcagggaaagggtgtggatcgtcacctgcttggactgaagctgatggctctggagcacagcaagccaattcccgagttcttcaagtcgccgggctttgttaagtccagtcacttccgcatgtccacctcacaggtagccactaaatacgatgctttcatgggatacggcccggcgactgacgatggttatgcatgctgctataatcctcgggataatgacatcatattggccatatccgcttggcgccattgcccaataacggatcacttgaagttcgttaagaccctcgagcaatcctttttcgaaatgaagaatgttctcgagaagaacccgcctgagactaagtcgaagttgtaaaaatgtaccagaataataaaatttagcagggatcaaactttgaaggacttgatttaacagatgaaaggatttggactagaatggacaaacacttgctgcacttgaaaactaaatatgctttacattttagctatggaatcaatcgatctattaacgcttttttaagtggaaaacttgttagtcgaatattaataaatacaaaagacatgacaattaggaagttacaaatttaacagattttttctgtttctattatcgtcgacaaatattttggcatgcttaagaactaaaagtattgttctctgaaactagacaatagctttaattagtggtcatgttaatttattttttacagttcttattaagataaaaaacaaagcgtgaaaaattagtcttcactgtttgcactgtggctcgtcgctcctttagctcccgtcgctgctgccgcagtttagacttgaacaactcctctagtgcctggacacgatcgcacatctccaactccgcgatgatctgcggccagtcgtccactgcgaaaatgtccattagtgcatctagtccttcagacagggcccacaggtcatcttcctgggcacagtaagtcaataggaagagcactattgccttaaccaggggctctgagagcagagaacccagcgtacccagcatgcggttccagttaacgcgaatatttatatctgtgcacttgctagcgccctcgataatcatgttgagatcattctcggtcatctggccgaaaagatccttgcgagacttgagcaaactcagcgaggagcgcattagtgacgtaatggcctccataacggatacatcttcacttcccctaaatgcttgttgacccaagatcatccacatgttatagaggttgctgcagccccccaaatcttcagggggcagcacattgcataggttctggaggcaaatcaagtatgatactcttaatttttccactttctccttgatattctcttgctgggacacaagattttccacagcaggttgcagtggttgagccttttgccatagtttctcgatcactttgttttgtttgatagtctccaagaagttggcgggcagtccccccgatccactgtcagctgtctcgtcctccatgtcgtaatcggccacgctctcagactctgaatgctcgctatctgtatcccagttgctctgttcatcgctggagcccaggttggttataatctccgctaccaggcgctgggcatctagcaagtgctcgaggttcttgagtgctacctcggcatcgcattggttaggtttcgactgattggcactctgtgtttccgtcatatcctctgtctccatggagatttccagcacgggggcctcgttcttcgactttgcatttagaatttcgcttttgcagctttgcagctgggcctgtggatctatggagagtagtttgtccagactgttcaggatttcccgagtgtgggcggccgcgcatgcgggtacattgcataggataccagcagctaaggcgttcaggtaaagctgcgcgtgactttctgtgggagccacaagaagctcaggtagtattgtactgctggccaggacgttccacgagctggagttgttctcagacaccaccaatacgagttgggccactgaaatggcaacttcgagtccgaactttctgtagtcgaagcccagcagcaggctggaaagaaagttggcctgatttagtgcttctgtggcggtgggcgagctctcgcacagatttcggagcagatggattgcttgctggaaggtgtccgcatgcagctcgttttcgaatccaccttttgtcagatcatagctacggaccagagtcagcagggcggtcagtatgtcgttctcaacgaggaagtcgcacacctccgtgccaaacaccgacaaattccgaaaggcaccggccgccgcattccggatggcgctctccttatcgcacagcaggggggccgcaatccggaccaactcgctgtcgcgtatttcgggaaccttctcctttcgcagcgccagcacggcgaatgagtgcagtccgttcagcttctcctccacgttcgcctgctgcaggtgaacgcaaatcgcctcgatgggtccgcagccctccgcttcgcccgctgattccacatcgatttccgccgaggtgtccacgccggatggcgtccgtgtttttacttttcgaacttttcccattgcaacaaaacacaactgcacgtgtttactaatggggctggaacaaaaggcggcggctttttgtgctatcgatgtttccagatagttggcagcatcgaacatttgcctacccttatcgatttcattttatgcatttcgcattcagtgatcactggtcacgttaaggagcacaggtattccataaaaaacttttacaatagctacatggatgtattgtcttttatttccacctcataatttaaaaaatatgtggcacaaaacagtatatgagtcttttgctgcacgttgtcttaagaaatttccaatttatttatataaatatttatttcttacaaatttatttctttatattcctatacatatatgtatctcttcttttgttggaaaaataaacgtgtatgataataacaaatttttttttctgctgaccgtttaattatttggtagttgaatcgttgagttaagcgattcctctagatggtaacaaaatagcgtgagagtgctcccaggtctaaaaagagtggcataataggcgagtgacgattagatgcgcaagggagagagaagttattagcaacgagtgttctcgttaacagattagagatagtaccgaaacacttcgatttgaactcttgccccgatcgggtcatgctgagctaattataaagcagactttgaaaatacgatcagatatattcatatttattgctaagcaaaatgtaactctttgtaaacgtgataaaataacgtcccttagtagcggactggcaacgacattcatgtgctgccacatagcctttcttattcgataattcgataagtcgagtaaactggattgtattcacatctctagcggcagaaaagtgtagaaaattttcaggggtttttaaaacgaaaagtaagaggttgcgtacagttagatttgtgtgccatggatgcgagcttagaggagagcatggatagcgatggcgccagttcgccgattaccaagacggaggcaacggaatctccgccagaagcgggtctcaatggaaacggcagtggtagtggtagtaccagccag

SEQ ID NO: 21752 - DNA, 1941 bp, DROSOPHILA
caaaaagccgccgccttttgttccagccccattagtaaacacgtgcagttgtgttttgttgcaatgggaaaagttcgaaaagtaaaaacacggacgccatccggcgtggacacctcggcggaaatcgatgtggaatcagcgggcgaagcggagggctgcggacccatcgaggcgatttgcgttcacctgcagcaggcgaacgtggaggagaagctgaacggactgcactcattcgccgtgctggcgctgcgaaaggagaaggttcccgaaatacgcgacagcgagttggtccggattgcggcccccctgctgtgcgataaggagagcgccatccggaatgcggcggccggtgcctttcggaatttgtcggtgtttggcacggaggtgtgcgacttcctcgttgagaacgacatactgaccgccctgctgactctggtccgtagctatgatctgacaaaaggtggattcgaaaacgagctgcatgcggacaccttccagcaagcaatccatctgctccgaaatctgtgcgagagctcgcccaccgccacagaagcactaaatcaggccaactttctttccagcctgctgctgggcttcgactacagaaagttcggactcgaagttgccatttcagtggcccaactcgtattggtggtgtctgagaacaactccagctcgtggaacgtcctggccagcagtacaatactacctgagcttcttgtggctcccacagaaagtcacgcgcagctttacctgaacgccttagctgctggtatcctatgcaatgtacccgcatgcgcggccgcccacactcgggaaatcctgaacagtctggacaaactactctccatagatccacaggcccagctgcaaagctgcaaaagcgaaattctaaatgcaaagtcgaagaacgaggcccccgtgctggaaatctccatggagacagaggatatgacggaaacacagagtgccaatcagtcgaaacctaaccaatgcgatgccgaggtagcactcaagaacctcgagcacttgctagatgcccagcgcctggtagcggagattataaccaacctgggctccagcgatgaacagagcaactgggatacagatagcgagcattcagagtctgagagcgtggccgattacgacatggaggacgagacagctgacagtggatcggggggactgcccgccaacttcttggagactatcaaacaaaacaaagtgatcgagaaactatggcaaaaggctcaaccactgcaacctgctgtggaaaatcttgtgtcccagcaagagaatatcaaggagaaagtggaaaaattaagagtatcatacttgatttgcctccagaacctatgcaatgtgctgccccctgaagatttggggggctgcagcaacctctataacatgtggatgatcttgggtcaacaagcatttaggggaagtgaagatgtatccgttatggaggccattacgtcactaatgcgctcctcgctgagtttgctcaagtctcgcaaggatcttttcggccagatgaccgagaatgatctcaacatgattatcgagggcgctagcaagtgcacagatataaatattcgcgttaactggaaccgcatgctgggtacgctgggttctctgctctcagagcccctggttaaggcaatagtgctcttcctattgacttactgtgcccaggaagatgacctgtgggccctgtctgaaggactagatgcactaatggacattttcgcagtggacgactggccgcagatcatcgcggagttggagatgtgcgatcgtgtccaggcactagaggagttgttcaagtctaaactgcggcagcagcgacgggagctaaaggagcgacgagccacagtgcaaacagtgaagactaatttttcacgctttgttttttatcttaataagaactgtaaaaaataa

SEQ ID NO: 21753 - protein, 625 aa, DROSOPHILA
MGKVRKVKTRTPSGVDTSAEIDVESAGEAEGCGPIEAICVHLQQANVEEKLNGLHSFAVLALRKEKVPEIRDSELVRIAAPLLCDKESAIRNAAAGAFRNLSVFGTEVCDFLVENDILTALLTLVRSYDLTKGGFENELHADTFQQAIHLLRNLCESSPTATEALNQANFLSSLLLGFDYRKFGLEVAISVAQLVLVVSENNSSSWNVLASSTILPELLVAPTESHAQLYLNALAAGILCNVPACAAAHTREILNSLDKLLSIDPQAQLQSCKSEILNAKSKNEAPVLEISMETEDMTETQSANQSKPNQCDAEVALKNLEHLLDAQRLVAEIITNLGSSDEQSNWDTDSEHSESESVADYDMEDETADSGSGGLPANFLETIKQNKVIEKLWQKAQPLQPAVENLVSQQENIKEKVEKLRVSYLICLQNLCNVLPPEDLGGCSNLYNMWMILGQQAFRGSEDVSVMEAITSLMRSSLSLLKSRKDLFGQMTENDLNMIIEGASKCTDINIRVNWNRMLGTLGSLLSEPLVKAIVLFLLTYCAQEDDLWALSEGLDALMDIFAVDDWPQIIAELEMCDRVQALEELFKSKLRQQRRELKERRATVQTVKTNFSRFVFYLNKNCKK

SEQ ID NO: 21754 - DNA, 6039 bp, DROSOPHILA
gctggtacttgcgtagctgagattgaaatcttttcggcaggtctagcgaacgttcctgttcaacatgaacggtctggcggtgcttttcgtagagggcgtcgtacaacttggtggttacatatgtttttaagggacgcttgtgctccttctcctgctgggccacctcgaactcgagactgcctctgaagtctttaaagaaaaggggcagaacttgttctcccacttccatctcgatctcacgtgctcgaacatgcgtctgttcatggcttagcaccaggatgcaggagcccgactcctgccgaatggatctgaacttcagctttctcgtccgagcattctggcctgaaatattttcttattaataagtgcaattatagtacgttagcctacacacatttttcaatacaaatcaaaatctcctctttatgctcaacgagattatctttgaacacccatcgcttctttccgtagcggaactccgttggatcctcgggactttctggaggtacttcatcagcaatttcgcacaaaacaacgccatccattgttatttgcgaaataacaattcggacaaacaaatgtgcgatgaccgccaattcgatatacgataacagaaaaatctatatcggacaccaaatgacacacctccacagcttaaatttaacgattgcaacaggggaatctttatgttctctagaaagcaaaacattttcggtaagttatcaaatagcaactcaggcaaaaatgaaaagaaagaaaaccatttaaaaagaaaaccaattaaagaaatatatttataataaagaactgtatttaaatcataaaacataattgtatgtagtttagtttctacaatatgtgcagcggttatcgtgtgaacaagttgaaaaatgacaatcgataaccgattgtgtgaggacacggtcgatcggccgcatatatcacactgagttaatataccctgtaatcgaatattgtccacctctacgaagcagtgaagaaaattatagcgtggttttttcggttgaaaaccaatcaaaagtgcaacaaacagtgagcaaaacaaagtccagccaactcgtaagtgtgcgcccaagcatcccgcaacccttgcaatctcaaacgaccggcatacaaccatttttcgacccgcattcgtagtgtatatgtggagcctgcttggcataattacaaaaatttacgcattactttgtgagagccgagtgttgagctgagtctagtctgtgttcagtgtattaattgcgctattccgcttatccaaatctccaatcccgtcccgcagagccgtgcatgccaagtcatcagcgttccgcgagtccagcgaagattgatcttgtttcccccagactgaaagtgtcaccgccaagacgtacgtgcgaaaaatgttttgggacaagggttatgcgccctccgcgaatatagaggcgctgctcgagaaggaggtaggttgactcgatccgtgctgatcaagtggaaatgtctcagttacgcgtcgtcgccattcgcagaactccacactggaggaatttctggacgaggaggacatactgcaggagtgcaagacgcaaaagaagaacctggtcaactactttacacgtcccgaggtcatacggcgtctggtggagctgatcacgaccgagccctctgaagatgtgcccatgtcgaagcgtttccgctatgccaacatgtcctgtgagatactcacactgtaagaattgaatgcccgttgccatccagaattctatagcccatgccattttagcggcctgccgtccctggatgagaagctactgaacgacgcggagacgctgcagctgctgtattcatatctggaaaaggaaccaccgttaaatccattgctatcgtcgttttttagcaaaacgtttagcatgctctttaccaaaaagcctgaacaagattggtttttgtatcaacacatgtgcctacaactcctggagtatattaaatcgcagaagacctttttggatttcatttgtaaacactttgacacaccggtcatacctgatctaataatgcagatgatgaaggacatcgagggtgggcgacttaagcggaaccttttcgaagtaagtccattagagagttttgcctaggcatacgaatcttatcgaatatttcttttaacagtggctaactgaagataaaattgttgagagactgattgcaatattgcgtaatcctcaagaaaccgacaaacatgcaaatgttgccgactttttctgtgatcttattaaccaagggcgtctaatgcgccagaccgagcaggagaacgattcgtttgagccggccttcgatggatccaaccccattctgaagacgatcgaatttgcggacacaattgaagccttgttaaatgtgattttggaaccaaacgctcaggagagcgccatcttatcaggaatatcggttgtacttacgctaatcaagccaattaccttcacgtaagttatgctgccagtgaatttgtcaccttattctaattgatttacattttttcctgtagagatgagcccaactcggatcgccagcggttgttgcaaaagcgcgaacgcgaaatccaccaggaagtccaggagactgtgatcactgtgatggcgccacgcctccaggaatttgtccacatactgaaaaacccgcctgcggttagcatgaaactttttgtcacaaagaaccagctgtttatcttttgacttgtagaaacccacactagaaaccacggccgccgtgttaacgcccccatttggaaagactcgactgcaagtttgtcgcgtgttcaccgctctgctggagaccaagcatgagactattcagcaggcgtaagtcactgctttatagaaaggagaacttttaataaataataactttttatactttagaatctgcgcgactgagtacttcagcctgttgctggactttttcaagcagtactgctggaacaacttcctgcacacagaaatggagaaggcactgtacgtggtcttttacaacgagctgtccaacaacaacactgcatccacggaggtcacggattacttcactgcagactgcctgatcaatgcctttttgaaggtgggcacggaggagtccgaagtcgagatgaagaacgctcttaacgatgcgaagcgcgcggaaggtggcaaggatgaggaagggggcgacatcgaaatcgaagtggcagctgcgcaggaagtggctgcccagacgcccgatgagcgacagacagccgcagaagaaaaccaagagcatgaagaacatatgagccaagtggaagccgcagctgaagcaacagcttctgaggacgccgaacccaaagcccaggataatgaagtgaaaaatagtgaggtggatggtgaatctccaacagatcagcaagaatcggaggcaacgctcaatgatctcgacaagaccaagaccgttccgagccctccgccttctgaaatgcaatcacatgtaagtcttagttgacttttgtacccaactaaacttaattctcgctgatttgcagttaattgtaaactgtcatctgatatccaaactggtcgacttgtggcagcacaatgcgcaggcgcagtaagtacttcaattgactaattatcagtctggcacataacaaatgttctttttttagatctgctgagaagggtcgacgtttgggctatatgggccaccttattaaaattcttcgtcacattacgaattgtatatcagaatctgaacatatcggtgatctgatcaccagcagcctaagtgatgaagatgaggttaagctgtggcaatcgttgatcgatgcggaaactggcgagttttcgctggcggttaaacagcagaccaagctcctggccgactgcaatcctcacgaggagaatcagtacaatgatggatccaatgactatactggcgagataaatgcgtggaacgttggtaatctgccgtacagagaagtggattgtagtgagctgaataacacgttgcaagacatcttctttgccatagatcagaatcggttccagtttggtcgaaacattgacgacgaagatgatgacgatgatgagcatggcgaccattcaggcggtggtgatggccacgggcacggcatgttcaccaaaaattcgaacacgctgaacaacttggctgacccttgggacatccagtttgccgtgctttccagcgcgcctacgcaggttaacacgggcactgccaactggggcacggatttcaattcggataactttgctgatttcgatgcgcactttagcacatttggcagcgatcttggtatgcccataagtgcgccgccaggtgaagaggaagaggaggactcttccccagcgccggaatccgccacacaggtgaacccagaagaggagcgccaacccgctgaatctattggcctcgctgtgggcaagggcgttcaggataatctagcgtgtaccgacgatcagcaggctgagtacgacaataatgccaacgtggagaaggccatcagcgataagctggccgagtcgagcgtggtggagactgcagcaattgttactcgattgcaatccgtactgctggacggcgaggatgattatgaggacgatgagggaatgtggaccaagccactgggtgcggatcgtccttcggagaccgagcaaattactcccatttcaaatggaccagacagcaaagtgaatgaattgtaagttaacccttttgcacgtgggtatgtaaatatgtatatatgaaatgtttatacttttaatctatttaaaatgccaaacaagtttacacctatgcaatgtattggtttgtagctcaattttttgttttaccatttattacttaaatacattgcacttgtaattaaaaccaggggtttacctttcagcaatcatgccaacgatatcagcagtaacaacgtggatggccacgaagccaacatcacaacggagcagcagaaattggccgctgccgccaagacgaacaatgttgaaattgcaactacgaccacataaatgcacttcctcaccacaccatacatcattcaagcgatattgtgtcgacgagaaattgtaaaaacgcctttgatttgctctttggtcattatcatgcatacatatttatataaatatataccacatactactactatacgtacatatataacaggctgcatagtacaacaaaagatttgtgtattagcaaaaggccgaaacccgcccaaaaccaaaatgcaaattatcaaacaaaaaaaaaaaaaaaaaaaaaaaaaaaaaaaaaaattagcatcaaaaaaatatcaaaaagctaaaaaaaaatattcacagtaaaaagtgtattgttgattccttctgctcctcgctcgtattgccaattattttaattattacactttcttcatgtttccctaattaagaaaactgtattttgtttgtaatatgtattagtctgtcgatttagtacgcttttactttcaatactctcaatgtgttaggcaacctatgagcattacttaaagtaccaaaattcacgcaacgtttagaatgcttagtttatatttgtattgtattcgttttagctcgatcagatgaggattatctatctattcatatgatatatgtatgtatatacatatatatatatatatatatatatatatacacttttggagctgtcagtaaattacgttatcgcaaagtcgtacgttatcgtcctcctattgtggggaatcccctccaattagtggtgacgtaatatatggacaactccgcacttatacttgtattgttaaattggagacttgtatttattgtatgtattttgaaatcgaaagcaaaagcaatgccaaaataccaacacgttcaacaccacatacccatatgctgcaagcacaaacatacgcattatgtattagagaggtatatgattatatacttctgtcttttgccattattaccttgtttgtatacaaatcggtttaaataacaaaacatattctttgtcgaaagtacaaaa

SEQ ID NO: 21755 - DNA, 3069 bp, DROSOPHILA
aaaattatagcgtggttttttcggttgaaaaccaatcaaaagtgcaacaaacagtgagcaaaacaaagtccagccaactcagccgtgcatgccaagtcatcagcgttccgcgagtccagcgaagattgatcttgtttcccccagactgaaagtgtcaccgccaagacgtacgtgcgaaaaatgttttgggacaagggttatgcgccctccgcgaatatagaggcgctgctcgagaaggagaactccacactggaggaatttctggacgaggaggacatactgcaggagtgcaagacgcaaaagaagaacctggtcaactactttacacgtcccgaggtcatacggcgtctggtggagctgatcacgaccgagccctctgaagatgtgcccatgtcgaagcgtttccgctatgccaacatgtcctgtgagatactcacactcggcctgccgtccctggatgagaagctactgaacgacgcggagacgctgcagctgctgtattcatatctggaaaaggaaccaccgttaaatccattgctatcgtcgttttttagcaaaacgtttagcatgctctttaccaaaaagcctgaacaagattggtttttgtatcaacacatgtgcctacaactcctggagtatattaaatcgcagaagacctttttggatttcatttgtaaacactttgacacaccggtcatacctgatctaataatgcagatgatgaaggacatcgaggaaaccgacaaacatgcaaatgttgccgactttttctgtgatcttattaaccaagggcgtctaatgcgccagaccgagcaggagaacgattcgtttgagccggccttcgatggatccaaccccattctgaagacgatcgaatttgcggacacaattgaagccttgttaaatgtgattttggaaccaaacgctcaggagagcgccatcttatcaggaatatcggttgtacttacgctaatcaagccaattaccttcacagatgagcccaactcggatcgccagcggttgttgcaaaagcgcgaacgcgaaatccaccaggaagtccaggagactgtgatcactgtgatggcgccacgcctccaggaatttgtccacatactgaaaaacccgcctgcgaaacccacactagaaaccacggccgccgtgttaacgcccccatttggaaagactcgactgcaagtttgtcgcgtgttcaccgctctgctggagaccaagcatgagactattcagcaggcaatctgcgcgactgagtacttcagcctgttgctggactttttcaagcagtactgctggaacaacttcctgcacacagaaatggagaaggcactgtacgtggtcttttacaacgagctgtccaacaacaacactgcatccacggaggtcacggattacttcactgcagactgcctgatcaatgcctttttgaaggtgggcacggaggagtccgaagtcgagatgaagaacgctcttaacgatgcgaagcgcgcggaaggtggcaaggatgaggaagggggcgacatcgaaatcgaagtggcagctgcgcaggaagtggctgcccagacgcccgatgagcgacagacagccgcagaagaaaaccaagagcatgaagaacatatgagccaagtggaagccgcagctgaagcaacagcttctgaggacgccgaacccaaagcccaggataatgaagtgaaaaatagtgaggtggatggtgaatctccaacagatcagcaagaatcggaggcaacgctcaatgatctcgacaagaccaagaccgttccgagccctccgccttctgaaatgcaatcacatttaattgtaaactgtcatctgatatccaaactggtcgacttgtggcagcacaatgcgcaggcgcaatctgctgagaagggtcgacgtttgggctatatgggccaccttattaaaattcttcgtcacattacgaattgtatatcagaatctgaacatatcggtgatctgatcaccagcagcctaagtgatgaagatgaggttaagctgtggcaatcgttgatcgatgcggaaactggcgagttttcgctggcggttaaacagcagaccaagctcctggccgactgcaatcctcacgaggagaatcagtacaatgatggatccaatgactatactggcgagataaatgcgtggaacgttggtaatctgccgtacagagaagtggattgtagtgagctgaataacacgttgcaagacatcttctttgccatagatcagaatcggttccagtttggtcgaaacattgacgacgaagatgatgacgatgatgagcatggcgaccattcaggcggtggtgatggccacgggcacggcatgttcaccaaaaattcgaacacgctgaacaacttggctgacccttgggacatccagtttgccgtgctttccagcgcgcctacgcaggttaacacgggcactgccaactggggcacggatttcaattcggataactttgctgatttcgatgcgcactttagcacatttggcagcgatcttggtatgcccataagtgcgccgccaggtgaagaggaagaggaggactcttccccagcgccggaatccgccacacaggtgaacccagaagaggagcgccaacccgctgaatctattggcctcgctgtgggcaagggcgttcaggataatctagcgtgtaccgacgatcagcaggctgagtacgacaataatgccaacgtggagaaggccatcagcgataagctggccgagtcgagcgtggtggagactgcagcaattgttactcgattgcaatccgtactgctggacggcgaggatgattatgaggacgatgagggaatgtggaccaagccactgggtgcggatcgtccttcggagaccgagcaaattactcccatttcaaatggaccagacagcaaagtgaatgaattcaatcatgccaacgatatcagcagtaacaacgtggatggccacgaagccaacatcacaacggagcagcagaaattggccgctgccgccaagacgaacaatgttgaaattgcaactacgaccacataa

SEQ ID NO: 21756 - protein, 962 aa, DROSOPHILA
MFWDKGYAPSANIEALLEKENSTLEEFLDEEDILQECKTQKKNLVNYFTRPEVIRRLVELITTEPSEDVPMSKRFRYANMSCEILTLGLPSLDEKLLNDAETLQLLYSYLEKEPPLNPLLSSFFSKTFSMLFTKKPEQDWFLYQHMCLQLLEYIKSQKTFLDFICKHFDTPVIPDLIMQMMKDIEETDKHANVADFFCDLINQGRLMRQTEQENDSFEPAFDGSNPILKTIEFADTIEALLNVILEPNAQESAILSGISVVLTLIKPITFTDEPNSDRQRLLQKREREIHQEVQETVITVMAPRLQEFVHILKNPPAKPTLETTAAVLTPPFGKTRLQVCRVFTALLETKHETIQQAICATEYFSLLLDFFKQYCWNNFLHTEMEKALYVVFYNELSNNNTASTEVTDYFTADCLINAFLKVGTEESEVEMKNALNDAKRAEGGKDEEGGDIEIEVAAAQEVAAQTPDERQTAAEENQEHEEHMSQVEAAAEATASEDAEPKAQDNEVKNSEVDGESPTDQQESEATLNDLDKTKTVPSPPPSEMQSHLIVNCHLISKLVDLWQHNAQAQSAEKGRRLGYMGHLIKILRHITNCISESEHIGDLITSSLSDEDEVKLWQSLIDAETGEFSLAVKQQTKLLADCNPHEENQYNDGSNDYTGEINAWNVGNLPYREVDCSELNNTLQDIFFAIDQNRFQFGRNIDDEDDDDDEHGDHSGGGDGHGHGMFTKNSNTLNNLADPWDIQFAVLSSAPTQVNTGTANWGTDFNSDNFADFDAHFSTFGSDLGMPISAPPGEEEEEDSSPAPESATQVNPEEERQPAESIGLAVGKGVQDNLACTDDQQAEYDNNANVEKAISDKLAESSVVETAAIVTRLQSVLLDGEDDYEDDEGMWTKPLGADRPSETEQITPISNGPDSKVNEFNHANDISSNNVDGHEANITTEQQKLAAAAKTNNVEIATTTT

SEQ ID NO: 21757 - DNA, 11322 bp, DROSOPHILA
cctaatagcacgtcgataatgggtacgatcggtaaatagcaagacagtttccgcttatgatttatcatgcaggctctggatgttacaaaatgtttcaattgaacacctctaaccattagattacaaaatcgacaaacaaatttagattgcgagtaatgttaatataaaaaagtttaaataattcaggattcaagcattacaattttgtgcatttgtattcttcgaaatgcccaattaatatgaaaaatatttaaaattaaacgtgactgaacaaaaaaaaaactttttcacaaaagataagtcatgttgttattaataattgaaagtaaagaaggtagacaatcttatttcttcccatccattcagcacccgtccaatcaatatacacgcacccactcaagcatctaactattttagctggtgttttagttgactggtctacgatctagaatttcgattctctatgttacactacaactgctagttactatctggtaaatatttacttgttgttgctcttattgatttcatttttctgtttcggttaggcacaaagtaactggttttcatttcatcatggctcacgatcgaatgttgcactattacacattttcatttattttctagttatatttagtgggtactacgaatttattgaacagttagtgtggttttcctataattctctctcgttacatttaaattttaacatattgctagtttgttcttgtcttttgtcgtgcaaaccacattgaattgctgtcatatggaaaatacaggtgtccttgtgtattctatatgtgtctaatctaaactgtatattctattacaattaaatgttcctttttgacaaaaaaaaaaaaaaaattagcgaaaaggggtggaggtaaaggatgtagaaaggatgtgtgtttacagtttacagcgaaggatgagttttattccactcggattttagtctacgcgagagaaccgaaaatatcgagcaaaataaaccaaattttaaaatcatataaaaatatatttttattaaataaagcagtttatgaactaaatgaaacttttactaaaatcagcgataatactccaagtcatagggttagtaacagcgttccaaagttcatactctcatatcattattttgtaagctttcttatagaaatgtaatgtaatgacgaagtaaatcaaatgaagtgctttatacaatgtaaaaatttgtatgtatattttcatttcctttaaatgcaagagttacaaattctaatgttttaatgttgacaactatagtgtgtgtgttttttttgtatactcattttacatgatctttaggcttataatttgaaaagcattcaaaatgcacaaaacaaattttggatctatacaaatttaagtttatgttttggtataacaaattttgaaaacatgtttcgatgatgtggtggccaaagcaacgtgtgattttttttactgtatttaatcaacagaaaaccgatttgtgaaaattgaactacgcgtgtctctttgccatatgcagttattcttagttttgctgtttgtctcgttagaatagatataatataataatatgcgcatataatacgtttatataaataattaataatagtactcataatcattaataattcatcatctgttcgtatgcataacagttattgttgctattgtggttggtgttgttgttgttattgttgttgttgttcttgttgttttctgcagtagtaattcatcagtagtggttaaataagcggtttcttcttggttgtcaatcagttgcccttggtagcctcctttgcggccatgatcaagggagtcagactggccaatggacgggccagttttaggaagggatgctgcaatggagtaagttgagtgataccccataagctggaagtcaccttggcacgtggactgaaagactcacctttagcaagtccaatgcgcttgctcgccgatccacctccacctccagacactggtcgaggaagtcctgaaatgctgaggacagcttgtctttttctttaatctctggcttgccattggtggcaatgaggtacaaggctttaagcggattctcgtttaggtacggcggttcgccctcgaccatttctatggccataatgcccaaagaccaaaggtccacctggataggaaaagcatcgttagaatgttgaaatatttaaatattcaaatgtttcgtgagagtgctcaccttgggtccgtactgtttccgggtgacgacctcgggagccatccagtagggtgtgcctaccatcgttgtgcgtttggattgctccggcgatatttgcgcacagaaaccaaagtcagtcagcttgacagagccgtcaaggcccagcagaatgttatcactcttgatgtcgcgatggataacctggttggcgtgaaggaactccagagcttgcagcacttctcggcaaacagctgcgatctggccctcgtccatgcaggtctcggtgacgacgtcggtaagagagccgccgggcaggtactccatgaccacccacagttcctcagacacgaggtagctgtcaagatagttgactacatttgggtgtttgttctcccgcatcacaaggatctcgttgatgatgagctcctttttaggctgctgtgacaggttcatctgcttgatggccacctccatgccggtcgaggattcaattgcagtatacactgtgccagaggcaccctggccaatcttctccatcttggtgtactttcgatttggatcgcccacagagacaatggtgcgcagtttctccaagatctcctcgtcggacatctttttcttcttggcgttggctgccctcgtgttgggcgttgcagccggagccacagctgcctggggcacggcgatttggtttccagccacttgagaacttgggccaccggctgacacttgggctaccgtgggttccggtgtgtacagatctggtgattcaatggaggcgggtgtgggcgatgcgggcgtaacgatgggcggtaggggaaccgcaacaggaaacgaaacagtcgagttgcgagaggaagacgtcggcgtgggacaatggatcgttggcaaggcgtggtgtgtgccatcgtcgtcgtggaacgaaggaaatgatgaaaaggaggaagcagaggaatggtgattagtcgttgttgatgtggctactgtcgctgctgcagtggtagcgtgtgctgttgctgtctcgacgagactaccacgaggtgcagctggagcaggatcagtagtaggagtggtagaacaactaggattagtagctgataaaagagttgatgttgcatcggtgccttctgtttctgctgttgtttttgtggttgttggggacgttggagctggcgtcgtcgcagttgtttaattattttttttagcagcaattagaagcggaacaaaacagaacagaacacagagaggcgatacaaataccaaaatacacattcattaaatcggcaccacaaaaggattatagtgtttgattatatagcaacatagaaaaactatcacgacacatcgcaacctttgagccccggcagcaaattagatgttagcaatatagaaaagttatcttaaactaacagtgtaatcgaaaaaaaaaactgaatatttaatcagcttcggttaattgcactacttgttaaccaacttacattatcttctgtattttgaaaacatttttaagagactacgaaattcttttttgacaacaaatttttttgcacgtgagtacagaatttttaataactggattcagaattgtacttgtcgatctagagttttgctgataatagttttcgcatgacttgctgccatggctctttgtaaggtagatgtaactagctatgatccacatatcctagagcggcactcacttgcattgtttttattcttgtccagcgtcgtcgtggcattgttgtgcatcattggcgatgccgctggtgctgatattccgcctggcgtcctatgattttgcagcggcgttgcaggcgtggttgctggcgccactggcattgggatgatggctggctgtagatcctcgattggccgcgtgtagatggatttcgtgcgctcaggcctagaggccaccggtggaggtggcggctgttgctgcgggtgctgtggtcccagcatatcgtcctcgttagcggatgaatgttgcgatgtggatgaggagaccgtgtgtccgacaaagttgtacgagtgcgattgacttatgcccatgtgatgctggttgtggttctgatgcaaaagtggctgctgctgctgaaggaggtgctgctgctgctgttggtagtggttgcccagaatttgcccagcaacggccacgttgttggcgttgggacccagagtcatactgcccaactggacgccaatcaggttacctccgctgttggagccgtgcagctccgagtctgttggcgtgctgctcggactgctgctgctgacgcggctgagcgatgaacctggcaaaggagagagcgtttcaatattacaaataagctatattcataaattttctaaatatggcggaacttaaagcaatctcaaatcaactaacaaaatatgttgtgttatgttgcaatcctagatcttaaatctgactgagtgaccaacctgaatgcgtcgtaatggcatttgtcatgtacttggaacttggcctctgtttggtagtgttgtcgaaccacttgagcacatccagcacggcctggggattcttcttctgctcctgcttgctgatgttggagttcatcaggagtcgcgcccatgcctccggcatgccctgaaaaaggcaacaggttagattgttagatggaattaaatagaacaatttactgcgatgggagaacatctagaaggcgcggggtaaaaaaatatttttggcttttaggtacatcgatgcacggccaattattgtgatcggagaatgatgaagagccagcgactagaggcctttcagctacgaattccgggcagcctgtgttggtgcaatgtcgtatggtctagtgtaggagttttgtaagagtacgaagataagaatgaaccaatagtaacaaacaaagggtaacaaaactataagtaatatcgatcgaacttgaaacaaacaccgactcgacaaaatctacagacaaaggagcacaatgagaccttattgagaaactaatgaaggcaagttccgagaagttagtcgagaagtttacttactttcattggcagcttgaataataatagaaattgatatagagcaagaatcgcgagagatagatttagacaacagaatgtatgtagaagtacagtgttttatatgtatgtatatatggtgagcgccaaaacaaattaaaaatatattaacaaatttttgggtgacctggtgagcaatatttacttgattaaatttaatatttagaaacccgaaatgcagttcagtgtttggggtctgatcgaggccgccggtttgattacaatctcggatcgaatttaaaatttggaatattaataattgctcaatttatggtccaagatcgtggcgtttataataactccacacattaaattgtaatgcaattactatcgtcacccaaaaatgtaatatgtaatctgcaaacgaaactttaagtctttggtgactgtgtttttgcatataaatttggtgtacaaaagcttatcaaatagaggacataagcagtgaaaaccgaagatttccgacttgctattcttagacagaaagccgtaggcataatggcgaggcaaacgcgactgaaggtgtccatagacgagcataatagaaaactcacggtaaactcgccggtgacagcatcgaatcccacatggaccgtgtgctcaaagttcgtgggataggagatgttcggcttggagtccgtgtgcgagggcttcgatcctttgatcttgctcttcagcgttttcttcttccgatcggagtcgtcgggttctttttgggagaagagaaaaaagcacattgttaagcggaccagaggtcttcacatgccgtgctcaactaatcgaaatgtactcacccttgggcagcggacgcatgtcgggcggtacatctcccataccgccacctcccagtcctccgccaccgacgcccactcctcctcccgatcgttcattgccgccccggttgctggtgagacgcacaggcggcgccggcggtttgtcttcctcgctggacatggattcgtctttgtgtgcttctggctcttctggttagctcctgcttcctcctcctccgcttcgtctagcgccccgttatgcacagctgttctacgcccagaaaacagctgtcgagagtgggagaaagggatcagtatgttggccataactaagtatttcgccttaactaaaatgtactaaatatgagacaactatcttaacgattttgtatcattgatatattttcaattcttatattactaagaaagactatacattttttaaataagtgctttttccaagaagaacatataattttaaatgtaatatgtgctagatgttttctaaagcaaattatttagaaactggtgatttcatcaacacagttcgaaattgggaacagtgcagaaatgatttaatgcttggagtattccaggggtgccaaccttctgttatctatcgcgaaaagtgttccgcagcttatcttagtatatatttcgttctgtattctttccccaacgtattgcaatcgcgtcatatgcttctacaaaatcacaaatttgtcatacaactacaagagatagattgtttgcatatatttttctcgaacactttggcgttgtgtgtttcacaccattctgcacaaagttattcatttttggcttttgattattattttttttttaccgatcttcatgaagatcacgtcaatactgtgtgctctagattttttggcacgcggaaagcactttgttttgctttttgaatatgttcaaaaacacaacacctacacacacacacacacacactggttggctgcagcaggagaggagacatatagccgcagttataaatttatcaatataggccgtccggcgaactaattcggactgtgggcccgctgctcagttgttccgtcagcgtgtctcccaccttcgagtgtcactgccactagagcaggctgcaaaaggcaacaaacaacatacatcgctccaagagattgtctcgagcaccccagctcgcgagagtgcctcccctacattgcttaaaagctgattgatatgggtattcgaattttgtatactctccgaagctaattttataaattagttgagactatacatttcaattcagcaattattgcgcatctatgtgaggaacttaaaatattatcctatttaagttaagtgtgcattgatcataattgtatacccacatctattcacttttagttcatttattttaaatattcattggagcacctatagagcatatggagttaaaaaatatgacccaaaatggaataatcattaaaggactatattttaatttcagtttccattagacgcaaaccactgttctcacacaacacactttaagggtatcctctctacctcagttgctccgctctcgcccacgtaaacgatcgagagccataaaaaattcgttgcgataacaagagtggcttcgattgcactcataataaaaacaaagcagctcacgcattgggaattacagcaacacaaatgaggaaattaagcagcgaggacagcaacaacataaacacactcgagtgggcggcatcgcagccaaacatatgagcgagagggcgaaaaggagtgggagcgcagagtggcgaggagagcaaggcggctttggcgcctgtctgctttgccggcgacgtcgactgcgctgcttttatgattcatttatcatcgtcaggcgtcaagagtcaatgcagctaacgggaggcggagagtctgggacgagggggtggcgaagtgtgaaaacgttggacaaacattaacatacagttccaacagctgtggtcaacttaatagcatagcggggatctaataagatatcaactccaacttttgaatcatcagaaaaaagggttcttagtgaccaatatatgtacatatatgtgtacataagtatataagagaatcataggataaaatacccaaatcattatgtgtcatgcggttcattccgacattacctttctaccccaatttatcaagtgcaatgttttcttgctaattgtttttaaattcaccgatgtaagtagattgtttactcaatagatacgctcgttgatttcaattacatatgtatgtatgtcgatacatactgaatttaagataaaaagtaaaggagtatcgacaaatagaaagtagtaaacttgctgtgtgatatattcttgaccgcaactgtatatctgtactataggctttatgggcatacgttggtttactggctgcttgcccagagatctataaacgtatatatgtatgtacatataatatgcatgcaaacatacacacataggtgaaaattcgtttttaaatcaagcaagaacaaacttttcgggagcgtgtgggcgcccagaactgggttaacgatgtaccgcattgtgtttgatttcattgacggtcgaactttaggtaaaatcgataaaaaatgtttttctttctgcaggggcccatgcaaaattattccctaatgagaaaaacacacattgtaggcacaggaaactcgacaacacttgcggcatttaaattagcgacaggggttgtcaaacgcaggggagcggaagggaggagggtaggacattcaaagtgacgcaggcctaggtgcatgttgcaacaacagcgacgcaaacgtggcgctcgctccaagagctgaaagaagccacaaacatatgcatacttcttcgccacgtttacgcggagccaaagtttgtgatcaagcttcttgattactttgacgactgctttatgttaactttctattaaaactaaacttaagaatttattcatggaattcattttacgcaatttttccgaggattgctgtataaatatgaagccaaaacatgacgaagatcaccttctgctgtccgaagactttaagtaagttatcttagtatcaatatacaaaatgtaagcattaaaaatgatacgatgattatggtcggtgcatatttagcgagttgccacgcataactgctggcgacggagactctcagccgctccgacgttgtctattttggttgcggacgccagccgaaagcagcaggcggaaatgttatgccttttatattcctcttttcagttccctaccgcgaccgcttccgcgcgtccctgtcccttccgcttttacctgtgaccgtgctaagcaaatatgtttttcgttgaacgaaggaagggggtggtgcactggcgcactggacatgtgccgttagagcggtaactgttaaatgccaaatcgactgcgaaatgttgttagttattagagctttatgtaaatgtcttgtatcgtgtcacgtgtgttaatagcgggggaaggggcattggggcattccagcttgttgacatttggttgctttatttttgggctggaaattcgggagcagcaatgtgctaatccaaaataatgtggcgtggaaaccacttgaaacgttttcctttaatccacatacacgcacacacacacacgtgagttggaaaaatcaatgtgtgcaacctctccttaggcggtgtgtgtgtgcttgtctgtgcattggaagccagaccaattggactaacggtgcactctctttttatgaatgaaactccctcgccccgctctccacaagaccattctacccgctccactcggccaccactctccacttgaactcactgcaagtacaatatgccttggctgcctttcttttgcacggtgcaccctgtacgccgcttgcagtcgaagaagaaacgcttgcgattcacggattcgcgtggacaccacttctccactggcttcttggagttttccgagcccacaacacttggccgcactcgcacacactccaaaccgcacacacactgtattgttttccagttttctctggtgtgtgtcataaatggccgacggacgagaggcaccagcagcagttaaagcgcagcaatcttatggcgctccgcaaactttctcgctttctagcttctttagcaacgcgcgcgcattttcggtccttgcatcacccactaattggtttacattattcaggggtttgttaactacgaaaaataattacagaaagacgacaagacggccgcagcagacaatgtagcgatggcaaaaatatatcaatatatcgatagcgaacagaaacgaatatattcgctccgtgacttttcacaacatatcgatgagttttttgtattgtgattggcgacctttgaaaaagtgtttttcaaaaaataccacatcaaattttgagttcataataatctctttgttccaaatatttttatttccaacaaattgcatagtgccaataaagtttggggcgtgtctaaatgcctccatgaacgattgttgacagaaatgaatgcatttttagatatgggttgaaacttcagatagcgaagttactttagatgtttgaactggcgaacagaaaaacagccattatctagtaccctctttaagactaggtttttctttaattttgaaagatgaagatagatatgagcctaaagtgtttttaagatgtccctgaccacgctgcgaaacatacaagaaagcgcgcagtcgaagcgcctcaggcacagctgcctcagaccaaggagcagttgtccgaaccgcaggtagttggattgctgcagggtgtagcgggctaaggagatcagggcggctttagagtggcttcccaggataacggcatactccgcattgatggccaattctgtaaaaacatgcaatcgatataagcaattaaaagtattaaaatgggatatactaatggtggtttgacttcctattaaactcttaattaaattaaaacgatgtaaaaggtcttaaatctgtctctaatcttgaatctaatcaaattttatggttggttcaaacaaaccaactgcacatgctggaaaattttcttttgaatttattaagcccaaaacggaaacgttttttctggggttaagaaaactgcttgggtgtactctttcatgcagaatcaaatagcaaaatctatacatagcgtacataggatttaaattttcgtctaagaaatcacgtcaatatgtgtaaaaacattgaaaattggttagatg

SEQ ID NO: 21758 - DNA, 3430 bp, DROSOPHILA
ctgcggccgtcttgtcgtctttctgtaattatttttcgtagttaacaaacccctgaataatgtaaaccaattagtgggtgatgcaaggaccgaaaatgcgcgcgcgttgctaaagaagctagaaagcgagaaagtttgcggagcgccataagattgctgcgctttaactgctgctggtgcctctcgtccgtcggccatttatgacacacaccagagaaaactggaaaacaatacagtgtgtgtgcggtttggagtgtgtgcgagtgcggccaagtgttgtgggctcggaaaactccaagaagccagtggagaagtggtgtccacgcgaatccgtgaatcgcaagcgtttcttcttcgactgcaagcggcgtacagggtgcaccgtgcaaaagaaaggcagccaaggcatattgtacttgcactgttttctgggcgtagaacagctgtgcataacggggcgctagacgaagcggaggaggaggaagcaggagctaaccagaagagccagaagcacacaaagacgaatccatgtccagcgaggaagacaaaccgccggcgccgcctgtgcgtctcaccagcaaccggggcggcaatgaacgatcgggaggaggagtgggcgtcggtggcggaggactgggaggtggcggtatgggagatgtaccgcccgacatgcgtccgctgcccaaggaacccgacgactccgatcggaagaagaaaacgctgaagagcaagatcaaaggatcgaagccctcgcacacggactccaagccgaacatctcctatcccacgaactttgagcacacggtccatgtgggattcgatgctgtcaccggcgagtttaccggcatgccggaggcatgggcgcgactcctgatgaactccaacatcagcaagcaggagcagaagaagaatccccaggccgtgctggatgtgctcaagtggttcgacaacactaccaaacagaggccaagttccaagtacatgacaaatgccattacgacgcattcaggttcatcgctcagccgcgtcagcagcagcagtccgagcagcacgccaacagactcggagctgcacggctccaacagcggaggtaacctgattggcgtccagttgggcagtatgactctgggtcccaacgccaacaacgtggccgttgctgggcaaattctgggcaaccactaccaacagcagcagcagcacctccttcagcagcagcagccacttttgcatcagaaccacaaccagcatcacatgggcataagtcaatcgcactcgtacaactttgtcggacacacggtctcctcatccacatcgcaacattcatccgctaacgaggacgatatgctgggaccacagcacccgcagcaacagccgccacctccaccggtggcctctaggcctgagcgcacgaaatccatctacacgcggccaatcgaggatctacagccagccatcatcccaatgccagtggcgccagcaaccacgcctgcaacgccgctgcaaaatcataggacgccaggcggaatatcagcaccagcggcatcgccaatgatgcacaacaatgccacgacgacgctggacaagaataaaaacaatgcaaatctgtacacaccggaacccacggtagcccaagtgtcagccggtggcccaagttctcaagtggctggaaaccaaatcgccgtgccccaggcagctgtggctccggctgcaacgcccaacacgagggcagccaacgccaagaagaaaaagatgtccgacgaggagatcttggagaaactgcgcaccattgtctctgtgggcgatccaaatcgaaagtacaccaagatggagaagattggccagggtgcctctggcacagtgtatactgcaattgaatcctcgaccggcatggaggtggccatcaagcagatgaacctgtcacagcagcctaaaaaggagctcatcatcaacgagatccttgtgatgcgggagaacaaacacccaaatgtagtcaactatcttgacagctacctcgtgtctgaggaactgtgggtggtcatggagtacctgcccggcggctctcttaccgacgtcgtcaccgagacctgcatggacgagggccagatcgcagctgtttgccgagaagtgctgcaagctctggagttccttcacgccaaccaggttatccatcgcgacatcaagagtgataacattctgctgggccttgacggctctgtcaagctgactgactttggtttctgtgcgcaaatatcgccggagcaatccaaacgcacaacgatggtaggcacaccctactggatggctcccgaggtcgtcacccggaaacagtacggacccaaggtggacctttggtctttgggcattatggccatagaaatggtcgagggcgaaccgccgtacctaaacgagaatccgcttaaagccttgtacctcattgccaccaatggcaagccagagattaaagaaaaagacaagctgtcctcagcatttcaggacttcctcgaccagtgtctggaggtggaggtggatcggcgagcaagcgcattggacttgctaaagcatcccttcctaaaactggcccgtccattggccagtctgactcccttgatcatggccgcaaaggaggctaccaagggcaactgattgacaaccaagaagaaaccgcttatttaaccactactgatgaattactactgcagaaaacaacaagaacaacaacaacaataacaacaacaacaccaaccacaatagcaacaataactgttatgcatacgaacagatgatgaattattaatgattatgagtactattattaattatttatataaacgtattatatgcgcatattattatattatatctattctaacgagacaaacagcaaaactaagaataactgcatatggcaaagagacacgcgtagttcaattttcacaaatcggttttctgttgattaaatacagtaaaaaaaatcacacgttgctttggccaccacatcatcgaaacatgttttcaaaatttgttataccaaaacataaacttaaatttgtatagatccaaaatttgttttgtgcattttgaatgcttttcaaattataagcctaaagatcatgtaaaatgagtatacaaaaaaaacacacacactatagttgtcaacattaaaacattagaatttgtaactcttgcatttaaaggaaatgaaaatatacatacaaatttttacattgtataaagcacttcatttgatttacttcgtcattacattacatttctataagaaagcttacaaaataatgatatgagagtatgaactttggaacgctgttactaaccctatgacttggagtattatcgctgattttagtaaaagtttcatttagttcataaactgctttatttaataaaaatatatttttatatgattttaaaa

SEQ ID NO: 21759 - protein, 704 aa, DROSOPHILA
MSSEEDKPPAPPVRLTSNRGGNERSGGGVGVGGGGLGGGGMGDVPPDMRPLPKEPDDSDRKKKTLKSKIKGSKPSHTDSKPNISYPTNFEHTVHVGFDAVTGEFTGMPEAWARLLMNSNISKQEQKKNPQAVLDVLKWFDNTTKQRPSSKYMTNAITTHSGSSLSRVSSSSPSSTPTDSELHGSNSGGNLIGVQLGSMTLGPNANNVAVAGQILGNHYQQQQQHLLQQQQPLLHQNHNQHHMGISQSHSYNFVGHTVSSSTSQHSSANEDDMLGPQHPQQQPPPPPVASRPERTKSIYTRPIEDLQPAIIPMPVAPATTPATPLQNHRTPGGISAPAASPMMHNNATTTLDKNKNNANLYTPEPTVAQVSAGGPSSQVAGNQIAVPQAAVAPAATPNTRAANAKKKKMSDEEILEKLRTIVSVGDPNRKYTKMEKIGQGASGTVYTAIESSTGMEVAIKQMNLSQQPKKELIINEILVMRENKHPNVVNYLDSYLVSEELWVVMEYLPGGSLTDVVTETCMDEGQIAAVCREVLQALEFLHANQVIHRDIKSDNILLGLDGSVKLTDFGFCAQISPEQSKRTTMVGTPYWMAPEVVTRKQYGPKVDLWSLGIMAIEMVEGEPPYLNENPLKALYLIATNGKPEIKEKDKLSSAFQDFLDQCLEVEVDRRASALDLLKHPFLKLARPLASLTPLIMAAKEATKGN

SEQ ID NO: 21760 - DNA, 2306 bp, DROSOPHILA
gaacttgctgccctgccaattggcggcgacagcacttgaacttagtctcttttgggccaccaatatgtcgtcgatttcggttcgatctgggcccatctgacgagctgttctggttattgtttcccatagttcttggcccggtatttccccgtagctgcccaatcaaaccgcaaccttttccccaatgcatctgcttgattcatgaactttttcgagttttctaaagctaccagtcggcactgacagaaaatgtcagtacatcttaaatgtggtattatattcaagtaattgttttgtttatttcaattaagatttaagtacttaatgagttgcactaaaacttcgaaaggtggttttagtgtgggtgtaaaacgaaagatattcgaatgattaagtgttataggtttaaataaatattttttatgttctaactacattagttttaacatgcttatttttatgtttggtttcttgttaaaaatatgaagacatattgattgtggataactattctcacagaatcgccctgaaacttagaatgctttttcgagtgtgggtgaagagcaataatacctttcggatgagtacaccgctgcacaaagccgctttaaatgttacttgtcgcagcgactttggcgactttggtgcaacgctggcaattgaaaaacagcacaaaaaaaacaaaaacaaaatggaaatagtggaaaacatttagccggcgaccgccagagctgctgaactagcgagctgcttggcttcttccacaattgtgcaaatttatgacgtttgcaaatgcagccgcgagtgcagtataaaatgcagtggacgccgatgcaacgccaccattagacaactgccagtttgtccagccgcataggagaatctgcaatttcgagaaccgctcaacatgatgaaattggtaggtgaacttggataaacgaggcgcaccatgcccaaccaggatacgcaaaaggatacctaatctcttaccgccttgcagatgctagtcgttggctcgatagcccttctcctggccctggccagtgcccggccgcaaaatgatgtggaagttcttgagtacgaatcggagaacaccggcctcggcggctacaagttcagctacaaactgagcgatggcaccagtcgaacagaggagggcgtggtcaacaacgcgggcaccgacaacgaatccatatccattcggggatccgtcacctgggtggctcccgatggccaaacctacaccattaactttgtggccgacgagaacggttttcagccggagggtgcccatctgcccaagtagacctccgctttcgaggagatcctgtaaataccaccttcccgaatgaacccacaattccaaccaaccagccatacagtgaggtgctaaggtcctgtccggaggagctgtcccttgtcccgtggcagccaatcggtcagtcagttagtaagtcgatcagtcagtcaagtcagtgtcgtgcattgttttctattttccttgttactcgcattaaagccgaactttcgattctcgaaaaaaatatgttttctttgtggaacccataaagtaagtcaccagttctgggaagggtcattcaaaatatgaaactgcactagataactttcctttataattataacgaagtaccagagttattttctattttatcgtatttagctatgaaaattcacacttttatttcttttgattcaaaatgatcaatatacaagatgttccatctaaaaaatttacgaaggtactaatcttaaaaatatttttaaggaacataacaattggttttattctttatttaaactgagctacgataaaaggttattcagtattatggtttctgagcctatttcgatttaatgacttgtttttccaattgatttctagttttcaactagaagacctttttaattaccatcatacaccgatttataggtggggaatatcctcgccctggggttggaatccgttctcatcggccacgtagctgatggcatgcgtctgtccgtcgtctcctacgaagctgaaggatccggccacctgcaaggcatcctcctcgggaccaaggctcttcagggagccgtgctgctcctgcttggtgccatcgcttgtctcaaatttgtagctatagctatcggcattgacatcggacaccaggtcaacaatctctgcatccggagcggcagcagctaggcacagggcacttaaaaggcaggcgagcacaaggatggatttcatcttgaatagtcaaaaattactcaatattcaaaatgccagattgcaggagtct

SEQ ID NO: 21761 - DNA, 306 bp, DROSOPHILA
atgctagtcgttggctcgatagcccttctcctggccctggccagtgcccggccgcaaaatgatgtggaagttcttgagtacgaatcggagaacaccggcctcggcggctacaagttcagctacaaactgagcgatggcaccagtcgaacagaggagggcgtggtcaacaacgcgggcaccgacaacgaatccatatccattcggggatccgtcacctgggtggctcccgatggccaaacctacaccattaactttgtggccgacgagaacggttttcagccggagggtgcccatctgcccaagtag

SEQ ID NO: 21762 - protein, 101 aa, DROSOPHILA
MLVVGSIALLLALASARPQNDVEVLEYESENTGLGGYKFSYKLSDGTSRTEEGVVNNAGTDNESISIRGSVTWVAPDGQTYTINFVADENGFQPEGAHLPK

SEQ ID NO: 21763 - DNA, 3369 bp, DROSOPHILA
acctctccttaggcggtgtgtgtgtgcttgtctgtgcattggaagccagaccaattggactaacggtgcactctctttttatgaatgaaactccctcgccccgctctccacaagaccattctacccgctccactcggccaccactctccacttgaactcactgcaagtacaatatgccttggctgcctttcttttgcacggtgcaccctgtacgccgcttgcagtcgaagaagaaacgcttgcgattcacggattcgcgtggacaccacttctccactggcttcttggagttttccgagcccacaacacttggccgcactcgcacacactccaaaccgcacacacactgtattgttttccagttttctctggtgtgtgtcataaatggccgacggacgagaggcaccagcagcagttaaagcgcagcaatcttatggcgctccgcaaactttctcgctttctagcttctttagcaacgcgcgcgcattttcggtccttgcatcacccactaattggtttacattattcaggggtttgttaactacgaaaaataattacagaaagacgacaagacggccgcagcagacaatgtagcgatggcaaaaatatatcaatatatcgatagcgaacagaaacgaatatattcgctccgtgacttttcacaacatatcgatgagttttttgtattgtgattggcgacctttgaaaaagtgtttttcaaaaaataccacatcaaattttgagttcataataatctctttgttccaaatatttttatttccaacaaattgcatagtgccaataaagtttggggcgtgtctaaatgcctccatgaacgattgttgacagaaatgaatgcatttttagatatgggttgaaacttcagatagcgaagttactttagatgtttgaactggcgaacagaaaaacagccattatctagtaccctctttaagactaggtttttctttaattttgaaagatgaagatagatatgagcctaaagtgtttttaagatgtccctgaccacgctgcgaaacatacaagaaagcgcgcagtcgaagcgcctcaggcacagctgcctcagaccaaggagcagttgtccgaaccgcaggtagttggattgctgcagggtgtagcgggctaaggagatcagggcggctttagagtggcttcccaggataacggcatactccgcattgatggccaattctgtaaaaacatgcaatcgatataagcaattaaaagtattaaaatgggatatactaatggtggtttgacttcctattaaactcttaattaaattaaaacgatgtaaaaggtcttaaatctgtctctaatcttgaatctaatcaaattttatggttggttcaaacaaaccaactgcacatgctggaaaattttcttttgaatttattaagcccaaaacggaaacgttttttctggggttaagaaaactgcttgggtgtactctttcatgcagaatcaaatagcaaaatctatacatagcgtacataggatttaaattttcgtctaagaaatcacgtcaatatgtgtaaaaacattgaaaattggttagatggcttcaaaccgcttttatttttaaatcctaacaagcctttttaccgcacaggcggagctttaccttttctgcacaggattagggactccataaagttgagttccaggacgtcggcccttagctggtgggcctcgcaaatgagccgtttgagctgctcatcgccgcagccgtcgatcatggcgctgatgtccagagaccagtgggacgctcgcaggacgaagatctcgctccacaccacctgaaagatggcgtcttgttggcagcgatccaacagagcgaactgctcgttggccttcgcctggcgcaggcacgtgacaaggatctgggcgaggatctggaagtgcagcgcctgggagtggggcgtcggggatggcgccgcctgagatggcggagcttgtctccggccagtgcggtagagagccacctgctggttgcgcggaccgcgctcctcctgaaccgcagcagcgttcattcccacggccaggcatcgctggaagcggcaggagggacaccagttccgccgcgccttgtccaccacacagttcccgaccagagcgatgcaggcgtagctgctcccgcgccgcacgctccgcttgaaaaagcaggagcacccatcgcagcaggacacgccgtagtgcttcccggagctctgatcgccgcacactgcgcaggcactgaagttcgacatggtcaccggttggcactgcttgccaatgagccaaagagtcgccgcggactgaatcagctcatcccggatattggcggttttatatgccacctggatgtgctacacccgcaaatgatatgcaaaccagttacacagagcaaaaatatgtttcctaactagagatggaaattgtatttcaatgggatccaaagaacaaattcctaaaagcgaaatatcactaaaatatattttattcaaacttaggactttcaaaactagaatgcaagcaccagaaaccttttaaaataattaagatatttgtgtaagaaatatatatagtttgataaaaattaaacagtatcggtatacgataagtttttgttatatatcaatctcgtatttaaatatttagtcgtagtcaagttaagatataaatccaaaaaaatttgatatagatttctcccagtgtagtagggccttgtgccaaagcgtgatttgaggatttttatttgcccgagacgcccctggcagggggcgtggcgcgtcaaaagtgacaatcatctactactattgcggaccgtgttaacaatttgtaaacaattattgttttgctctgtgattggacgtgcgctcgccactcgaggtgtccgcgttgaggtccttttgtcctgacatttcgggcaaacagcgaagacgttctttgggggttgggcttagagaagttcttattccggaaattctcgaactgtttaattagacgtttgttttaagtcgcaacttttacctaattctaggttaataggcgaatcacatcttaaacagagggatatattaaataatgagttcagtcatagaacggcttagatctcttcgtcggtgatatacactgataaacaattgggagcgggtggaagattgcattagtcaatcgaatgatctcaaacttgccttagccaaccatttcaggcctggaaagtactgtaatgcaagtacttgtattagtcagtgtcagtgactaattccttccatactcctttcaataggttcattcctagccagttactagctcacgttggtctaaaaatcttcttaaaagcaagcccataaaaagagaggttgc

SEQ ID NO: 21764 - DNA, 936 bp, DROSOPHILA
cacatccaggtggcatataaaaccgccaatatccgggatgagctgattcagtccgcggcgactctttggctcattggcaagcagtgccaaccggtgaccatgtcgaacttcagtgcctgcgcagtgtgcggcgatcagagctccgggaagcactacggcgtgtcctgctgcgatgggtgctcctgctttttcaagcggagcgtgcggcgcgggagcagctacgcctgcatcgctctggtcgggaactgtgtggtggacaaggcgcggcggaactggtgtccctcctgccgcttccagcgatgcctggccgtgggaatgaacgctgctgcggttcaggaggagcgcggtccgcgcaaccagcaggtggctctctaccgcactggccggagacaagctccgccatctcaggcggcgccatccccgacgccccactcccaggcgctgcacttccagatcctcgcccagatccttgtcacgtgcctgcgccaggcgaaggccaacgagcagttcgctctgttggatcgctgccaacaagacgccatctttcaggtggtgtggagcgagatcttcgtcctgcgagcgtcccactggtctctggacatcagcgccatgatcgacggctgcggcgatgagcagctcaaacggctcatttgcgaggcccaccagctaagggccgacgtcctggaactcaactttatggagtccctaatcctgtgcagaaaagaattggccatcaatgcggagtatgccgttatcctgggaagccactctaaagccgccctgatctccttagcccgctacaccctgcagcaatccaactacctgcggttcggacaactgctccttggtctgaggcagctgtgcctgaggcgcttcgactgcgcgctttcttgtatgtttcgcagcgtggtcagggacatcttaaaaacactttag

SEQ ID NO: 21765 - protein, 278 aa, DROSOPHILA
MSNFSACAVCGDQSSGKHYGVSCCDGCSCFFKRSVRRGSSYACIALVGNCVVDKARRNWCPSCRFQRCLAVGMNAAAVQEERGPRNQQVALYRTGRRQAPPSQAAPSPTPHSQALHFQILAQILVTCLRQAKANEQFALLDRCQQDAIFQVVWSEIFVLRASHWSLDISAMIDGCGDEQLKRLICEAHQLRADVLELNFMESLILCRKELAINAEYAVILGSHSKAALISLARYTLQQSNYLRFGQLLLGLRQLCLRRFDCALSCMFRSVVRDILKTL

SEQ ID NO: 21766 - DNA, 9517 bp, DROSOPHILA
aaaattgattttcctttatggaaggagagtgtggggcagctatttatagtcaacgtgtggcataaataaccgagtaattgctcaacaaaaaatctgctaatccgtcaccaaatagatgattgcgctgacagacttgataagaacacaatacacctgttgtgcaaatttgccattagtagccactaatctacgcccagcccacttgggcttagttaaatatttccatttatttactactccttaaacaaattccttaacccattagcgacgacgataaacattgaagtcctccgatgcaggacgtccatatcgcgttattttgcccacatgataatctgctgggccgggtccctgcggtatcctaggactattacacgccctcgacgatctgccaaatgagaactgtggacttcgctgcatcctcttgtcgcagttcttaaacccaaaggtgctgggcagattgtaggcaccagggccaggtcctaaaagaaatgaaatgatgttcaacaagtggaatttgcttgggctcggaagtttcttaccaaaagaacgattgcacgacatgcttttaaactaacgatttcaaaatttatttattttagcgaagttttggaatcgatgagcgtatgcaaaggttacgaaaggtcaggaactgtaagttatttttagaaatatgtaaaattttgaaactctaaaaagagttgtttgccgaacgagattctacttgggaatgaagaaaacttcccgaactccctttaactaaatggaaaagttaaaatcaaggcctagctgatgatgatgatgatccaatagataaaaatctgtctaatacaaataacactgattatggccctattagccagaaacgtaatcgtcaaatgctcttatcagccaaacttcctgctccttgtcttcgagtgaacctcaagtggcaagattaacagcaaatacctccagttgcgttttgccaaaagaaccaggtgtcaatcaggtggcagcgttcgaagtgaacggtcaatgggaaaaatgttcgccagcagaggaatgctggtgcttggagtgcttctggtatcagcaattggtaagtggccataagtcataaacagaaagtctaacttaaattggacctgcaggtggccaatcggaatcgatcccctgcaaactcatcgatgcagaacatggcaaagtgtgcgtctgcacggcggactattgtgattatctggagaatcccgtcctgacggacgaaaatgagtggttccttatctccagttccaaacagggacttcggttctccacaactagtgacaaattcggtaaggaggagaagtttaccgtgcaggattatgtggaacccacgcaggagactgcgaatgcgacaatcctgtctcgtttgctcgataaggtggtggacagtgcttttaccttggagtcccgggagagttccataactcgcactgtaaccctgcgactggacagaagtaagacccaccagaagatggttggtttcggtggcagctacaccggagcagtggaatacctggtagagaacttcaagcattcggaactggctgaccatctgtacaagtccttttacgccgaggatggactgggcttcaatctcatgcgagtttccattggcggctgtgactttgacttggaaccctggtcctatgccgaagaggagggcgacaccgagctatccgatatggatgaactaaacgcgcatgatgtgacgcgagttgcacagatcaagcgtctcattgaggtgtccggagtgaagaatctgttggtcaaaggagctgcctggagttccccgccctggatgaagacaaacaacaggtggacaggatttggacgcctcaagagggcttactaccagacttgggccgattaccatctgcgttggctaagacttatgaaggacaatggcattcccatttgggccatttccacgggcaacgaaccattgaatggcatcattttcatgtatttcgttaagttcatgagcttgggatggacgccacagactcaggccatttggctgaacgattatctgggtcccacgatccgtaactctgagttcaaggacatcaccctgtttggcaacgatgaccaacgctattcctttccccattggtttaaaatggtaagtagttcagtgttaataaatcaaaagacgcatgaccaaattagcaccaattaaacgacaaagttcacattacttatcgcggatatttccagatgaaccgcactcgaccaaactcgattgattacctcgatgggctatcgctgcactggtattgggatgaaatatttggcaacagctttatcgaacagaccaaggaatatgcccccgacaagattttgatagtttccgagtcctgcataggggacaagccctggcaggcagctgctcctctgctgggaagctgggagcgggccgagaagtatgccagagattacttgcttaacattaagctgggcttccatggctggattgactggaacatttgtctggacgagattggcggtcctaactacgtggacaacacggtggatgccccagtgattgtgaatacaacaagtgggatattttaatacttccatttattctgtttgtgattagtgatatgattttcttgcagcattcgaggagttttacaagcagcccatgttctatgccattggtcacttctccaagtgggttccagagggatccgttcgcatagatgcagtacctagtaatgttaatctggattccgttgcattcctgcgaccggacaacaaaatcaccgccgttctcttcaatagtggtcgcgccgatctggacatcactttggtggatagtattcggggtcagttcgttgtcaatgttccggccaaatccattcacactctgctgtacagttgaaaacttattttttctaaacaaaacaaaaaattaaataaagacatgttcaacttggtgatttccatttgtgaaataggcaaggtgttttatcaggcttaatgaagtcaacaaagttctcagtgcttggaaaattgcaattttcacacattttatttgggtttacaaccgaatcaaatcacacctaaattatatagattcatcagtggcagtttaccagtcgcataacgtatatctttttgtaatgaatccaaacgatactttatcagccttctcacttctcttgtgcgtcctgattctttccgctggacgcggcgaattactttttaatgcggatgacaatgtggtgcagctggattttgcatcattcgagtccggacttagtgaaccaacgtctgggaaactggtgcagttctttaacggattctgcgaggagagccagaactttataccagcgtttaagaatctatctcgtaaactttacaagtggcaccgattactcaaagtccatgtactagattgtggaaaggatgagaacgatatgatatgtagcatttacagcattcgtaaaacgccaactctgcgatattttccaccgagttataagctagcaccagacaacctgggtaccgagatcactcatcgaaatcccaaagagatacaatcgaagctggccctaaatcttcaaaagcttgattacttcaaaatgtttaagcggcaggacaatgtggctcatatatttcaaacgcacaaggatatcgagtacgttgcttttgttttccaaatgtgtttagaccactttctgccgcacttggaaacgggcaactcgatggaggaaaagtatgcctctcagggcgattgcaatgaggataatccaatagtttcgttgatcggaagaaatacccttcttgaattgctgccctacaggaaagtggttgtgcggatcttcgacaatcatgatgtttacaacaaatttggcatatcgcccgtacccaacttagtggttctggtaaataaagctggaaaactgctatttctcacacccgagatggatagcagtaaggcttatgtggctgccattaagcaattcttgatctttgtcgaccttaagccccagaaaccgttgccaaaaaccccacccgccaacataagtgaagccttaaggtatgagatattcgagcagcacaagcatcatccctctcggatctatcgagccgatctggaacgggctatcgatcaaatccttaatgtaaagttcccaggaactacgcactttgccggagcaaagatagttgttctgcgaaatttcgttaaactgatatacaactcaagtcccttgaagccagaggcgcgggaaaagctggcaaacctctattattccctgcacgtgaaaaagcaactttccggagtgggattcaaaaatttgctgctaaaatcagtaaaggattacgtgtttgatggaaagcaatatgttggttgtattgcctctcgtccttcgttgcgcggctttaattgctccctttgggttctattccattatcttagtgtggagtcgaaaaagcttaagcccaaatccgtgttgttagtatttctcggatatgtacgattctttatgaactgcaaggagtgtgatatgaaaataagcgagttcaaaaagctccgaccaattgcaaatgtgaccaatgatgatgaacagattttgtggctctgggaagcgcataattatgtcaacaaacagttggccggcgattctacagaggatccgaaattcccaaagattcagtttccaagcgaaagagattgtcccaagtgtagaaacaacgcgaccgaatggcgcaccgaagaagtattgcactatctgaaaggcatatataccttaaaaaaccttagttggttcggaatgtcatccggaaaacatgcaattgaataaagaaaaatgtaactttgtaatatttacgattaaaaaaaatggttaataaatggttatagatagtttcattaccttttaaattcccccttttggcgccactggttttgcataactttttctttcgattgcgtgcgcggatttccaagtgggatcaccttactggcgactgtagctactattcgccggtccggctgctttatcaaatcaacaaccgagccgggtcaagtggcgttcgaaaacataaacattaaattgagtgaaattcgttggtttgattattcgaaagcagtccggcctgctctcgtttctgagctcagttgtggacgggccttcgagcgggacgcattgtttttggcccgagatgccagatatgaagacaccactgcttggctttcttactacagtgatcgcaatctctgcaggtatgtgagaaaacaataaattcatgcctacctggccatgagactcctcaaatgaaacgcattgcaggtgctcccgactggcagttgccctgcgatttgcgcgaaacgagccatggaagcgtgtgtgtctgcaacagcacctactgcgattatctggaaccgccccagctcactgatatctcgcagattgtggtgattagctccagcaaggtgagtcaggaggattgtccgcactcgcggtcacatcattagctattgactgctccagcagacacgcttaggtcaattattccgattagattcaaagtctgtttggaatagttcgcttttcttctgtggcttgtcatgtctaatttattgctaaacgaaacggatttaaatttgattagttttatattgaacacataaaataattgcgaacattggtttattgaatgtaactattttcataggatggcttacgcttcaagaagacgacaggggatctctcgaaaaagaaacccataacaatagatgacaaacagttcaccgatgagaacttcaaggcagatgcaattgttgtggatcaggagagggcctggttgcagttggccaacattccccaaagcctgtgtaactaaaacgctttataaatagtttataaaaaaaaattatatgcccaaggaactcttgaataattttagttattaatgccagcattaagacatatcgcatattcgtgaaacgagagcagagttttcaaaatgtctccatttttggtggggcatttacaggaacagtctcgtacttactcaaagaacttccggtggagctacaggatcatgtctataggtgagttggatattaagcaataaacatatatatttaactagttattttgcagatcctattttcatccggttggaattgcttacaacactatacgaatgtccattggcggttccgactttgatatggaaccctgggcatacaatgaattgcctcttcatgatccgaaattgagcaactttaccgaactcgatccgcgggatctgcagaaagtggaacagttgaaacgccttaagatcatcggtaaagtagattctctgaaaatcatgggcgctgcctggagtgctccaacctggatgaagagcaataatcgctggacaggattcgggcagctgaaatcggaatactatcaaacgtgggccctctatcacctcaagtgagacaaatctggccatttcatttcccattcatgagcgattggcacttcttgcagatttctcgaactcatgcggtctaaaaatatgccgatttgggccatatccactggcaatgagccgttaaacggcgtcattggcttcttttttgtacacttcatgagcatgggctggacgccctggcagcaggtatgagccatttgcaattggccactggccatcgatcacgtttctggctattaagcatgtcgacatttttccgaccaggctatctggctgaacgacaatctgggcccgaccatcagaaactcggcggagagcaaggtgctcatctttggcaacgacgatcagcggtacacctacccaacgtggttccgaaaggtatgcgaaaaagaaaaaaaattatattaaatttaaatataattaaatgcaattgtacagatgcgctcctcccgcaacaattcgctgaactacttggatggcctagctgttcactggtactgggatgaactgataggaccacaactcatcgaccaggcacatacggatatgcccaataagctgctattgaacacggagtcctgcatcggtgataagccatggcagacccatggtcccgagctgggcagctggcagcgtggtgaaagctatatgagggcctatacccaggatctgacgcacaacttcaacggctggctggattggaatctcgtgctggacgaacagggcggtccgaactacgttaagaactttgtggatgctccgattattgtgaatgccacgagtcgttctgagatatacaaacagccgattttctatgccataggccacttctccaagtttctgccgccggactccgtgcgcatcgagacgcggatcgagaaccagagcaatcccttcacccagctgagtgttgttggcttccagcgaccagacggcagtgtggcagttgataatctacaatgggtaagtgcactcgaagaaaagatttaaattttgagtaattagttcctatttccgttcgaaatttgaccaaaaaatcaaaaatattggtccaaatgtagggtggcatatcgtgttaggctcaaaattacatttccaatcgattggcattcaaatttgaaaaaaaatttttttgtgaattttttgcaaaattttgtgatgttaccccttacaaaaaatgcaaaaattgactcaaaaattaatttttctaacttcaccgaaaagtgataggaatggttagcattggttattagctgtaaaaaacagttcctattttggctataggagtatttttagccaagttatgataaaactactcttcgtagatattgaattttggccaaattcgttttctgctgtttttgacccaaacattaactataatgaattaaatataaaatgttgagctcgtaacaaaattcccaattcaatgacattccttttgcatttaaatctgggaaaaattgtaatattggcaatcgttttaaaaatagtttaagaacatacttaatttcgaaatgattttttcaagtgcctagcacacttctatttcgagttgcatctgcgatggtgccgcttaagtgcgtcaacttaattgccgacaacgtttgcgattcacttttatgaatgcctctattggagggccagcagcactccgtgcattttatcaaacattttctgagatccgtaatcgattccgtaatcttgcagccagaacctgccggtggacgtgactctcgatgatagccagcgtggagcgatccagcttcgcctgccgccgcgctcctggcacacggtgctctacaaatgagattcccttcccggaacccgacaatatactcgtagtaatttaaactaggccagtaggagtggggatgggtccagctgccgctgcccagaggaccaattgaggctcaagtgacggcggcgcaacggaagccaataaattgcgctcaacaggatgagcaggataatggatacgtggagatgggggactcgactcgctaccaggatgtaatgcctgatatgcggagacaacggaaatttgtttaagctgctcaatttgccggaacgcgtctgtttacaatgaaatttcatttgccgtttacttttcatgttgttttttttttttatttttggtgttagggggggagctggggaacggcaaagtacaaacgtcatgcgtgttctatgtagtatataggaacatatctcggatcaagttgagtgacaactggcagtcgagcgggaacttatacggccaaccgaatattatctttgggctagcgttgcggtgtctggtctatttgttcaatatgctctataaatatgattgtcaattgagcgccaagcaaatgcattttcccattttcctcgcattttccccgcattttccgctctctctctctcgcacttagagcacaaaatggggcgttttatgtaagtctataaattaaaacatgaaacgcttataaatccatatgactgctggttgtggcagcaatgcactttcttttttgatttgataaaattttcaaaagcattattaactttgcatttatattatatttttaaatattcaataattaaaattaattgtgagcaaatagtatgtgagtgaatgcacaattatcttaaccacacaaaatggcttaaaataaacacgaaactatgaagaattttacatttattatattattatatatattaaaaatttagtaattatttttttttatgtatgtaattaagcagtgttcttaagtacaaaggtccttctgcagactgatttagccgtcagtaagacaatcactgggttattaatcccatacccttttgtgtcaagattttcagcgattccttggggcatccatcacttgcctcaagtgcagcatatgcattccgggggtttggttgcatatctgaagtgcttacaacaaaatacacttatcagcaatgagtgtgtcaattacatgccgccacaccctcaccctttctcaacataggaaagcagtggcaacattgggcaatgtgttgagtgcgatgatgcagtgca

SEQ ID NO: 21767 - DNA, 4861 bp, DROSOPHILA
ttcgaagtgaacggtcaatgggaaaaatgttcgccagcagaggaatgctggtgcttggagtgcttctggtatcagcaattggtggccaatcggaatcgatcccctgcaaactcatcgatgcagaacatggcaaagtgtgcgtctgcacggcggactattgtgattatctggagaatcccgtcctgacggacgaaaatgagtggttccttatctccagttccaaacagggacttcggttctccacaactagtgacaaattcggtaaggaggagaagtttaccgtgcaggattatgtggaacccacgcaggagactgcgaatgcgacaatcctgtctcgtttgctcgataaggtggtggacagtgcttttaccttggagtcccgggagagttccataactcgcactgtaaccctgcgactggacagaagtaagacccaccagaagatggttggtttcggtggcagctacaccggagcagtggaatacctggtagagaacttcaagcattcggaactggctgaccatctgtacaagtccttttacgccgaggatggactgggcttcaatctcatgcgagtttccattggcggctgtgactttgacttggaaccctggtcctatgccgaagaggagggcgacaccgagctatccgatatggatgaactaaacgcgcatgatgtgacgcgagttgcacagatcaagcgtctcattgaggtgtccggagtgaagaatctgttggtcaaaggagctgcctggagttccccgccctggatgaagacaaacaacaggtggacaggatttggacgcctcaagagggcttactaccagacttgggccgattaccatctgcgttggctaagacttatgaaggacaatggcattcccatttgggccatttccacgggcaacgaaccattgaatggcatcattttcatgtatttcgttaagttcatgagcttgggatggacgccacagactcaggccatttggctgaacgattatctgggtcccacgatccgtaactctgagttcaaggacatcaccctgtttggcaacgatgaccaacgctattcctttccccattggtttaaaatgatgaaccgcactcgaccaaactcgattgattacctcgatgggctatcgctgcactggtattgggatgaaatatttggcaacagctttatcgaacagaccaaggaatatgcccccgacaagattttgatagtttccgagtcctgcataggggacaagccctggcaggcagctgctcctctgctgggaagctgggagcgggccgagaagtatgccagagattacttgcttaacattaagctgggcttccatggctggattgactggaacatttgtctggacgagattggcggtcctaactacgtggacaacacggtggatgccccagtgattgtgaatacaacaacattcgaggagttttacaagcagcccatgttctatgccattggtcacttctccaagtgggttccagagggatccgttcgcatagatgcagtacctagtaatgttaatctggattccgttgcattcctgcgaccggacaacaaaatcaccgccgttctcttcaatagtggtcgcgccgatctggacatcactttggtggatagtattcgggccttctcacttctcttgtgcgtcctgattctttccgctggacgcggcgaattactttttaatgcggatgacaatgtggtgcagctggattttgcatcattcgagtccggacttagtgaaccaacgtctgggaaactggtgcagttctttaacggattctgcgaggagagccagaactttataccagcgtttaagaatctatctcgtaaactttacaagtggcaccgattactcaaagtccatgtactagattgtggaaaggatgagaacgatatgatatgtagcatttacagcattcgtaaaacgccaactctgcgatattttccaccgagttataagctagcaccagacaacctgggtaccgagatcactcatcgaaatcccaaagagatacaatcgaagctggccctaaatcttcaaaagcttgattacttcaaaatgtttaagcggcaggacaatgtggctcatatatttcaaacgcacaaggatatcgagtacgttgcttttgttttccaaatgtgtttagaccactttctgccgcacttggaaacgggcaactcgatggaggaaaagtatgcctctcagggcgattgcaatgaggataatccaatagtttcgttgatcggaagaaatacccttcttgaattgctgccctacaggaaagtggttgtgcggatcttcgacaatcatgatgtttacaacaaatttggcatatcgcccgtacccaacttagtggttctggtaaataaagctggaaaactgctatttctcacacccgagatggatagcagtaaggcttatgtggctgccattaagcaattcttgatctttgtcgaccttaagccccagaaaccgttgccaaaaaccccacccgccaacataagtgaagccttaaggtatgagatattcgagcagcacaagcatcatccctctcggatctatcgagccgatctggaacgggctatcgatcaaatccttaatgtaaagttcccaggaactacgcactttgccggagcaaagatagttgttctgcgaaatttcgttaaactgatatacaactcaagtcccttgaagccagaggcgcgggaaaagctggcaaacctctattattccctgcacgtgaaaaagcaactttccggagtgggattcaaaaatttgctgctaaaatcagtaaaggattacgtgtttgatggaaagcaatatgttggttgtattgcctctcgtccttcgttgcgcggctttaattgctccctttgggttctattccattatcttagtgtggagtcgaaaaagcttaagcccaaatccgtgttgttagtatttctcggatatgtacgattctttatgaactgcaaggagtgtgatatgaaaataagcgagttcaaaaagctccgaccaattgcaaatgtgaccaatgatgatgaacagattttgtggctctgggaagcgcataattatgtcaacaaacagttggccggcgattctacagaggatccgaaattcccaaagattcagtttccaagcgaaagagattgtcccaagtgtagaaacaacgcgaccgaatggcgcaccgaagaagtatgtgagaaaacaataaattcatgcctacctggccatgagactcctcaaatgaaacgcattgcaggtgctcccgactggcagttgccctgcgatttgcgcgaaacgagccatggaagcgtgtgtgtctgcaacagcacctactgcgattatctggaaccgccccagctcactgatatctcgcagattgtggtgattagctccagcaaggatggcttacgcttcaagaagacgacaggggatctctcgaaaaagaaacccataacaatagatgacaaacagttcaccgatgagaacttcaaggcagatgcaattgttgtggatcaggagagggcctggttgcaatcctattttcatccggttggaattgcttacaacactatacgaatgtccattggcggttccgactttgatatggaaccctgggcatacaatgaattgcctcttcatgatccgaaattgagcaactttaccgaactcgatccgcgggatctgcagaaagtggaacagttgaaacgccttaagatcatcggtaaagtagattctctgaaaatcatgggcgctgcctggagtgctccaacctggatgaagagcaataatcgctggacaggattcgggcagctgaaatcggaatactatcaaacgtgggccctctatcacctcaaatttctcgaactcatgcggtctaaaaatatgccgatttgggccatatccactggcaatgagccgttaaacggcgtcattggcttcttttttgtacacttcatgagcatgggctggacgccctggcagcaggctatctggctgaacgacaatctgggcccgaccatcagaaactcggcggagagcaaggtgctcatctttggcaacgacgatcagcggtacacctacccaacgtggttccgaaagatgcgctcctcccgcaacaattcgctgaactacttggatggcctagctgttcactggtactgggatgaactgataggaccacaactcatcgaccaggcacatacggatatgcccaataagctgctattgaacacggagtcctgcatcggtgataagccatggcagacccatggtcccgagctgggcagctggcagcgtggtgaaagctatatgagggcctatacccaggatctgacgcacaacttcaacggctggctggattggaatctcgtgctggacgaacagggcggtccgaactacgttaagaactttgtggatgctccgattattgtgaatgccacgagtcgttctgagatatacaaacagccgattttctatgccataggccacttctccaagtttctgccgccggactccgtgcgcatcgagacgcggatcgagaaccagagcaatcccttcacccagctgagtgttgttggcttccagcgaccagacggcagtgtggcagttgataatctacaatggtgcctagcacacttctatttcgagttgcatctgcgatggtgccgcttaaaggaccaattgaggctcaagtgacggcggcgcaacggaagccaataaattgcgctcaacaggatgagcaggataatggatacgtggagatgggggactcgactcgctaccaggatgtaatgcctgatatgcggagacaacggaaatttgtttaa

SEQ ID NO: 21768 - protein, 1567 aa, DROSOPHILA
MFASRGMLVLGVLLVSAIGGQSESIPCKLIDAEHGKVCVCTADYCDYLENPVLTDENEWFLISSSKQGLRFSTTSDKFGKEEKFTVQDYVEPTQETANATILSRLLDKVVDSAFTLESRESSITRTVTLRLDRSKTHQKMVGFGGSYTGAVEYLVENFKHSELADHLYKSFYAEDGLGFNLMRVSIGGCDFDLEPWSYAEEEGDTELSDMDELNAHDVTRVAQIKRLIEVSGVKNLLVKGAAWSSPPWMKTNNRWTGFGRLKRAYYQTWADYHLRWLRLMKDNGIPIWAISTGNEPLNGIIFMYFVKFMSLGWTPQTQAIWLNDYLGPTIRNSEFKDITLFGNDDQRYSFPHWFKMMNRTRPNSIDYLDGLSLHWYWDEIFGNSFIEQTKEYAPDKILIVSESCIGDKPWQAAAPLLGSWERAEKYARDYLLNIKLGFHGWIDWNICLDEIGGPNYVDNTVDAPVIVNTTTFEEFYKQPMFYAIGHFSKWVPEGSVRIDAVPSNVNLDSVAFLRPDNKITAVLFNSGRADLDITLVDSIRAFSLLLCVLILSAGRGELLFNADDNVVQLDFASFESGLSEPTSGKLVQFFNGFCEESQNFIPAFKNLSRKLYKWHRLLKVHVLDCGKDENDMICSIYSIRKTPTLRYFPPSYKLAPDNLGTEITHRNPKEIQSKLALNLQKLDYFKMFKRQDNVAHIFQTHKDIEYVAFVFQMCLDHFLPHLETGNSMEEKYASQGDCNEDNPIVSLIGRNTLLELLPYRKVVVRIFDNHDVYNKFGISPVPNLVVLVNKAGKLLFLTPEMDSSKAYVAAIKQFLIFVDLKPQKPLPKTPPANISEALRYEIFEQHKHHPSRIYRADLERAIDQILNVKFPGTTHFAGAKIVVLRNFVKLIYNSSPLKPEAREKLANLYYSLHVKKQLSGVGFKNLLLKSVKDYVFDGKQYVGCIASRPSLRGFNCSLWVLFHYLSVESKKLKPKSVLLVFLGYVRFFMNCKECDMKISEFKKLRPIANVTNDDEQILWLWEAHNYVNKQLAGDSTEDPKFPKIQFPSERDCPKCRNNATEWRTEEVCEKTINSCLPGHETPQMKRIAGAPDWQLPCDLRETSHGSVCVCNSTYCDYLEPPQLTDISQIVVISSSKDGLRFKKTTGDLSKKKPITIDDKQFTDENFKADAIVVDQERAWLQSYFHPVGIAYNTIRMSIGGSDFDMEPWAYNELPLHDPKLSNFTELDPRDLQKVEQLKRLKIIGKVDSLKIMGAAWSAPTWMKSNNRWTGFGQLKSEYYQTWALYHLKFLELMRSKNMPIWAISTGNEPLNGVIGFFFVHFMSMGWTPWQQAIWLNDNLGPTIRNSAESKVLIFGNDDQRYTYPTWFRKMRSSRNNSLNYLDGLAVHWYWDELIGPQLIDQAHTDMPNKLLLNTESCIGDKPWQTHGPELGSWQRGESYMRAYTQDLTHNFNGWLDWNLVLDEQGGPNYVKNFVDAPIIVNATSRSEIYKQPIFYAIGHFSKFLPPDSVRIETRIENQSNPFTQLSVVGFQRPDGSVAVDNLQWCLAHFYFELHLRWCRLKDQLRLK

SEQ ID NO: 21769 - DNA, 2730 bp, DROSOPHILA
gggccggagccaatgtactcggcgatgggctcaccacttgccaagtcgttgccggcgatgttggccagaatccagtgcttgaactcgcggaacttgggctccgctcggctgggggcatcgggatccgtcataatgagcgtgtagaactccccgggctgcgcgtcccactccacgactggctgatccttaacctgggtgggcgttagctccactccatccttggccaccaggttgttgctgtacgtgaccttgaataggaacgatttcacagttatttgcttgatttttacattgttgcgatctatcagctactttactttaagttagctaccttctgacctttgatcagaaagttgtgacgagatatttatctagatttctattaagctcgggtgttaaatgtttgaaatattttaacctggtctgcaagcacgtagttgagtacatactattcggatccaatttattaagacaaagatatcctctatatatttggatctttttagtgtgcttttgttagtggccccacctttaacaactggttcggcggctcgggaataacgtcgggtaccacctggtgggatctgaaaacctcctccacggagccagcttgaacggccagtaggcagcccaccaatggcagtagcactcgcagcatctttgtggagagattattcggtagacgataagatcttgagaaaaccaatatataggagctccgctttcgaataaggttggtctgcaactgaaaccagtttgccatgatgccatacttttaaagcgaagctcgaagctttttgtttagtaaacagctgggaaaaaatatactcaataattaaagttatctttgtttaaagtttcgcttcggagattatagattattattatacattatatttattatacatttattcatattatttgcaaattataccagttggtaatagagtaattaaagggactggatttgaaaaaaaatattttttaaatatatattatagatatttagaaatttatctgtttttacatgattctttttctttacagcatgctttgtagggatttgggagcctaattatgaggagaaagatactacttcttgccagatagttgcttgtataacttgggcacatagtcgtcccactgtgcctgaaaaaagtttccggcaatgggatctcccagcttgtacttgctcatgaacttggaggtgctgaaattggctcgcttgtcgccgctcgtttttgggattttgggctcgttgcaagtgagcttttggggctgtttgaagaccaggaagacgtaacgatgaagccccgtgccttgcggcggacctgcacccacatattcggtcaaaactacgccgttctcgacttggttccctggaatattgaccaccagccagtggtgccactcgcggaacttgggctccttgcgactgggcgcatccggatcggtcaggaggagcgtgtaaaaggcattcggatctgcatcccatttcacctttggctggctctgcacttgcgtgggtgtcaattcaccgcctacatccaccacctgtccaccaccataagtcacctggaacaacaaaatgacatggacgattgtaggcgctatttgtattagcttaccgtaagcaaagtggcaggacacgtcttcaggatatccggcacgatcttgtgcttagagaagcacacggtggaatcggacatttttagctgagtgggcaacaactaaaatgaaatttgaggtgccagaaaatttcgtattttaaggctacgccgactttaattctaacatttctggctgatagtcaatagatagccaatatttccaaaaatggtgtccttgtaatctgacctaaatatccttataaggacatactttcaatagcttcttctgagatatatttggaattatttttattggaagctggactctaaattcaaaagtgtgctacttgacgggcattgtgcgagatggctttgataagggatgggacatcggggctccattgggatgtgaagaagttcccagctaccggatggccaaatctgtatttctttgcgaaccgcttggtttcaaagccactgcgacccttaaccgagtgcttcggcagtttcgggaagtcaaacttggtgtagtccctctgtttgtagagcaggaagacgaaccgatgggttccggtccccttcagcggagtggcacccatgtatcccacgcgcacgtccccaagggccaacagattgccgggtatgttgaggaccatccagtgtaggaactcccggtgcgtgggtgttatagcattgggtacgtccggatccaccatcagcagggcgtagtagttttccggtgccgagggccactttacggagggttcatcacgcacttgcatgggttccagtacctttccacaatgtgctgctaaatgcccgtggtaagtaaccttttgtgggagcaattcaatttcataatatgattaaaagtatattatttaattttgaacagttgcctagaaatacaattgttgaattgggcatagcatacatttttttggttaaactaaattggaattcaaattcttagatatccgaatattatctcttaaataattctttatgagatcattatttgtgttttactcacattaagaaactcctgcggtccgatgtgtattacatctggtatcacatccaaggacctcatgatcttgctcacttccgtatccgactg

SEQ ID NO: 21770 - DNA, 677 bp, DROSOPHILA
ttgttgcccactcagctaaaaatgtccgattccaccgtgtgcttctctaagcacaagatcgtgccggatatcctgaagacgtgtcctgccactttgcttacggtgacttatggtggtggacaggtggtggatgtaggcggtgaattgacacccacgcaagtgcagagccagccaaaggtgaaatgggatgcagatccgaatgccttttacacgctcctcctgaccgatccggatgcgcccagtcgcaaggagcccaagttccgcgagtggcaccactggctggtggtcaatattccagggaaccaagtcgagaacggcgtagttttgaccgaatatgtgggtgcaggtccgccgcaaggcacggggcttcatcgttacgtcttcctggtcttcaaacagccccaaaagctcacttgcaacgagcccaaaatcccaaaaacgagcggcgacaagcgagccaatttcagcacctccaagttcatgagcaagtacaagctgggagatcccattgccggaaacttttttcaggcacagtgggacgactatgtgcccaagttatacaagcaactatctggcaagaagtagtatctttctcctcataattaggctcccaaatccctacaaagcatgctgtaaagaaaaagaatcatgtaaaaacagataaatttctaaatatc

SEQ ID NO: 21771 - protein, 187 aa, DROSOPHILA
MSDSTVCFSKHKIVPDILKTCPATLLTVTYGGGQVVDVGGELTPTQVQSQPKVKWDADPNAFYTLLLTDPDAPSRKEPKFREWHHWLVVNIPGNQVENGVVLTEYVGAGPPQGTGLHRYVFLVFKQPQKLTCNEPKIPKTSGDKRANFSTSKFMSKYKLGDPIAGNFFQAQWDDYVPKLYKQLSGKK

SEQ ID NO: 21772 - DNA, 3239 bp, DROSOPHILA
gtgccatgtttatagcccgtttcggtcatttcgatcccaatttgtacatgctgcgggagatctatcatttttcgtcgatggccatggaggtgattgcgctggagaatgactatgccagcttggcgggaatctgcgaaataattgacctcgagggcgtcaactcggataagatgcgacgctttgatagggttctatttcgcaaatggtggaactggctctacaattgcagcccccttaaagtgaaggagatgtatatcataaatatgcccaaggatattcagggtaccgtcatgtttctgtacaacgtgcttagcatgcaagtcaactatccggtgggtattgataacttaatcagcaagttatcaccttcgtgataaaattgtttttataaagtaaccattagagattcagtaccaattaaggctagatatgtttatcttatttcagatacgcgtgctgaagaacagcgaagagctaatcgagcacattggcaaggaatcgctgccggaggagtatggcggtaccaatggacatttgggtgaatgtgtggcctacatggaggacctgttgaatagctatcgtggttatttcgagcaggactgcaactacgggaccattgaggagctgcggcacggcgaaatagccacatatgaggcggaatttggagccaatggctccttccgtcgtctcaattgggattgataccagcacggaagcaggaaacctagaccctccctcccacaatagcgtttatccatataaacattccaaactctgctgtagtcgatcaattaaagataacacccacttatcaactatctatgcactcgtgtatctatatctaactgactgccgacgggtttcggctcgccgttccagctagtttacaaggtgttgccccgattagataagcgatgccgccgcaaaagccaataccatcactaccacggcgctgcgtcagtggttttggcattcagttactaatgaaccgagcgccggaatggcgaacaccctgagaactctcgacccaaagttggcggctctggccaaaagtgagtgcaacgaggagcaggcgcagcgagcggagattattgccaccattaagacatggatcaccaagtcgccgcaccttaaggcgcccacggatgagcagcttatcctggcctttctgcggcgttgccgtttcagccaggaggagaccaaacggcgattcgacaactactactccctgcgcagcgtgttcccggaggttctgggatcccgacaggtggacgaggccctgctcacccagttgcaacgcgggtgggttgaatgttccatttgctatataccctttttgccttaggctgctaaatatttcacaaaaccatacagaatacagctttctaatcagtggtgttaaacgtaacaaacattatcaataataatttattcactatctatgtgaatttctgactggaaattagttgcgtgttacgaaagacctatgttaagaaggtaaagatactttatttaatttctatttcgaattaacagaatccatgtgatacccatgcgacctgtgagtcccgaggggccaagggttatcatctcgcagttccgaaacatcgatcccaagaaatcgaatccccgcgaagccttcaaactgatcttcataatgttggaactattggctttggagtgcgataatgccgcgatttccggcttgatctgggttgtggatgccagagatgttaccatggagcagatgatgcagtacgatcccttcctgctgaagaaggcatttgctctggtggaccaatgcataccactgcgatttgttgagattcatatgatcaatatgcgcaaggagggacaaaccatattcaattttgtaacgaagtttttgccctccaaactgcctttcaaggtgaatctatcatcaaaaagcttgaattgcgttaggattggtaattaatctctacaatattctacacagttcgtggtccacaaaaagtcggaggatctgtaccagcacctgcccagagatgtgatgaccatcgagtatggtggcaccaatggctatcaggcagaggcagtggatcattggcgccagaagctgctggacagcaaggattatctggccaaggatgcccagtatggtactaatgagaaactgcgcgtcggattggccagtgcctgggccaatggagaactggacgggatgagcggttccttccgcaaattggagctagattaagtaagacgactctagttgctgttttgaattaccatttaattaagttctaatgctatacaaataatttaaggcctattcgggtcactgggtatctcgtgtatcctcttaaaaatagctttacaattgcctaaggtgctgatacttaagtgctaagtgctgcacttccgtttgaagttcacgtgcagagaagtgggtgcagttgctccggatgagggcggcgattgggtatctgaagcggagggcgtggccttattttgaatgggactcgtggtgctcttattgatgctctgaacaatcagatttagacagtccaaactggagccattggcattgccatcaaagtctatacaaaaatattttagataaatacatcaaatacttttttttttttacttttacctgtaaactgaccatatttctccatatgtttgttgtaaaaactaagtttatcttctagataagcgccagcataggagctctgcaaggaaaaacataaataaatacaaatggaaaaatcatatattttttttttagttggcctcaagcgaaattggggaaacaataaattacagaaaagtgtcgccgtcgaaatgacaacgtcaaatttgctccggtcctgtcaacttggccaacgagtgccatacagaatgcagtctaatgatgagattaagccaaaatttatgccagtaaagagattccacaggccaattaaaacgcattgaaccaccgcaccacacccattgtctgccccaacattgtggggcattgtgtgcagtgcactttagaggcaattaaattaattttgcgcatacgcagacgacagacaaggcatccggagattcggtcgggatttcattagaaaaattcgctataacgccgatgctaagcaaattataattgccacttctgggtgggtttccttgctgccccccccccccccccaaatccgcatctggtgcatccaaagtgccgtcacttcgtctgcaaggatcgacaaata

SEQ ID NO: 21773 - DNA, 936 bp, DROSOPHILA
atggcgaacaccctgagaactctcgacccaaagttggcggctctggccaaaagtgagtgcaacgaggagcaggcgcagcgagcggagattattgccaccattaagacatggatcaccaagtcgccgcaccttaaggcgcccacggatgagcagcttatcctggcctttctgcggcgttgccgtttcagccaggaggagaccaaacggcgattcgacaactactactccctgcgcagcgtgttcccggaggttctgggatcccgacaggtggacgaggccctgctcacccagttgcaacgcggaatccatgtgatacccatgcgacctgtgagtcccgaggggccaagggttatcatctcgcagttccgaaacatcgatcccaagaaatcgaatccccgcgaagccttcaaactgatcttcataatgttggaactattggctttggagtgcgataatgccgcgatttccggcttgatctgggttgtggatgccagagatgttaccatggagcagatgatgcagtacgatcccttcctgctgaagaaggcatttgctctggtggaccaatgcataccactgcgatttgttgagattcatatgatcaatatgcgcaaggagggacaaaccatattcaattttgtaacgaagtttttgccctccaaactgcctttcaagttcgtggtccacaaaaagtcggaggatctgtaccagcacctgcccagagatgtgatgaccatcgagtatggtggcaccaatggctatcaggcagaggcagtggatcattggcgccagaagctgctggacagcaaggattatctggccaaggatgcccagtatggtactaatgagaaactgcgcgtcggattggccagtgcctgggccaatggagaactggacgggatgagcggttccttccgcaaattggagctagattaa

SEQ ID NO: 21774 - protein, 311 aa, DROSOPHILA
MANTLRTLDPKLAALAKSECNEEQAQRAEIIATIKTWITKSPHLKAPTDEQLILAFLRRCRFSQEETKRRFDNYYSLRSVFPEVLGSRQVDEALLTQLQRGIHVIPMRPVSPEGPRVIISQFRNIDPKKSNPREAFKLIFIMLELLALECDNAAISGLIWVVDARDVTMEQMMQYDPFLLKKAFALVDQCIPLRFVEIHMINMRKEGQTIFNFVTKFLPSKLPFKFVVHKKSEDLYQHLPRDVMTIEYGGTNGYQAEAVDHWRQKLLDSKDYLAKDAQYGTNEKLRVGLASAWANGELDGMSGSFRKLELD

SEQ ID NO: 21775 - DNA, 2716 bp, DROSOPHILA
gtgcaggtgggggaaccgggatcagatcggattggttcggttcggaccaacttggttcattagctaaagcagacgccaccaaagttggccaactaacggaaatgttaattgtcaaatgaaatgagcgaacccagctgcgaaccggtttcgcttacaaaataagacatcataaattgtcgggaaaacattccaggtttccattgtgactctgctgactggcgacgtcgattgcctggcagttttcctattattgcttaattgtattgattaataggattttgagtgacatgcagagttgccgagctgcggagttgggttacgcgagtccaagcctcgagctaatgaacccgaagcctggcagagagagccgagttttccaccaggctcagttcgaaatgcaatttccaaccagttttcagcccccgaattccaaactgctttgtcggtttatggccaagacctgattctagccgcaagtgctggttattcagtttggggaacactcgaaatgtaaataaagcactgttaaatcttaaatgaatcttaaaataaataatgcaatattactaattcaataaatctctctaatgtttgctgatccaataatgtcggaaattgaagttagccagacaggaaatcttattttttacatgtgaggagtaattggattcgaaaattggttggggagcttttggctatgatatgtaacaaaaaacaataatttgttgtatatttagcaaatattataataacttaaaatgttttgtcattacgcactcaaaaatgttgtatgaagccagacaattgtctaacaacatatacaaaaatattacacatcatctgaatgactcgttttcggagcacacgctttaaaatcaattgaaacacgacgttacgttaaaaatagaatttaagtgcactggttacccgaacataaggaatagtcaaccgtagaatatcgtgttttgaatgctaaaacctctatgccatgcctgcacagctcttccgcatcgcctttgtctgcggttggccttcatcctcagccggtagagacccaatttggcattgccattcttgcctggccatggcagacttcgaaatccgcactctgtggcgaatggcgggccagtttccagttttcggtggcctgcttttcatcatctcggtccgcgccgaacgccaaaccagaactcgaactaatctgtgatctgcttttccacttccattcctcccgccccgcagaacttcaaggagaaagacctgggcaaggtggtgctgtacaccaccagcatgggcatcatccgggaaacctacacgaagtgtgccaacgtcaagcagatcctgcgcaccctgctggtcaagtttgaggagcgggacgtcttcatgagcgtggagtaccaggcggagatgcgccagcggatgcagagcggtcaggtgcgggtgccacagctgtacgtcgagggccagcacatcggggacgccgagaccgtggagcggatgaacgagtccggcgagctgaggcagctgctcaaaccgtacaagtccatggccagcacctacacctgccagacctgcggcggctaccgcctgctgccctgcccctcctgcaacgggtccaagaagtccgtgcaccgcaaccacttcactgccgagttcgtggccctcaagtgcatgaactgcgacgaggtgggcctggtcaagtgccacaattgctgagtcgcagtccgagtcccagttctagaattcgtaagcccagttagtctaagccgctaaaatccaatactctcggaatatgctaggcttaagtagtaaatagctaatccgtaccagggtctgtgttttcattttcgaggaaatagtgggggtaaatttacgtactagcaagtttcagcgaaaatttgggataagtactttgctaaaatatttaatctttaattaatttgcttagacgcattaagttttctgctaactcctgctaatgtgtcaaaaaatcatctttataaagaggtaagttatacaataggtaaattttaggtcaataaatgtttgtttaatcggtgaatcccaatgagaacatttaagttttgaataattatgtataagttcgtcaattttaagctaatacaacaatcaaaaccaacaagaatttagaaataaatataaagtcaaccaaggagccactatgttttcatcttatctcatgtataatgtatgtgtgcgatataaaggaggataatacatattctgggtggctagaatgttggtcggaccgatgaaatatttcaccaatagcaaaccaatatttgccgacaaataaattgtttgcctgaagtgcagagcatatatttcagatgcaattaaaccagtttagtgctttaatgtttcattaatttgcaattgaaccgcaaagtatgcaaagcctaatacctactttgcgttcggttaaatgctgcagcctcttgaatgtttgacggcgcttaaaattaatttggaaattcgctgattgcgttgcatactttttggcggactttctccagggctgccagcccacatggaggagctaagcccaacccagatgattcttcctttttggatcgtcttttattaccacatcacccggaccattgctctccagccttctgggaaagtgacttactgcccaactaaagcaaaggagcagccaaatctatgccaccgcagagctggccaagacaaa

SEQ ID NO: 21776 - DNA, 591 bp, DROSOPHILA
ctcttccgcatcgcctttgtctgcggttggccttcatcctcagccggtagagacccaatttggcattgccattcttgcctggccatggcagacttcgaaatccgcactctgtggcgaatggcgggccagtttccagttttcggtggcctgcttttcatcatctcgatgggcatcatccgggaaacctacacgaagtgtgccaacgtcaagcagatcctgcgcaccctgctggtcaagtttgaggagcgggacgtcttcatgagcgtggagtaccaggcggagatgcgccagcggatgcagagcggtcaggtgcgggtgccacagctgtacgtcgagggccagcacatcggggacgccgagaccgtggagcggatgaacgagtccggcgagctgaggcagctgctcaaaccgtacaagtccatggccagcacctacacctgccagacctgcggcggctaccgcctgctgccctgcccctcctgcaacgggtccaagaagtccgtgcaccgcaaccacttcactgccgagttcgtggccctcaagtgcatgaactgcgacgaggtgggcctggtcaagtgccacaattgctga

SEQ ID NO: 21777 - protein, 168 aa, DROSOPHILA
MADFEIRTLWRMAGQFPVFGGLLFIISMGIIRETYTKCANVKQILRTLLVKFEERDVFMSVEYQAEMRQRMQSGQVRVPQLYVEGQHIGDAETVERMNESGELRQLLKPYKSMASTYTCQTCGGYRLLPCPSCNGSKKSVHRNHFTAEFVALKCMNCDEVGLVKCHNC

SEQ ID NO: 21778 - DNA, 3243 bp, DROSOPHILA
tatctgaagtgcttacaacaaaatacacttatcagcaatgagtgtgtcaattacatgccgccacaccctcaccctttctcaacataggaaagcagtggcaacattgggcaatgtgttgagtgcgatgatgcagtgcagcgagctgttaatgaggctcattattaatatggcaacgatatgtttgcgtcatgagcaatgagctggctgcaaagggaatttacacgcgctgccctgtcagcagcaagatcaaagcacagcctccactggatgtactcactccaaatcctccctagtcccagtcccatggccataatgtgttatgagttattgacggagtgggtagatgatccgcttcctgggagcccagatcgccaattccacagttgtacagatctccagctctccggcttgtcagcagctgacagcgccatgtcatagcaatttgcccggctgtaggtgttccatgtcaactccaacggcacatcgccacctacccgggatgtcggtgtgtaatgccctctgacaggcaggcactcaaattgaatactcaatgctcacagcacggacgaccgacgaactggataccatttagcgttagatttatttcgggcattaaacgcagatcgcatttcaaaagacggtactctggtacactaacaaaaatggggacaaattgaaggctgaagtgaaaatattgatgccacaatagatggcacgcacatttgtaaaataaaatatgtatttgaatgtaagtatataagttcatactcatttcttctggataacattccacactaatttattctcagtgcatctgcaaccatttcccaaatgcacacgagatgggcacttaagagatctccaggcgccggatgtgcgctatttttcccatatatagtacatgtcactctctcccaaacatacttacatatccgaatcccattttccgagctggaaaaaagtgcaagttacaaatgcgtatagataagcatagaccatcatgcagcggtcgtattttcccaatccgattcgcctcggcgataagattagattagggggccacccaccaccagatgggggagcacggataggcaaattagatggcccaaatgccatcaaacaccgcatagccgttaccaaaatgcgacgtccgctctcgccgacattggccaagttggccgagcaggaggtgaacgagacgcccgacaggattcagcaggatattatcatcctgcgcgtgtggattcgccagcagccgcatctgcgcgcccgcacagatgtggacttcctgatcgccttcctcagacgctgccgttacagcctggaggagaccaagcgccggatcgatcgctacttcacccactacaatctatttccggagatcatgaataaccgctgtgtgactcaaagacttctggacatcaatcggatggggtgagctaatgttattccaacatttgaagttagtcatttatcttaagacgctggttttgctcttagagtttgtctctatccggatatgccaaagggtgatagccgtagtgccatgtttatagcccgtttcggtcatttcgatcccaatttgtacatgctgcgggagatctatcatttttcgtcgatggccatggaggtgattgcgctggagaatgactatgccagcttggcgggaatctgcgaaataattgacctcgagggcgtcaactcggataagatgcgacgctttgatagggttctatttcgcaaatggtggaactggctctacaattgcagcccccttaaagtgaaggagatgtatatcataaatatgcccaaggatattcagggtaccgtcatgtttctgtacaacgtgcttagcatgcaagtcaactatccggtgggtattgataacttaatcagcaagttatcaccttcgtgataaaattgtttttataaagtaaccattagagattcagtaccaattaaggctagatatgtttatcttatttcagatacgcgtgctgaagaacagcgaagagctaatcgagcacattggcaaggaatcgctgccggaggagtatggcggtaccaatggacatttgggtgaatgtgtggcctacatggaggacctgttgaatagctatcgtggttatttcgagcaggactgcaactacgggaccattgaggagctgcggcacggcgaaatagccacatatgaggcggaatttggagccaatggctccttccgtcgtctcaattgggattgataccagcacggaagcaggaaacctagaccctccctcccacaatagcgtttatccatataaacattccaaactctgctgtagtcgatcaattaaagataacacccacttatcaactatctatgcactcgtgtatctatatctaactgactgccgacgggtttcggctcgccgttccagctagtttacaaggtgttgccccgattagataagcgatgccgccgcaaaagccaataccatcactaccacggcgctgcgtcagtggttttggcattcagttactaatgaaccgagcgccggaatggcgaacaccctgagaactctcgacccaaagttggcggctctggccaaaagtgagtgcaacgaggagcaggcgcagcgagcggagattattgccaccattaagacatggatcaccaagtcgccgcaccttaaggcgcccacggatgagcagcttatcctggcctttctgcggcgttgccgtttcagccaggaggagaccaaacggcgattcgacaactactactccctgcgcagcgtgttcccggaggttctgggatcccgacaggtggacgaggccctgctcacccagttgcaacgcgggtgggttgaatgttccatttgctatataccctttttgccttaggctgctaaatatttcacaaaaccatacagaatacagctttctaatcagtggtgttaaacgtaacaaacattatcaataataatttattcactatctatgtgaatttctgactggaaattagttgcgtgttacgaaagacctatgttaagaaggtaaagatactttatttaatttctatttcgaattaacagaatccatgtgatacccatgcgacctgtgagtcccgaggggccaagggttatcatctcgcagttccgaaacatcgatcccaagaaatcgaatccccgcgaagccttcaaactgatcttcataatgttggaactattggctttggagtgcgataatgccgcgatttcc

SEQ ID NO: 21779 - DNA, 1062 bp, DROSOPHILA
atgcagcggtcgtattttcccaatccgattcgcctcggcgataagattagattagggggccacccaccaccagatgggggagcacggataggcaaattagatggcccaaatgccatcaaacaccgcatagccgttaccaaaatgcgacgtccgctctcgccgacattggccaagttggccgagcaggaggtgaacgagacgcccgacaggattcagcaggatattatcatcctgcgcgtgtggattcgccagcagccgcatctgcgcgcccgcacagatgtggacttcctgatcgccttcctcagacgctgccgttacagcctggaggagaccaagcgccggatcgatcgctacttcacccactacaatctatttccggagatcatgaataaccgctgtgtgactcaaagacttctggacatcaatcggatgggagtttgtctctatccggatatgccaaagggtgatagccgtagtgccatgtttatagcccgtttcggtcatttcgatcccaatttgtacatgctgcgggagatctatcatttttcgtcgatggccatggaggtgattgcgctggagaatgactatgccagcttggcgggaatctgcgaaataattgacctcgagggcgtcaactcggataagatgcgacgctttgatagggttctatttcgcaaatggtggaactggctctacaattgcagcccccttaaagtgaaggagatgtatatcataaatatgcccaaggatattcagggtaccgtcatgtttctgtacaacgtgcttagcatgcaagtcaactatccgatacgcgtgctgaagaacagcgaagagctaatcgagcacattggcaaggaatcgctgccggaggagtatggcggtaccaatggacatttgggtgaatgtgtggcctacatggaggacctgttgaatagctatcgtggttatttcgagcaggactgcaactacgggaccattgaggagctgcggcacggcgaaatagccacatatgaggcggaatttggagccaatggctccttccgtcgtctcaattgggattga

SEQ ID NO: 21780 - protein, 353 aa, DROSOPHILA
MQRSYFPNPIRLGDKIRLGGHPPPDGGARIGKLDGPNAIKHRIAVTKMRRPLSPTLAKLAEQEVNETPDRIQQDIIILRVWIRQQPHLRARTDVDFLIAFLRRCRYSLEETKRRIDRYFTHYNLFPEIMNNRCVTQRLLDINRMGVCLYPDMPKGDSRSAMFIARFGHFDPNLYMLREIYHFSSMAMEVIALENDYASLAGICEIIDLEGVNSDKMRRFDRVLFRKWWNWLYNCSPLKVKEMYIINMPKDIQGTVMFLYNVLSMQVNYPIRVLKNSEELIEHIGKESLPEEYGGTNGHLGECVAYMEDLLNSYRGYFEQDCNYGTIEELRHGEIATYEAEFGANGSFRRLNWD

SEQ ID NO: 21781 - DNA, 10138 bp, DROSOPHILA
gcccattcacgtttgcgcttttgtttttctgatacaagggatatgcgtgaaaagtccgcactagtttcacagcttttaactgacgcaatttcaacgaaatttagtgcatgatcttatcagacgtacatagtatgtgcgtgtctatttttaccaaggtaacatctgaactggaggttgtttttttgccatcagtcagcagcttggcaatcaagactgcgacacatcactttccaattagagcaattaagatcgaagttctccaattgcacctgttgttcagtttgtctgttgcctggtggcaatgtgcttttgcatgtcgtgctttccattcataaaatcgagctgcatgcggcaacggtgcgtatgaattacgtcagccaatggatgtttgtgggtttgtggagcattcgccattgagagtggagatgcgtaacttcccgtctcctctctgcgcgttgagagcgcttcagaaggtgtagagacagaaagagagagagagagagtggggcagcatcaaggagcttcaatatcaaaactacaccgtacaaaaataataagtaagtctatttagttttattttattagttttatttaaccaaaaaaaaaatcgtgcgcaattacttttaatttacattggtattcaaaaaatatatacacattatgctcttaaattacatatgaatattagaaaatgtcaacattttcttcagtgttatttgttgaacatcaatgtcctttgtgttcttcaaatattaaatacttatcgttaataatatatgtatgtatatacatacgtacatatttatgtatgtatgtacttttgccaggactggtttgtaaagaaatcagtaattattttaccgtttatgctcgctcagcgaaattcgctgaagagttgaagatggggtggggaagcgacgaacgggaagcttggagcattatttgagagcgaaaaaacggcgcaattctcgcacttacattggaaccgtcggtggggacggtcgcactgcttcatcagtcagtccgaaagagacaccgcgatagtgtgcaagtgaaaaggcgcttgtgttattgttattgttttcattacaaggcgcgcaaccgagtgcgaaatgctagtgttgtcgttgccccgctgaatggcgcaacggaatgaaaaaagtgataaaaccagaaaacaaatcgagtcaacaaaagcggagtacagtgcaagaaacagaaattgataagcataaaattaatgaaccctcgtaaacgccaccgttgcactttcggaagcggtattaaatggacaggtgggcaattgtgcatcaaattgttgcacttggagagatcggatgtacgtgtgtacatacatagctgctatgtaagctcatatgtgtgtcagtgtgccaagttgggagctttcagtgtcaacacgtgcatatactatctcattcgctcctatttaccttgctgtttatttacaacactttgttgctgtaattactctgccttatcggtgtgtgtgtatgtgtgttgttgtttcctgcactccgttataattcgctcactctctcgctctcggcctgttctctcttactcacaccctcatcctccctctcatttaattcaaaacgtatttgaatttattttcgtctttgcttacttttcttgtatttacattaaatacctcaatttattgcccagtcactgtgcatgcaatccgttgatgcaaatcaccagagcctgaaaatggtgaaaatgcatttagaaatcagcaaaacaagtgaaattgctactcatataaacatatcattaaagaaatgccaattttaaactggcttatgatatgaaagtaccctataccctatactattaatgctagttaactctatcagtaagacttctagtctcagtatttggcacgtaccttgaacacccgaaattcgatgaatatttcgaatttcgggtgtttagattgcattattcattccgaaattatttaactttaatagcatgcctttttagttttccgctttggtatacgtattgtacgacgtgtaaattcaatgaaatgaatgtgtttacaaaaataaaaataaaaactaaagtaaataaatgcaaaaaaaaaggggactaagtacagcaaatattgattaaaactgaacgtatttacactcaatcatttacttcttcatcttagagcacacttcctctcaaatgctgattctgattgctaaatatatctttgaatgcatgcagcaaacatcatcattaaagttaaatataagctgtgtgcttaaaaatagtttgtagttttgaataaacaagacaaatctgcgaataagagagccacacgtgtatgtccacctagccaacaggattggatagtaaaatgcgcaaaagaaagtattaagaggtcggttttacgcggtatcttatttttgtgattcttcaaattaggccagatgtgttaattgatatatgctgaaaagttgtttacctttcaaggcttttgttcaaccggactgtctggcaaactctttaatctgccggttggctgtagctcgctcacacgtctaatcttctctatcgagggggtgccataccgtacagccccttatcagaggcctttcgtctcgaaacccaagtcggaatgaactcttatcattttagcaaaaagtatatggcgatagcaaacgccaacgcgcgattgtaaattacacactcaagttttttcagtctgcttggttatttatcaataaaatgtagtctaggcccttgtcgaataaatttgataattttcagaggggcaaaaagcaacagatggagaattattagccacgtttagcgcacaataaaataaaatatatttttaattgtttaattagaagtgttaagccaagtagccgggtttattattttgttttcaagtgcctgtatgtatatgaattctatcaggcaccaaagtaaattaatactcagaaggcttgtgtgtttaatttgatgttaaaagagttatagataataatacgtaagtagtgtatgtaattaataaaatgactaaggattttttatgagagttttttttagaggattgaaagcaatatggaattcaataaagaaataagtttaaggcgtctgaatttaagtaacacttatctggcttaaagaaacaaacgatgaagacatgataacatatttagagggcgtgttattaagtaacatgcagttgttttgaattaaggccgactattaagaactttagatcacctaattcagtccatttaacaccctgtcaatctcaattgtgattattcgccgggtgatgaaagctaaatgagcgaatcacatatgagataagcgagacaaaaatttagtcagctgcacgtaaattcccatccaaaagtgctaagccctgatccaaaaacgccagctttgcccatctggatggagaattcgtgtacgtgcatgtgtgtgtgtgtgagttcgtgtgctttgttgatttcgacgaatttcagtctgccgccaccatgatacacttttatgcccccctaaaaaacgtacactcgtatgttatgtacattcttcatacatacatctacatgtgatatcaatgggcttaaggcgttctatgtacatacatagctaacggagcccagaatttgtgtgtgctctgcgcctgttacccgaagcaaacaaaaaaaaaatgtaacttgccctctttctggggaactgcagaccaactactatcccacactcatacacgaccgataggaactatagattgctgtataaacaatttttgagaaaaatttgctaaccttgaaccgttggcaaaaaactttcacaatgaaaaaagttcagtatcaaggacccagaaatgtgtagcgagtcgatttcggagcgtttttcatatggcaaacgagcagtggccaacgctgcgtatacgtaaccaagttgtgtggtgcaaagaaaagtctcatgtgaacgtgtgtgtgtgtgtgtgtgcttgtgcttttgaggatgttaaatatcgtaagcatctacatatgtatatgtatgtgtgcatggggatgtgcgtttaaggtttttgaacttgttttcggtaattttccaccatccagcctgtttttgggtcaatttatttatgctaaaatatatcgaaacccgaagaagaagataaaatgattaaaaatacaccagcaaatataaaaatccaacaaaaaatactggtatttagaaacagcgtatgaaaacagaaagctcacaactacttagaaattccttcggcatttcggaaaggcggcaatcaaaacaaagtgtgcaaaatgtttaagtttattcatatatgtacctaatacatatgcatgagtataagtgctacacgcgaaataaaatagctaaaaatacaaacaaatatgcgcacgagagtacaaatgtacatatatacattgttacgctgatatatcgagcatgcctcgttaatgggagccatcacgataccgtggtatggcagccagggccctacacagataaaaattccgaagtccacatattttaaaaaatattaaaaatgcagaaaatatttaaacaaaaataatgtgtttgacaacaaaattttttgaagcgcgattgattgttttagatttatttatttggtttccaaaatatgacatacaacattttaacgatatacattttcgtttgtgtacactgatgcaagcataaaaatcaagtatacgtaccgtcggccatttgaaaatatttctacttatgtataaacagcgtagttagcaaagcgagaagattggtcacacatatttaataaaaggctatgccgctttcccctctcccctctttgaacttgcgaaagtaaaacttaaatggaaattgtattcaacgtgaagaactatagatgctcttctgagaataatgatacgttaagacgacgggtaatgaactcagaaagaaaatagtgctaagcagatagcaaattatcttggacacgaccattcttcaatccattttaaaagattaggtctcttggtgcaaacgcgttaaatggctttatatataaataaaaataaaaacagatagaaatactttgcgataatatcgtaaagtgcacttggatctagactttggacgcgggggaaatgcttccaagcttaatataaataaaaagtgatctttattttgcaataatacaatcatggaagggctataaatcaagtaataatcttatcaaaatgagtcgcagcttgttggctttcatctaatcggtgtaatagttagttacaattgggtgttaaaaacagttgcctgttactaagcagacatgatttattctttggcattaggaaaatgcgggaaaacaacaatattaagcatcatagcaaatagcaataaatatcagttgaagtgatttgttttttctttctgtctcaatggttttattaataaatattaaggcgacaaagatctttatggcccatgattggcaatttccaaaatcatttcttaatttgcagcatttatatatttataattattaaatactcgaatttattgctgatccttcagttcaaggggttatttttcgtcacgcagctcatttccagcttggtcattatacgatcggttattacttaccgtttataaggtatataaatatttgactttatttaattgttgcattatttatggacgtgtttggccagcaagtcacctttaccttaatacaaggccccaagatttagccataattctcggttgatagtgaaactagactgaacaaaaaagagagtgagagcgttgcggcgagaggcgatttaaatacttgttcgccacattcaaacctatagataagtcttgcgactcgtcagacagagcgtcataaatatttattttacatttttatttttttcatttattttttttttttttttcttatttgccgcctctctgtgtcggtcttcctcttcgcgaacggcgacgcgttggaaatgttttcgattttcgcgctgggcggtttagttcccgttcgctggcggaactatttggtcgtatacggcgcaagagcactaaccagcccagctaaaataagtatagatcaaccgggaatacagaaaatatagaaaatttgcaaacaccacaacacaacactaggcatttgtacaaaaccacctacaagtaagccggggttcaaatttcagcttaagctaaaaattattccttgggtttcacacccacaagtcgtagatagttaagcaaaatttcgagttttatgtaacatcactctgccctgtccatccacagaatctcaattgcacttggagccaacggtcggcgagcaatgttaggctaggagccggagaccacagccaccagaatgtccagctagcagaaccaggatccccgtcttgatctcagccaggtgccgcagtcagaacacaacgcccagaaaagtgaagaactcgtattcggagcacaattctggttaccatagatggctcacttcagtggtcatcgccagccggcgacggtgccgtcccatttcaaggatctcttcaccaatggccagttgggtgcggcggaggagagcaacaataatgaccagaacgagcaggagaatcgtcccagtaacaataacaatgctggaccttcggatcccgcctgctgggtcttcggttacggatccttgtgctggcatcctggctttaattacaccaagtgcattacgggatatattcgaggatatgttcgccgcttctggcagggcaacgtcacacatcgcggctgtgaagagaaggtaggtgggataaaccaaatcgtggatttagaaacgtctggtccgcgtctgttgacgttttgctcgtgtgtttacccaacaactagcggtggtgatctggtaattattttattacctccgctgtttgttttgaacagttgccagttttcagtgatcaggaggcacgcgttatctattcgtcgcgcgttatcagttgtgtttggctaatggtgaacaacaagtgaaattagcatttaccagcgtctagagcgactgccaattaagatacagattgttgctaatcgaggcaggacaagcccctttcgaatagatatcaattcgtttcggagaaccagtttgggatccaaattggaatatttttgtattctttaaggggggtggggtgctaatactataatttttggtgctcaattgaggtcatgctatttttgcaagcttgtaatctaagcatttccaagtaaaaacgaaaaacgaaggcaaaatgtaatataaaaataaatagtaataaaggaattgaaatcccttattcggctattttccctgcgatcgcgacaaatgtcaacaatttcgaaataagtcaaggtccataatatgtatgtataaccccagttatatacatgtgcaatgtcgtaaataatgcacatatacagaaggtaaacaaaaagcgcgctagctagcccccaagtctttgtgcaggcgatgaatacacaatctccacaaacgaaagtgtataaaatacagcccagtgctaatgtgtacttttattctttgttacagcctggacgtgttgcaacgctcgttgaggacaaagaggtgagtaaagtataaagatcatgattccaaggggggtgggggttatatatatatatgttatgatatcgttgtataaaaaagggagtgcgccgtccgagtttcccaatgtaagccccattctgtgtaggcggtttctcagacgagaaagtgtgtgaacaccacccgccgagtcctaccaactcgtccatatctaagattactctggcagatttccgcagacaacctggcgcgtaaggattcggataaaatcctcttcatccatacgccaggcgaaattccgcagaatataggcgaatgcaccacccaccacaggggtggtgggtgttttgtgcacactttttacaccttgatactttctatcctaggcccggggactttcgcccagggcattatcagttgagttaccaggaactcgttttgtggccccgagagacaagcatggaagactcaaaccggcatcacatttgctgctatcagcgctatttatacgcgccatcagcggaaaaacgagttgggaatcataaccagccgaacgcgatatgaatagcacaccccaatccgaaagatacgggttcaaaacccgcgcggggcgaactcattaaatatttttagatctatgtgaaccacatgtttttgtgtattttattaaatatacatttcccatttttgattgcagggaatcacttggggctgcgcctacagaataacaggcagcacggcactggattatctcaagcagcgggagtgcacactgggtaagtaaatcgaattgaagagaagtggggaccatcatttgagctaacccacgatgactccaacaggtggctatgcaacaatcgataccaagttcttcccgcgcgtcgcctcgcaggacacgcccttcagcggcgaggcggtcgaggtactggtctatgtggcgacgccagagaatatctattggttgggcgatgacccggtcgaggagattgcccagcagatcgtatcctgccgcggtcccagcggacacaatgccgagtacctgttgcgcctggccctgttcatgcacgaggagattcccggcgtgagggacgatcatctgttcgagctggagcaattggttttagaggaactgtaccgccgccaaatacctctgtcatctgtgatgggccgcaatccagataggatacgccgcgactcgcacgaggacatccgccgcccgccatccttcgagttcacctcccgtgtgcccgacaccaagctgcgttgcctgaacatttgatttctggtgtgctggcggccaagtgctatgcaggtcgcgttttttgctacagcaaattccaaattattgatcgacattttagcttgttaggtaaccagagtctattgccaaatttgacgtatttctttaaattgtaaataatcctaggcctaatcataagcagcaactcctccataagtgatctgatttagccaataagctaggattaagcacaaaaaaactttttacacgcaactgtcagggagttaaattacatatgaaaagaaatgaatacagtatttgggtttttaattaaatacaaaagcattcgcgcaaaatgtgaatatgtgggatcgtctagatcaggcgaaactaaaactaattggtgaggatttcggcggcacgattctccatcagtttctccatgttcgtgatggcgcccatccatgtgtccagagtgctggccatgccgacaatctggctgcggttgaggacgcgtggttgcacccacgacatgttaaccactccagccacttggtcaatctcgccgcggacgagatccaaagccagagccttcatgataagcagttccacttccttggcgggcagtttggtctcttgcgcgatgtcggtaaaggagatggctcgctcgatggctgagcgcttgaaggtcatctccatgaggcaaaggagggagatcttctggcgcaacttgacctcctgggcagccaaatcgggaatcttggaccagattttcttcatgtcattaaacctgcaaaggaataatagaaagtgttagttactgcagatattaaattgctattactacacacttgttaatatcgcccgtgttgaaggctttaagaagttccatgagccactcattttccgtgcccttaagcgactcaagaatgggatgagccagcaattcgcctatgttgtagacaccatcgcccaagagagcagccagacccaagaagaatgcctgctgggcccattgatcacgggggtactcatccatggagcagcccagaaactgtaggccacatcggtagtaatcgctgtgcttgcccactcgccgataatactgggatgccagcatgtagtatttgccgtgaacgggcgtcacattacccgcttcctctaggacatcacgcagttcctcgatgatcttcttggtggcattcagatcgttcaggttgctgaggtacagattaccctgcatcacctgcagataccaaacggcctcgtcgcagatcttcaccttgtccttcatcttctccaagaactcg

SEQ ID NO: 21782 - DNA, 1682 bp, DROSOPHILA
gtcgcactgcttcatcagtcagtccgaaagagacaccgcgatagtgtgcaagtgaaaaggcgcttgtgttattgttattgttttcattacaaggcgcgcaaccgagtgcgaaatgctagtgttgtcgttgccccgctgaatggcgcaacggaatgaaaaaagtgataaaaccagaaaacaaatcgagtcaacaaaagcggagtacagtgcaagaaacagaaattgataagcataaaattaatgaaccctcgtaaacgccaccgttgcactttcggaagcggtattaaatggacaggtgggcaattgtgcatcaaattgttgcacttggagagatcggatgtacgtgtgtacatacatagctgctataatctcaattgcacttggagccaacggtcggcgagcaatgttaggctaggagccggagaccacagccaccagaatgtccagctagcagaaccaggatccccgtcttgatctcagccaggtgccgcagtcagaacacaacgcccagaaaagtgaagaactcgtattcggagcacaattctggttaccatagatggctcacttcagtggtcatcgccagccggcgacggtgccgtcccatttcaaggatctcttcaccaatggccagttgggtgcggcggaggagagcaacaataatgaccagaacgagcaggagaatcgtcccagtaacaataacaatgctggaccttcggatcccgcctgctgggtcttcggttacggatccttgtgctggcatcctggctttaattacaccaagtgcattacgggatatattcgaggatatgttcgccgcttctggcagggcaacgtcacacatcgcggctgtgaagagaagcctggacgtgttgcaacgctcgttgaggacaaagagggaatcacttggggctgcgcctacagaataacaggcagcacggcactggattatctcaagcagcgggagtgcacactgggtggctatgcaacaatcgataccaagttcttcccgcgcgtcgcctcgcaggacacgcccttcagcggcgaggcggtcgaggtactggtctatgtggcgacgccagagaatatctattggttgggcgatgacccggtcgaggagattgcccagcagatcgtatcctgccgcggtcccagcggacacaatgccgagtacctgttgcgcctggccctgttcatgcacgaggagattcccggcgtgagggacgatcatctgttcgagctggagcaattggttttagaggaactgtaccgccgccaaatacctctgtcatctgtgatgggccgcaatccagataggatacgccgcgactcgcacgaggacatccgccgcccgccatccttcgagttcacctcccgtgtgcccgacaccaagctgcgttgcctgaacatttgatttctggtgtgctggcggccaagtgctatgcaggtcgcgttttttgctacagcaaattccaaattattgatcgacattttagcttgttaggtaaccagagtctattgccaaatttgacgtatttctttaaattgtaaataatcctaggcctaatcataagcagcaactcctccataagtgatctgatttagccaataagctaggattaagcacaaaaaaactttttacacgcaactgtcagggagttaaattacatatgaaaagaaatgaa

SEQ ID NO: 21783 - protein, 284 aa, DROSOPHILA
MAHFSGHRQPATVPSHFKDLFTNGQLGAAEESNNNDQNEQENRPSNNNNAGPSDPACWVFGYGSLCWHPGFNYTKCITGYIRGYVRRFWQGNVTHRGCEEKPGRVATLVEDKEGITWGCAYRITGSTALDYLKQRECTLGGYATIDTKFFPRVASQDTPFSGEAVEVLVYVATPENIYWLGDDPVEEIAQQIVSCRGPSGHNAEYLLRLALFMHEEIPGVRDDHLFELEQLVLEELYRRQIPLSSVMGRNPDRIRRDSHEDIRRPPSFEFTSRVPDTKLRCLNI

SEQ ID NO: 21784 - DNA, 4871 bp, DROSOPHILA
gtgtaatagttagttacaattgggtgttaaaaacagttgcctgttactaagcagacatgatttattctttggcattaggaaaatgcgggaaaacaacaatattaagcatcatagcaaatagcaataaatatcagttgaagtgatttgttttttctttctgtctcaatggttttattaataaatattaaggcgacaaagatctttatggcccatgattggcaatttccaaaatcatttcttaatttgcagcatttatatatttataattattaaatactcgaatttattgctgatccttcagttcaaggggttatttttcgtcacgcagctcatttccagcttggtcattatacgatcggttattacttaccgtttataaggtatataaatatttgactttatttaattgttgcattatttatggacgtgtttggccagcaagtcacctttaccttaatacaaggccccaagatttagccataattctcggttgatagtgaaactagactgaacaaaaaagagagtgagagcgttgcggcgagaggcgatttaaatacttgttcgccacattcaaacctatagataagtcttgcgactcgtcagacagagcgtcataaatatttattttacatttttatttttttcatttattttttttttttttttcttatttgccgcctctctgtgtcggtcttcctcttcgcgaacggcgacgcgttggaaatgttttcgattttcgcgctgggcggtttagttcccgttcgctggcggaactatttggtcgtatacggcgcaagagcactaaccagcccagctaaaataagtatagatcaaccgggaatacagaaaatatagaaaatttgcaaacaccacaacacaacactaggcatttgtacaaaaccacctacaagtaagccggggttcaaatttcagcttaagctaaaaattattccttgggtttcacacccacaagtcgtagatagttaagcaaaatttcgagttttatgtaacatcactctgccctgtccatccacagaatctcaattgcacttggagccaacggtcggcgagcaatgttaggctaggagccggagaccacagccaccagaatgtccagctagcagaaccaggatccccgtcttgatctcagccaggtgccgcagtcagaacacaacgcccagaaaagtgaagaactcgtattcggagcacaattctggttaccatagatggctcacttcagtggtcatcgccagccggcgacggtgccgtcccatttcaaggatctcttcaccaatggccagttgggtgcggcggaggagagcaacaataatgaccagaacgagcaggagaatcgtcccagtaacaataacaatgctggaccttcggatcccgcctgctgggtcttcggttacggatccttgtgctggcatcctggctttaattacaccaagtgcattacgggatatattcgaggatatgttcgccgcttctggcagggcaacgtcacacatcgcggctgtgaagagaaggtaggtgggataaaccaaatcgtggatttagaaacgtctggtccgcgtctgttgacgttttgctcgtgtgtttacccaacaactagcggtggtgatctggtaattattttattacctccgctgtttgttttgaacagttgccagttttcagtgatcaggaggcacgcgttatctattcgtcgcgcgttatcagttgtgtttggctaatggtgaacaacaagtgaaattagcatttaccagcgtctagagcgactgccaattaagatacagattgttgctaatcgaggcaggacaagcccctttcgaatagatatcaattcgtttcggagaaccagtttgggatccaaattggaatatttttgtattctttaaggggggtggggtgctaatactataatttttggtgctcaattgaggtcatgctatttttgcaagcttgtaatctaagcatttccaagtaaaaacgaaaaacgaaggcaaaatgtaatataaaaataaatagtaataaaggaattgaaatcccttattcggctattttccctgcgatcgcgacaaatgtcaacaatttcgaaataagtcaaggtccataatatgtatgtataaccccagttatatacatgtgcaatgtcgtaaataatgcacatatacagaaggtaaacaaaaagcgcgctagctagcccccaagtctttgtgcaggcgatgaatacacaatctccacaaacgaaagtgtataaaatacagcccagtgctaatgtgtacttttattctttgttacagcctggacgtgttgcaacgctcgttgaggacaaagaggtgagtaaagtataaagatcatgattccaaggggggtgggggttatatatatatatgttatgatatcgttgtataaaaaagggagtgcgccgtccgagtttcccaatgtaagccccattctgtgtaggcggtttctcagacgagaaagtgtgtgaacaccacccgccgagtcctaccaactcgtccatatctaagattactctggcagatttccgcagacaacctggcgcgtaaggattcggataaaatcctcttcatccatacgccaggcgaaattccgcagaatataggcgaatgcaccacccaccacaggggtggtgggtgttttgtgcacactttttacaccttgatactttctatcctaggcccggggactttcgcccagggcattatcagttgagttaccaggaactcgttttgtggccccgagagacaagcatggaagactcaaaccggcatcacatttgctgctatcagcgctatttatacgcgccatcagcggaaaaacgagttgggaatcataaccagccgaacgcgatatgaatagcacaccccaatccgaaagatacgggttcaaaacccgcgcggggcgaactcattaaatatttttagatctatgtgaaccacatgtttttgtgtattttattaaatatacatttcccatttttgattgcagggaatcacttggggctgcgcctacagaataacaggcagcacggcactggattatctcaagcagcgggagtgcacactgggtaagtaaatcgaattgaagagaagtggggaccatcatttgagctaacccacgatgactccaacaggtggctatgcaacaatcgataccaagttcttcccgcgcgtcgcctcgcaggacacgcccttcagcggcgaggcggtcgaggtactggtctatgtggcgacgccagagaatatctattggttgggcgatgacccggtcgaggagattgcccagcagatcgtatcctgccgcggtcccagcggacacaatgccgagtacctgttgcgcctggccctgttcatgcacgaggagattcccggcgtgagggacgatcatctgttcgagctggagcaattggttttagaggaactgtaccgccgccaaatacctctgtcatctgtgatgggccgcaatccagataggatacgccgcgactcgcacgaggacatccgccgcccgccatccttcgagttcacctcccgtgtgcccgacaccaagctgcgttgcctgaacatttgatttctggtgtgctggcggccaagtgctatgcaggtcgcgttttttgctacagcaaattccaaattattgatcgacattttagcttgttaggtaaccagagtctattgccaaatttgacgtatttctttaaattgtaaataatcctaggcctaatcataagcagcaactcctccataagtgatctgatttagccaataagctaggattaagcacaaaaaaactttttacacgcaactgtcagggagttaaattacatatgaaaagaaatgaatacagtatttgggtttttaattaaatacaaaagcattcgcgcaaaatgtgaatatgtgggatcgtctagatcaggcgaaactaaaactaattggtgaggatttcggcggcacgattctccatcagtttctccatgttcgtgatggcgcccatccatgtgtccagagtgctggccatgccgacaatctggctgcggttgaggacgcgtggttgcacccacgacatgttaaccactccagccacttggtcaatctcgccgcggacgagatccaaagccagagccttcatgataagcagttccacttccttggcgggcagtttggtctcttgcgcgatgtcggtaaaggagatggctcgctcgatggctgagcgcttgaaggtcatctccatgaggcaaaggagggagatcttctggcgcaacttgacctcctgggcagccaaatcgggaatcttggaccagattttcttcatgtcattaaacctgcaaaggaataatagaaagtgttagttactgcagatattaaattgctattactacacacttgttaatatcgcccgtgttgaaggctttaagaagttccatgagccactcattttccgtgcccttaagcgactcaagaatgggatgagccagcaattcgcctatgttgtagacaccatcgcccaagagagcagccagacccaagaagaatgcctgctgggcccattgatcacgggggtactcatccatggagcagcccagaaactgtaggccacatcggtagtaatcgctgtgcttgcccactcgccgataatactgggatgccagcatgtagtatttgccgtgaacgggcgtcacattacccgcttcctctaggacatcacgcagttcctcgatgatcttcttggtggcattcagatcgttcaggttgctgaggtacagattaccctgcatcacctgcagataccaaacggcctcgtcgcagatcttcaccttgtccttcatcttctccaagaactcg

SEQ ID NO: 21785 - DNA, 1352 bp, DROSOPHILA
ttttatgtaacatcactctgccctgtccatccacagaatctcaattgcacttggagccaacggtcggcgagcaatgttaggctaggagccggagaccacagccaccagaatgtccagctagcagaaccaggatccccgtcttgatctcagccaggtgccgcagtcagaacacaacgcccagaaaagtgaagaactcgtattcggagcacaattctggttaccatagatggctcacttcagtggtcatcgccagccggcgacggtgccgtcccatttcaaggatctcttcaccaatggccagttgggtgcggcggaggagagcaacaataatgaccagaacgagcaggagaatcgtcccagtaacaataacaatgctggaccttcggatcccgcctgctgggtcttcggttacggatccttgtgctggcatcctggctttaattacaccaagtgcattacgggatatattcgaggatatgttcgccgcttctggcagggcaacgtcacacatcgcggctgtgaagagaagcctggacgtgttgcaacgctcgttgaggacaaagagggaatcacttggggctgcgcctacagaataacaggcagcacggcactggattatctcaagcagcgggagtgcacactgggtggctatgcaacaatcgataccaagttcttcccgcgcgtcgcctcgcaggacacgcccttcagcggcgaggcggtcgaggtactggtctatgtggcgacgccagagaatatctattggttgggcgatgacccggtcgaggagattgcccagcagatcgtatcctgccgcggtcccagcggacacaatgccgagtacctgttgcgcctggccctgttcatgcacgaggagattcccggcgtgagggacgatcatctgttcgagctggagcaattggttttagaggaactgtaccgccgccaaatacctctgtcatctgtgatgggccgcaatccagataggatacgccgcgactcgcacgaggacatccgccgcccgccatccttcgagttcacctcccgtgtgcccgacaccaagctgcgttgcctgaacatttgatttctggtgtgctggcggccaagtgctatgcaggtcgcgttttttgctacagcaaattccaaattattgatcgacattttagcttgttaggtaaccagagtctattgccaaatttgacgtatttctttaaattgtaaataatcctaggcctaatcataagcagcaactcctccataagtgatctgatttagccaataagctaggattaagcacaaaaaaactttttacacgcaactgtcagggagttaaattacatatgaaaagaaatgaa

SEQ ID NO: 21786 - protein, 284 aa, DROSOPHILA; identical to SEQ ID NO: 21783

SEQ ID NO: 21787 - DNA, 5101 bp, DROSOPHILA
acgcgttaaatggctttatatataaataaaaataaaaacagatagaaatactttgcgataatatcgtaaagtgcacttggatctagactttggacgcgggggaaatgcttccaagcttaatataaataaaaagtgatctttattttgcaataatacaatcatggaagggctataaatcaagtaataatcttatcaaaatgagtcgcagcttgttggctttcatctaatcggtgtaatagttagttacaattgggtgttaaaaacagttgcctgttactaagcagacatgatttattctttggcattaggaaaatgcgggaaaacaacaatattaagcatcatagcaaatagcaataaatatcagttgaagtgatttgttttttctttctgtctcaatggttttattaataaatattaaggcgacaaagatctttatggcccatgattggcaatttccaaaatcatttcttaatttgcagcatttatatatttataattattaaatactcgaatttattgctgatccttcagttcaaggggttatttttcgtcacgcagctcatttccagcttggtcattatacgatcggttattacttaccgtttataaggtatataaatatttgactttatttaattgttgcattatttatggacgtgtttggccagcaagtcacctttaccttaatacaaggccccaagatttagccataattctcggttgatagtgaaactagactgaacaaaaaagagagtgagagcgttgcggcgagaggcgatttaaatacttgttcgccacattcaaacctatagataagtcttgcgactcgtcagacagagcgtcataaatatttattttacatttttatttttttcatttattttttttttttttttcttatttgccgcctctctgtgtcggtcttcctcttcgcgaacggcgacgcgttggaaatgttttcgattttcgcgctgggcggtttagttcccgttcgctggcggaactatttggtcgtatacggcgcaagagcactaaccagcccagctaaaataagtatagatcaaccgggaatacagaaaatatagaaaatttgcaaacaccacaacacaacactaggcatttgtacaaaaccacctacaagtaagccggggttcaaatttcagcttaagctaaaaattattccttgggtttcacacccacaagtcgtagatagttaagcaaaatttcgagttttatgtaacatcactctgccctgtccatccacagaatctcaattgcacttggagccaacggtcggcgagcaatgttaggctaggagccggagaccacagccaccagaatgtccagctagcagaaccaggatccccgtcttgatctcagccaggtgccgcagtcagaacacaacgcccagaaaagtgaagaactcgtattcggagcacaattctggttaccatagatggctcacttcagtggtcatcgccagccggcgacggtgccgtcccatttcaaggatctcttcaccaatggccagttgggtgcggcggaggagagcaacaataatgaccagaacgagcaggagaatcgtcccagtaacaataacaatgctggaccttcggatcccgcctgctgggtcttcggttacggatccttgtgctggcatcctggctttaattacaccaagtgcattacgggatatattcgaggatatgttcgccgcttctggcagggcaacgtcacacatcgcggctgtgaagagaaggtaggtgggataaaccaaatcgtggatttagaaacgtctggtccgcgtctgttgacgttttgctcgtgtgtttacccaacaactagcggtggtgatctggtaattattttattacctccgctgtttgttttgaacagttgccagttttcagtgatcaggaggcacgcgttatctattcgtcgcgcgttatcagttgtgtttggctaatggtgaacaacaagtgaaattagcatttaccagcgtctagagcgactgccaattaagatacagattgttgctaatcgaggcaggacaagcccctttcgaatagatatcaattcgtttcggagaaccagtttgggatccaaattggaatatttttgtattctttaaggggggtggggtgctaatactataatttttggtgctcaattgaggtcatgctatttttgcaagcttgtaatctaagcatttccaagtaaaaacgaaaaacgaaggcaaaatgtaatataaaaataaatagtaataaaggaattgaaatcccttattcggctattttccctgcgatcgcgacaaatgtcaacaatttcgaaataagtcaaggtccataatatgtatgtataaccccagttatatacatgtgcaatgtcgtaaataatgcacatatacagaaggtaaacaaaaagcgcgctagctagcccccaagtctttgtgcaggcgatgaatacacaatctccacaaacgaaagtgtataaaatacagcccagtgctaatgtgtacttttattctttgttacagcctggacgtgttgcaacgctcgttgaggacaaagaggtgagtaaagtataaagatcatgattccaaggggggtgggggttatatatatatatgttatgatatcgttgtataaaaaagggagtgcgccgtccgagtttcccaatgtaagccccattctgtgtaggcggtttctcagacgagaaagtgtgtgaacaccacccgccgagtcctaccaactcgtccatatctaagattactctggcagatttccgcagacaacctggcgcgtaaggattcggataaaatcctcttcatccatacgccaggcgaaattccgcagaatataggcgaatgcaccacccaccacaggggtggtgggtgttttgtgcacactttttacaccttgatactttctatcctaggcccggggactttcgcccagggcattatcagttgagttaccaggaactcgttttgtggccccgagagacaagcatggaagactcaaaccggcatcacatttgctgctatcagcgctatttatacgcgccatcagcggaaaaacgagttgggaatcataaccagccgaacgcgatatgaatagcacaccccaatccgaaagatacgggttcaaaacccgcgcggggcgaactcattaaatatttttagatctatgtgaaccacatgtttttgtgtattttattaaatatacatttcccatttttgattgcagggaatcacttggggctgcgcctacagaataacaggcagcacggcactggattatctcaagcagcgggagtgcacactgggtaagtaaatcgaattgaagagaagtggggaccatcatttgagctaacccacgatgactccaacaggtggctatgcaacaatcgataccaagttcttcccgcgcgtcgcctcgcaggacacgcccttcagcggcgaggcggtcgaggtactggtctatgtggcgacgccagagaatatctattggttgggcgatgacccggtcgaggagattgcccagcagatcgtatcctgccgcggtcccagcggacacaatgccgagtacctgttgcgcctggccctgttcatgcacgaggagattcccggcgtgagggacgatcatctgttcgagctggagcaattggttttagaggaactgtaccgccgccaaatacctctgtcatctgtgatgggccgcaatccagataggatacgccgcgactcgcacgaggacatccgccgcccgccatccttcgagttcacctcccgtgtgcccgacaccaagctgcgttgcctgaacatttgatttctggtgtgctggcggccaagtgctatgcaggtcgcgttttttgctacagcaaattccaaattattgatcgacattttagcttgttaggtaaccagagtctattgccaaatttgacgtatttctttaaattgtaaataatcctaggcctaatcataagcagcaactcctccataagtgatctgatttagccaataagctaggattaagcacaaaaaaactttttacacgcaactgtcagggagttaaattacatatgaaaagaaatgaatacagtatttgggtttttaattaaatacaaaagcattcgcgcaaaatgtgaatatgtgggatcgtctagatcaggcgaaactaaaactaattggtgaggatttcggcggcacgattctccatcagtttctccatgttcgtgatggcgcccatccatgtgtccagagtgctggccatgccgacaatctggctgcggttgaggacgcgtggttgcacccacgacatgttaaccactccagccacttggtcaatctcgccgcggacgagatccaaagccagagccttcatgataagcagttccacttccttggcgggcagtttggtctcttgcgcgatgtcggtaaaggagatggctcgctcgatggctgagcgcttgaaggtcatctccatgaggcaaaggagggagatcttctggcgcaacttgacctcctgggcagccaaatcgggaatcttggaccagattttcttcatgtcattaaacctgcaaaggaataatagaaagtgttagttactgcagatattaaattgctattactacacacttgttaatatcgcccgtgttgaaggctttaagaagttccatgagccactcattttccgtgcccttaagcgactcaagaatgggatgagccagcaattcgcctatgttgtagacaccatcgcccaagagagcagccagacccaagaagaatgcctgctgggcccattgatcacgggggtactcatccatggagcagcccagaaactgtaggccacatcggtagtaatcgctgtgcttgcccactcgccgataatactgggatgccagcatgtagtatttgccgtgaacgggcgtcacattacccgcttcctctaggacatcacgcagttcctcgatgatcttcttggtggcattcagatcgttcaggttgctgaggtacagattaccctgcatcacctgcagataccaaacggcctcgtcgcagatcttcaccttgtccttcatcttctccaagaactcg

SEQ ID NO: 21788 - DNA, 1456 bp, DROSOPHILA
gaactatttggtcgtatacggcgcaagagcactaaccagcccagctaaaataagtatagatcaaccgggaatacagaaaatatagaaaatttgcaaacaccacaacacaacactaggcatttgtacaaaaccacctacaaaatctcaattgcacttggagccaacggtcggcgagcaatgttaggctaggagccggagaccacagccaccagaatgtccagctagcagaaccaggatccccgtcttgatctcagccaggtgccgcagtcagaacacaacgcccagaaaagtgaagaactcgtattcggagcacaattctggttaccatagatggctcacttcagtggtcatcgccagccggcgacggtgccgtcccatttcaaggatctcttcaccaatggccagttgggtgcggcggaggagagcaacaataatgaccagaacgagcaggagaatcgtcccagtaacaataacaatgctggaccttcggatcccgcctgctgggtcttcggttacggatccttgtgctggcatcctggctttaattacaccaagtgcattacgggatatattcgaggatatgttcgccgcttctggcagggcaacgtcacacatcgcggctgtgaagagaagcctggacgtgttgcaacgctcgttgaggacaaagagggaatcacttggggctgcgcctacagaataacaggcagcacggcactggattatctcaagcagcgggagtgcacactgggtggctatgcaacaatcgataccaagttcttcccgcgcgtcgcctcgcaggacacgcccttcagcggcgaggcggtcgaggtactggtctatgtggcgacgccagagaatatctattggttgggcgatgacccggtcgaggagattgcccagcagatcgtatcctgccgcggtcccagcggacacaatgccgagtacctgttgcgcctggccctgttcatgcacgaggagattcccggcgtgagggacgatcatctgttcgagctggagcaattggttttagaggaactgtaccgccgccaaatacctctgtcatctgtgatgggccgcaatccagataggatacgccgcgactcgcacgaggacatccgccgcccgccatccttcgagttcacctcccgtgtgcccgacaccaagctgcgttgcctgaacatttgatttctggtgtgctggcggccaagtgctatgcaggtcgcgttttttgctacagcaaattccaaattattgatcgacattttagcttgttaggtaaccagagtctattgccaaatttgacgtatttctttaaattgtaaataatcctaggcctaatcataagcagcaactcctccataagtgatctgatttagccaataagctaggattaagcacaaaaaaactttttacacgcaactgtcagggagttaaattacatatgaaaagaaatgaa

SEQ ID NO: 21789 - protein, 284 aa, DROSOPHILA; identical to SEQ ID NO: 21783

SEQ ID NO: 21790 - DNA, 4324 bp, DROSOPHILA
tttttagcaaattgcgggcaaattaatgagcagtaaattagccgcattagtacggcggccacatgccgcggacgccgcagaagttagtggctttctgccactgccactgtcatggccacgattgccgcttctggacgagagccatgtgagccggagtcgcccacctgtacgaaggtcagggatccggcgtaatgtcacgtggttaatgaaattacagctaattagatcaccctttgaaccttttgggagtgcagctcgaaagcggcgttcgcaaatacaaagccaactgtagaccactgcgtttgaatttacactgggatgagtattgctgagcaagcgcattttcatttaacaaattgttgtaaaatggaattgactgttgtttttggactgcgtggccgtgtgtaatacactattcattcgattttaataatcacgttgctattgcattttataagtaagtattagagagtaacccaaaatgttacctttttatcctccctataatgttaattattataatgttattataatgttaaattgtagtttttaattatattttaatatagagtgattttgggtgacctggccaactttacatataaaaagattttactttcggctcgaaattgtcaaagtgaaatgtgtggctgagaccactgtgcaccattgatgccccacagctctggtgttgcgatactgaaatactgtagcctgcccgctgagcgatggccgtcactcagctggttgacttgaaatcaaaactgtagcagaaacgtgcgatgttgcgatgcggcgctggtggtggtgttttgttagtggatgccaaggaggcgggggtggtgcagtgttagtgtggcgcagcagtggtgctgcacgcagcgtggtttgatgctgctgctaatgttgctgccactgtgccgttgccgcagctgctccaataaaactgagttgcatgcaacggctggtaattagtctccacaaggcgctgcatcagctgccatcgaatcgcgatcgatcgcatccatgtgaaggatacgccgtgctctcgtcctttttctagtgtcgtgtgttgtgttgagtgttctaccgaaaaagaaaacctgaaaaagcccgaaaatgcccaggcatttagttgccagctgccttctgctggctttgggtctgaacatgagcctggcggcgattcacaagcgcagtggtgcgaattcgttgggagtggatcccgagggcaagcctgcggcgaatcctgcggtcagtgtggagaacactgacctgctggacaagctgagctggaagtgcgcaaacaacgcgagttgcctgtacggggtggccaatggtctcatggcctcctaccgtcgtggtgaaaccctcaagctggggcttttcgacctggtcaagttgcccgaactagatgcttctcggaagcacaagtggggcactgggcgcggtctctccggctttatggactttgtgacggaaaacgccatcagggtgcccgtgggccccatggtcttcagtgttcagcgagccgaggacgacagcgattatatcgaggtagcactgctgaaaaagacctccagcagcacaggtaatcaccagagaaggggttccaatcagcgaatgacatatgcctgtcgtccaggctatgccattcgagcccggcggagaagcttagccagctgctcctgcttggcatgcgactggtatttgaacgttaccagcctatcaatggccctaaaaagtccttggcagatgcttacactgggaaattataaatgaatgaagatttattttctgaatatattacaatacatacgcaatttaaatctatattcaagaaccactaaatattagttctgatcaaactacttagcactatcatctaaacggattagatggttgtataattctttggtaatcagaaccactctcgaaaacctcatatattcactgtgttatgagtgtagactttctgggaactttcaaagctacattctcacccaatgcatatcaatgactttgtccgggagcccaaactgccattacttacccctatttaatctgacattcgatatacatggcagcagcgcatcaatcatgccgcatctcttgacaagaaaggggcgggccgatcaaatcctgtgtcgcactattacgtatacgtacgagtgccattaaagccataaagcctaaaacgtgtcttgtttcccaaaattccactacaggccgcctgcaggtcaatggaggaggactactgggcggtggaggtggcctgggaggaaatggtggcggtggaggaggcctgctgggcggcggaggtggtgacaatggcggcggaggcggtcttctgggcggacggaggcggcaccagcaccaggacaagaagcagttccagatgttcatacccatgtacctggcggccacaacattcgggtggacgatggtggccgcaaaggcggtggggctcctgactctcaaggctctgatcctgtccaaaattgccttcgtggtagccgcaatagtgttgatcaagaagctcatggacaacgccagcgaaaagtgagtatatgaaaatgtagactacaaattattattaggattgatgctccttaccaaatatgaaattacatgaaatttacgtaggcaaattgcgtaaaacttaggcttttgaaagaaagatacttttggataatgatatgatgatgatgatggcaagatggtgggcgtgacatttttgggcgcaagagtagcttctaaaagcaccatttaatatttggctgttattacatttacgctaccttacgtagaaatcggaacgcaaataaaatcgccttgatatttgtttaaaggatgatgtaccagttcccggaacagacgccgtacatgatgccgtacggcatggactatccgcttcatggagcggaaatatcgccggaaatgtacccgtcatcgctgcaccacctggcgatggccggaggcggccagctgccaggacatcccggacatccgggactggagagtctgagcgccgagagccacctgcactccgcccaggtgtccagcgacggcagcaataacacacaggtgctcgccgccttgggtggtctgggtggactgggacacaagatcaaacgtgaggactcgtggatggcgaagagtaagtgtaagttgatccagcttctcgattttccagatagaggggggacgggttggggcgcccagacttcccatatcctcccgtttttttcgcctctctatggcccaggtaaattccctgaatgcggtggcggtggcagcggctgcagccgagggcgccattgaggacgactatgatgacgaagagtgaatagtgtacttattactttcatttgttacccggcacgcacacaccaggtgtgggttctcgagggaataacacacacacagcacaaatattcgctgtcaatggttttttgtgcagcttgtaatttgcgttgcatacttttagaaagcttctttcattagattgcaaacgaatagtcaaagtggcttcctattgatgagggctttctttgagatttatttgtaagacaattcattttggatttaatcagaatctaaaatagagtttaggacaaacacaaggaaatggtctttgtgaatggaagaactatttatattatctatatatctatatatatttatagatatatatatatatctatctaactatatctatatctatctatatctatctatatctatctattttcatttatttgagccctaacggcgctgaagttcagttagcattacaaatagttgcataccttttaactggtgcgagtatttgatgttagacagaagagaaataccgaagtctgaaggtgggatagcaatttcaagcgttatccttcaaaaataaaaataggatattttataaatgaagaatgagagtgctgagaaattcaattagagtggaggtgtggattttgcaataaactccaagttggttgggaatgcgttccacccttttacactgaacttaaaaacacattgaccttctccacccgggaatttattacatcagtacaccttgcttccccaacaccacaaacctctcatatccaaacccgtggctaaaaaatggctcccggcaccaattacttgcctgattaacgatggaactcgtgttgcagccactcccgcccggcgacccctgatctacaactacgtgcaaccacacatgccgtactaccgctcctgaggcgagaattagccaattagcagctaccaaagacccttgggaggaggaggttgctctgctgccataggacccaaa

SEQ ID NO: 21791 - DNA, 1289 bp, DROSOPHILA
ccatcgaatcgcgatcgatcgcatccatgtgaaggatacgccgtgctctcgtcctttttctagtgtcgtgtgttgtgttgagtgttctaccgaaaaagaaaacctgaaaaagcccgaaaatgcccaggcatttagttgccagctgccttctgctggctttgggtctgaacatgagcctggcggcgattcacaagcgcagtggtgcgaattcgttgggagtggatcccgagggcaagcctgcggcgaatcctgcggtcagtgtggagaacactgacctgctggacaagctgagctggaagtgcgcaaacaacgcgagttgcctgtacggggtggccaatggtctcatggcctcctaccgtcgtggtgaaaccctcaagctggggcttttcgacctggtcaagttgcccgaactagatgcttctcggaagcacaagtggggcactgggcgcggtctctccggctttatggactttgtgacggaaaacgccatcagggtgcccgtgggccccatggtcttcagtgttcagcgagccgaggacgacagcgattatatcgaggtagcactgctgaaaaagacctccagcagcacaggccgcctgcaggtcaatggaggaggactactgggcggtggaggtggcctgggaggaaatggtggcggtggaggaggcctgctgggcggcggaggtggtgacaatggcggcggaggcggtcttctgggcggacggaggcggcaccagcaccaggacaagaagcagttccagatgttcatacccatgtacctggcggccacaacattcgggtggacgatggtggccgcaaaggcggtggggctcctgactctcaaggctctgatcctgtccaaaattgccttcgtggtagccgcaatagtgttgatcaagaagctcatggacaacgccagcgaaaagatgatgtaccagttcccggaacagacgccgtacatgatgccgtacggcatggactatccgcttcatggagcggaaatatcgccggaaatgtacccgtcatcgctgcaccacctggcgatggccggaggcggccagctgccaggacatcccggacatccgggactggagagtctgagcgccgagagccacctgcactccgcccaggtgtccagcgacggcagcaataacacacaggtgctcgccgccttgggtggtctgggtggactgggacacaagatcaaacgtgaggactcgtggatggcgaagagtaaattccctgaatgcggtggcggtggcagcggctgcagccgagggcgccattga

SEQ ID NO: 21792 - protein, 389 aa, DROSOPHILA
MPRHLVASCLLLALGLNMSLAAIHKRSGANSLGVDPEGKPAANPAVSVENTDLLDKLSWKCANNASCLYGVANGLMASYRRGETLKLGLFDLVKLPELDASRKHKWGTGRGLSGFMDFVTENAIRVPVGPMVFSVQRAEDDSDYIEVALLKKTSSSTGRLQVNGGGLLGGGGGLGGNGGGGGGLLGGGGGDNGGGGGLLGGRRRHQHQDKKQFQMFIPMYLAATTFGWTMVAAKAVGLLTLKALILSKIAFVVAAIVLIKKLMDNASEKMMYQFPEQTPYMMPYGMDYPLHGAEISPEMYPSSLHHLAMAGGGQLPGHPGHPGLESLSAESHLHSAQVSSDGSNNTQVLAALGGLGGLGHKIKREDSWMAKSKFPECGGGGSGCSRGRH

SEQ ID NO: 21793 - DNA, 7417 bp, DROSOPHILA
agaagaaatttgttaagtttgatttccagaatccgttgtgtctttcactttttacgcttgcttctgcccataaaaaaacaagcagtgtggcgcgataaacgtggctgaccggcgagcgtggataaccaactgaatgtggaggcagctccatcgcaccaaagatgcggccaactttgggtgttggtaggtgagtttattcgtaccaacacaggtgcatatgaatcgagacacagacacgaactacctttctcaagctgggaaagagatggagagaaagtaagtacacctgtccgcctgaaagtatgccacaactctgctgactttttaaatgaattgacaaagagtcgcagtaaaatctggctaatccggataacaaattaattttctgtttcttttaagcccctttatgtcggcataaaatgcttaaaagattataaaattttaatttgacaagaaatttgaagtaattatataatttaataaactggtgtgtaccgaataagaacagaatataatgtttttaattaatacatctgttgttcttatgacagctatataatattagatagatttttgataaatcaaagaattcgaataaattgtgaccaaaagtaacgaaggtaaattttttaagattttatatttggaaatagaaaggatacttttggaaaagtttcatccagatcgcttcaaaacttagacacggacggacaaatttcactgcgttgccaacttctgactaaaaaaagtataccctctgcatgggtcttaattcatcttaaatcttaattcatgtaaataattctgttgaattaataatgtatacacttttaaaaacctttgtttttcacgggttttatttattatgtttccatttaaatacagtggaaatacgagacactgagtagactcttaaaatgtcttaaccactcttacacaaattaaacttacaggtatgactcttttgcttcatgttattcgtttattttattttattaatttagcttgcggcagcagttgtctcattgttttcattggtttcaatcaattttagcacagtatcattttggttactgctatccgacagcaatcttgttggctcagttgacattgtaataggagcttcagttgtggaagttgtagtagtagtggtcgttgtctttcgccattttcccctccactttttcgggccatcttggctgaccggcttcactcgattcccgattatcttgtgccaatcagacccgttgtcctgctgaaaagagtttctaagtagattttcgcccatcatcccattgaagcccattgcgatttggtcatccactttatccttggacggtctcctcatcagatctatctgtggattcagcattaagggcatcggatacggaatataaaatggaacagggtagaaaactggttgggcgtttagggtattcattggtccctggtcgacaattggggagctctcccaaattccgggcatcagcaataggtcctgcattgaaagtctctgttttggtttataatttgggccagctttctgcttctgaggaggtcgtgtttttttattttgcttctctgtggaagccgttgtaaaactggctagtgaaatagtggtagcagaatctggaattactgtggtctccatatcctgttccgatttgattgactccccaaatgctggccttgctgtgggatttgaaagcacgatcagtggagctttgggatcatctccgctagctttcagcactgccagtaactgctcactgtgcaattgaccaaaacattgcctagtaaggcatacgaaaacggctaccactaaaaatacgtagtaaaatataaaaatgttatctgtttaattatttttacttaccacttaaaattatcttcatagcgacgttaaacaaactgaacatatttttgatttttttcggtctttatacgtctgcctcgaattggaaagtaggttactggttaatcaattcttactaatttggctaattgacatactaatttttcttagaacatacatgtataattcactatgcgatatctctgtctataaatggcacaaaatttaaaccgcacattatacgattctatttttaaaaatattaattcaattctctttaaattattgcattaaaagctaagctcttaaaataaatttctaaaaggaatggaagctcttttcggaaaacagaatgttatgtgatgtttgttcaacaaataatctgttataaggatccgtccatttcttcaaaagttttttttagctggttattaatttattctaaaagtaagaaataggttttttaatagattcattctgtccatttaaaaactccatagatgtcaacacctgtttcctgtttttttggtggttcagtaagattctttggttaattgatatgaattcattgcttgtatctgatttgcaaggaacccaccttaaaaggcaaattaatgcaaaaatatgtgtgatatttctagttctctatgtatttgctaaaccttctataattgcaggataggattgggaaggtgcgatacacactacatttaatgattgcgttaatttataagagggaatgtttatatatgaattttggaactctgaagattgtttgttggcccagattccaaacgctgaaattaatacgacacgtttatgttataatttgaattaaaagtactaataacttaaaattaaatataaagtaaattttatataaagtaagaaaccacaaataaactattcttaaaataattcatgaattcataataatcatagtttcattaacaaaattcaataactaatagatattcaatagaaagtgtattattgtttcattttattggttcttttttgattttgtatttaaaaatactctactgttatttccattgtggctgatgtcggaccctaagttgtgggtgttgtagaagttggaattgctgttgatgttgttggagacagggttgtaggtgttgtcgacgatggaattgctgtggatgttgtcgatgactctgttgtggttgttgtagaggtcggaattgctgtggatgttgtcgatgactctgtagtggttgttgtagagggcggaatcgctgtggatgttgtcgatgacgctgttgtggttgtcgtcgatgttggaattggcgtggatgttgtcgatgactctgttgtggtcgttctagatgttggaattgctgtggatgttgtcggtgtctctgttgtggtagttgtagatgttggaactgctgtggatgttatcggtgactctgttgtggttgttgtagttgtaagaatcgcagttgaagttgttggggactgtgttgtggtagtcgtcgatgtgggaattgctgtggatgttgtcgatgactctgtagtggttgtcgtcgatgttggaattgctgtggatgttgtcgatgactctgttgtggttgtcgtggaggtcggaatagccgtggatgttgtcgacgactctgttgtggttgttgtagatgttggaattgctgtggatgttgtcggtgtctctgttgtggtagttttagatgttggaactgctgtggatgttgtcggtgactctgttgtggttgttgtagttgttggaatcgcagttgaagttgttggggactgtgttgtggtagtcgtcgatgtgggaagtgctgtggatgttgtcgatgactctgttgtggttgttgtagagggcggaattgctgtggatgttgtcgatgacgctgttgtggttgtcgtcgatgttggaattgctgtggatgttgtcgatgactctgttgtggatgttgtagaggtcggaattgatgtggatgttgtcgatgactctgtagtggttgttgtagaggacggaattgctgtggatgttgtcgatgacgctgttgtggttgtcgtcgatgttggaattgctgtggatgttgtcgatgactctgtagtggttgttgtagagggcggaatcgctgtggatgttgtcgatgactctgttgtcgttgtcgtcgatgttggaattggagtctgtgtcgttgttgtagatgtcgggatagcgggggacgttgttggggatcctgttgatgtcggtatggcagtggatgtcgttggggatcctgttgatgtcggtatggcagtggatgttgttgcgggttctgttgatgtcggtatggcagtggatgttgttggggatcctgttgttgtcggtatggcagtggatgttgtcggggaccctgttgatgtcggtatggcagtggatgttgttgaggatcctgttgttgtcggtatggtagtggatgttgtcggggaccctgttgatgctggatctgaggttacagttgttgggagccttgtagacgttctccttctcctccactttccccaaaaccttttcagagcgaagtcggtaggttgctcatcaaaatctttgtaaattgcctccttgaatacgtttcctccagtcgacaatttattatcgtttgtagctctttgcttttccaatgctacaatcgggagcctatcatttttataaatttgttgattcccatagtttagtttgatgggaatgggcaattccgaacggaatatttctttctctgataattggttactggaaccaactatcagtgttttagttgcgtgatcgatgtccgccgtagaaaaatgtattcctaatatgcagactatcacggcactttctgaaaaaaaggattttgtacttttcactcacaaaaatatatatttctttacgtaccgtaacaaaacgacgacatggtgattccaagtcaactgtagttctctttctaaatttctcgttttatatgggcaaacttgctgaaattggaaagttggtcattggactctgtttcttataattctgctaattgatagatgtatggaatattagcaaacttttttttcttaaaatgcagactttaggtatataagtgtgaataaaatctcaacttctagggttttccaatatcagttaatattggtagtgcaaatcactaatccgagttaaaactatttgattaattgcatttgcttgcaatattatttgtgtaaatacttttgatcagcaaaaacaattaggcgtgattaccgacagttagtacgtagataagatattgggaactataaaagtatcacaagagttaaggttgttaatgagttttgcaatttgtgggagtgagagtataagtgcccaaataattttggttgtggaatattttcgtcttcttaggagttattattattatttcaaaataaaaaattaaaacatttttttacgtttgtgggcttaatagtcgtttataaaaaccttgggcatattaaaagtaaataaaatctgactaatgattatttggaagatcggcaacgtctatttaactgttctgttcacacaataaaacaaaaacaatgctgagtttgctgagtattgtgtttcttaaagtacaataaattaattagttattaggtaatgatactgtcggttcttttctaaaattattagattttgttcgctgattgatccactttcagggacctcgcatatcctccgtagccaaagccactggcagtaccaccacccccacctcctgcggcaaagtggggactgtgggagtgacctccatcttcgtgagtgaccgagtgcgagtggctggaggtgtaaattggtttagccactatttcgtatgtggtggactttcccccgccaccggccaagctctttagaccgaggactccagacagggtcaaggccattaaagctgtcatcagagcctttccggccatcagagcgatggccccgaggcccatggccataagcattcccttcatcatgactccagccgccactagggcctccaagcctcctttcttgccgaacttgtgcttgcgaccttctacgagggacttgtcatccagcaggcgaaatcgtaggaaccgcgttctcagaaggttttccagtttggctactatatagccattcaagcgagtgctcgggtcactgggatagctgcgagcaacttctgtatattgtcgaaagttaaaattttttgtctttatttttgtgttttcaagaacatacctgccatgagctccgatgtcttgagttcggtggcgttctcatccttgaccacgctgattcctggcaaaacgtttagttcctcctgttcggcaagcttttccatgatcttgacaaactcgatcttgaggcacatccaactgaaggaagatgcttcacagccactgagaaggctctctgccctttggggtattctaatggtttccggagcaactgcaggcacttcggtgggctggacactggcagccgtggcatatttgcacatgaaggcgaataaggccaagtaaaaaagatatttcacggtcttggtcagcaacatcttcgctatctactgcaatggagactgtttgtgagtctgcatcatctcgatttgaaggccttcgcttttatacccgctgccacggtttccattcgcatttccctttcaccaaaccgtactccgtccgtattggggcccttgtgcttttctaattactcaaacgatttgtggtcgaaattcttcccagcgtcagtcagctgcgtccaactgggcggcactttcgctttcctctgcgccagcggaggtcggtcttgcgaaacggccggctaattctgtcaccaaaagttccagccaatgaattccccaagagtccgagaagaaaactctcccagactcgggagttcaggtaattacaagtgcctgataaacgtcgcgtgcctcggaccttcataaattaagacccaacattttgcctgcctaactgggactaactaacaactcattgttaattattacttcattttcatttgtgtctgacccagcgtcgtttcgctactttctttcctcgtattggccatgaagaaatttatctttccacgccgagaacgacctgtttaatattcagattacatgcagtgctaatgaccaattggttggtcgacttttgattttcgctttttgcctagcaggtgtcttatttcccaatctgagcttatagtgggtgcttggaacgattatgcaatctactagactactacagtgctcacttaaaaacagtgtttttaattttattaaaacatttttgttgacaaaaatattgttttcaacatactcttatatgcttttatacgttgtatttttattgtaaagataagacaagttatttcgggcataataaaatgaatttaaataaatatttatgtgaagtatgtgacaatcttttgtgtgttgatccttttaatttttcttatgaagcttatcctgatgtactctgtgtcgttgtggttgtagttgtggtccacttgttcctgaatttttctccaaatctttcgaacaattt

SEQ ID NO: 21794 - DNA, 2607 bp, DROSOPHILA
atgttgctgaccaagaccgtgaaatatcttttttacttggccttattcgccttcatgtgcaaatatgccacggctgccagtgtccagcccaccgaagtgcctgcagttgctccggaaaccattagaataccccaaagggcagagagccttctcagtggctgtgaagcatcttccttcagttggatgtgcctcaagatcgagtttgtcaagatcatggaaaagcttgccgaacaggaggaactaaacgttttgccaggaatcagcgtggtcaaggatgagaacgccaccgaactcaagacatcggagctcatggcagaagttgctcgcagctatcccagtgacccgagcactcgcttgaatggctatatagtagccaaactggaaaaccttctgagaacgcggttcctacgatttcgcctgctggatgacaagtccctcgtagaaggtcgcaagcacaagttcggcaagaaaggaggcttggaggccctagtggcggctggagtcatgatgaagggaatgcttatggccatgggcctcggggccatcgctctgatggccggaaaggctctgatgacagctttaatggccttgaccctgtctggagtcctcggtctaaagagcttggccggtggcgggggaaagtccaccacatacgaaatagtggctaaaccaatttacacctccagccactcgcactcggtcactcacgaagatggaggtcactcccacagtccccactttgccgcaggaggtgggggtggtggtactgccagtggctttggctacggaggatatgcgaggtccctgaaagttttggggaaagtggaggagaaggagaacgtctacaaggctcccaacaactgtaacctcagatccagcatcaacagggtccccgacaacatccactaccataccgacaacaacaggatcctcaacaacatccactgccataccgacatcaacagggtccccgacaacatccactgccataccgacaacaacaggatccccaacaacatccactgccataccgacatcaacagaacccgcaacaacatccactgccataccgacatcaacaggatccccaacgacatccactgccataccgacatcaacaggatccccaacaacgtcccccgctatcccgacatctacaacaacgacacagactccaattccaacatcgacgacaacgacaacagagtcatcgacaacatccacagcgattccgccctctacaacaaccactacagagtcatcgacaacatccacagcaattccaacatcgacgacaaccacaacagcgtcatcgacaacatccacagcaattccgtcctctacaacaaccactacagagtcatcgacaacatccacatcaattccgacctctacaacatccacaacagagtcatcgacaacatccacagcaattccaacatcgacgacaaccacaacagcgtcatcgacaacatccacagcaattccgccctctacaacaaccacaacagagtcatcgacaacatccacagcacttcccacatcgacgactaccacaacacagtccccaacaacttcaactgcgattccaacaactacaacaaccacaacagaaacgaccacaacagagtcatcgacaacatccacgccaattccaacatcgacgacaaccacaacagcgtcatcgacaacatccacagcgattccgccctctacaacaaccactacagagtcatcgacaacatccacagcaattccgacctctacaacaaccacaacagagtcatcgacaacatccacagcaattccatcgtcgacaacacctacaaccctgtctccaacaacatcaacagcaattccaacttctacaacacccacaacttagggtccgacatcagccacaatggaaataacacaaggccagcatttggggagtcaatcaaatcggaacaggatatggagaccacagtaattccagattctgctaccactatttcactagccagttttacaacggcttccacagagaagcaaaataaaaaaacacgacctcctcagaagcagaaagctggcccaaattataaaccaaaacagagactttcaatgcaggacctattgctgatgcccggaatttgggagagctccccaattgtcgaccagggaccaatgaataccctaaacgcccaaccagttttctaccctgttccattttatattccgtatccgatgcccttaatgctgaatccacagatagatctgatgaggagaccgtccaaggataaagtggatgaccaaatcgcaatgggcttcaatgggatgatgggcgaaaatctacttagaaactcttttcagcaggacaacgggtctgattggcacaagataatcgggaatcgagtgaagccggtcagccaagatggcccgaaaaagtggaggggaaaatggcgaaagacaacgaccactactactacaacttccacaactgaagctcctattacaatgtcaactgagccaacaagattgctgtcggatagcagtaaccaaaatgatactgtgctaaaattgattgaaaccaatgaaaacaatgagacaactgctgccgcaagctaa

SEQ ID NO: 21795 - protein, 868 aa, DROSOPHILA
MLLTKTVKYLFYLALFAFMCKYATAASVQPTEVPAVAPETIRIPQRAESLLSGCEASSFSWMCLKIEFVKIMEKLAEQEELNVLPGISVVKDENATELKTSELMAEVARSYPSDPSTRLNGYIVAKLENLLRTRFLRFRLLDDKSLVEGRKHKFGKKGGLEALVAAGVMMKGMLMAMGLGAIALMAGKALMTALMALTLSGVLGLKSLAGGGGKSTTYEIVAKPIYTSSHSHSVTHEDGGHSHSPHFAAGGGGGGTASGFGYGGYARSLKVLGKVEEKENVYKAPNNCNLRSSINRVPDNIHYHTDNNRILNNIHCHTDINRVPDNIHCHTDNNRIPNNIHCHTDINRTRNNIHCHTDINRIPNDIHCHTDINRIPNNVPRYPDIYNNDTDSNSNIDDNDNRVIDNIHSDSALYNNHYRVIDNIHSNSNIDDNHNSVIDNIHSNSVLYNNHYRVIDNIHINSDLYNIHNRVIDNIHSNSNIDDNHNSVIDNIHSNSALYNNHNRVIDNIHSTSHIDDYHNTVPNNFNCDSNNYNNHNRNDHNRVIDNIHANSNIDDNHNSVIDNIHSDSALYNNHYRVIDNIHSNSDLYNNHNRVIDNIHSNSIVDNTYNPVSNNINSNSNFYNTHNLGSDISHNGNNTRPAFGESIKSEQDMETTVIPDSATTISLASFTTASTEKQNKKTRPPQKQKAGPNYKPKQRLSMQDLLLMPGIWESSPIVDQGPMNTLNAQPVFYPVPFYIPYPMPLMLNPQIDLMRRPSKDKVDDQIAMGFNGMMGENLLRNSFQQDNGSDWHKIIGNRVKPVSQDGPKKWRGKWRKTTTTTTTTSTTEAPITMSTEPTRLLSDSSNQNDTVLKLIETNENNETTAAAS

SEQ ID NO: 21796 - DNA, 2919 bp, DROSOPHILA
gtggagtactcgtccaagatgaagggagctattcccgtactgccgctgtatttagcctggttctgtgccttctgcaatgtggttttcccaggactaggtgggttgataagtggttatatccctgcatccctgcttatgccttatgatttcgtaaaccaggaaccctgctctccggactattttgcctctgcgtgggcattccgcgtttctcgcagttcgacagcgctcgtgcaaggatcggatcattcatcatcaacattatcgtggccgtatcgcagttcttctgcgtgctcttctgcttcgtgggatggggctggtccatttggtggggcaccataatgcttagatgtgcaagtaaggaaaaagtgtctcattttaaattgcagccactcattacccattcatgttgcacttacagagaaattgagcaaaatcaaaaaggtggagcgtttggagctggaggaggagcaacgccaggcgcaactggcggaggctgggaaaaacggcgtcgccgaggcggacaagacatagtcctccgatcccggttacaactaagttgctttttataccattgtgtacatacttttgtacaaaacatgtagattacacaagacatgcacttccacatgaacttccaggttaagcaaaacggaacggaacttcccttaaacatgagatacatacgtgtatatgtattaaaatcattaaacttccacttaaatatgtgttttatttattggactttatttgttgcgcagaaaaacaatttttgagattctataagatttcagaatgtttgagcaacccaagacgtaaggtaagtaaagtggttaaatacccagcaaaagtgaaatgcgagttattcgaactttaaaataaactagtttgtaaattcgaatattttcttcgcgtaacgggaattttgaaatggaattcaggaataccccttgcagattcccacacaatgtgaccgcattccgtttgtttgcatcggcaaatgcgagttcagcactgcggtcacaccgaatctttctttattaaaataaaaaacacgacgtcaacttgcgaatttcatacaaattagccgtagaaaatgtcgcacctcgtgaaaatggaaaacggccagagccagaccatccaggagatgctgggctgcatcgagcggtaagaactgcacaaattcactcagttatgatgcttagtaaaaacataacctcgcttttgccgcagctacaacccagatcatctgaaaacactggagtcctatgtgcaggatcaggctaagaacaacacctacgacctggaggccaacctggccgtgctgaaactgtaccagttcaacccgcacatgctgaacttcgacatcacgtacaccattctgctgaagtcactgaccagcctgccgcacacggatttcgtgatggccaagtgcctgctgctgccccagcagatgaaggacgagaatgtgcagacaatcatcgacctcgccgacatactggagcgggcggacttcaccctcttctggcagcgggccgaggtgaaccgcaacatgttccgccacatcaccggcttccacgattcaattcgcaagttcgtctcgcatgtggtgggcaccacattccagacaattcgcaaggacctgcttaaggagctgctcggcggcatcgaggactcgacgctggagagctggatcaagcgcaatggctggaagaaccagggccagggactcgtcatcgtggccatgcaggacgacaaaatcaagacgaagaacattacggagaagatcgagttcgacaacgtgggcgccctgatggcccagtgcctgtaggaacctcattcgcgttcatagtccttgtctaaatttttacgaatagtaattaacggaaaaaaaataataataaaagcctgtccgtacagctaaattactttgtggtttattctcgatcggagctgctcgccaggctgctcccactcatatgatcagacttccagaactaccgaccttaaaacgtacacgtacagaactaataaagcgctatcctatttatgactgcttcttgaacttctttaaaatggggaatatcttgtcgaaggcatcgtagatctcctgccgcacctttgctccagtgagcaccacctttccggacacgaagatgaggagcacgattcgaggtcgcaccatacgatagattaagccgggaaatagctcaggctcgtagctgctgaagttgcaatgggtcagcaccaggccttccaagcgtatggggaacttgacatcgcaggagccgaccatgttttgaatcttaaagtcgaggaactttgcctgcgggagagaaagcgttagagattcgccgggaagagaaaggaaatgtaaagtcttgtcttacagggaaaccgagcttttggatgatgcgcgcatactttctcgctgccagtctggagtcgtcctcactctttgcccctgtgcacaccatcttgccggagctgaaaataagggcggtggtccggggctctcggattcgcataatcacagccgcaaatcgcttaggattgtactcggcgtttctcgcatgcaatgctattttcttgaggtccagtttgcagcacagattaaccgtggacacgatgttctgaagttgtggcacaataccgggatcagcggaacctggtgtggctggtgtcatcggcgtggaggggcccatcgtctggtggatgttgctcagggcatctccgccacctccggcccccgaaccgcccacactccgctcactcatgggcatcatgtgggccatcatgctctgcggcgtctgcggctgcatcatggactgcggagtgctcccaccgccgccgggcgcctgactctggagctgctgttgctgctgctgctgctgataggaggccgatggctggtaactctgc

SEQ ID NO: 21797 - DNA, 853 bp, DROSOPHILA
cgagttcagcactgcggtcacaccgaatctttctttattaaaataaaaaacacgacgtcaacttgcgaatttcatacaaattagccgtagaaaatgtcgcacctcgtgaaaatggaaaacggccagagccagaccatccaggagatgctgggctgcatcgagcgctacaacccagatcatctgaaaacactggagtcctatgtgcaggatcaggctaagaacaacacctacgacctggaggccaacctggccgtgctgaaactgtaccagttcaacccgcacatgctgaacttcgacatcacgtacaccattctgctgaagtcactgaccagcctgccgcacacggatttcgtgatggccaagtgcctgctgctgccccagcagatgaaggacgagaatgtgcagacaatcatcgacctcgccgacatactggagcgggcggacttcaccctcttctggcagcgggccgaggtgaaccgcaacatgttccgccacatcaccggcttccacgattcaattcgcaagttcgtctcgcatgtggtgggcaccacattccagacaattcgcaaggacctgcttaaggagctgctcggcggcatcgaggactcgacgctggagagctggatcaagcgcaatggctggaagaaccagggccagggactcgtcatcgtggccatgcaggacgacaaaatcaagacgaagaacattacggagaagatcgagttcgacaacgtgggcgccctgatggcccagtgcctgtaggaacctcattcgcgttcatagtccttgtctaaatttttacgaatagtaattaacggaaaaaaaataataataaaagcctgtccgtacagct

SEQ ID NO: 21798 - protein, 222 aa, DROSOPHILA
MSHLVKMENGQSQTIQEMLGCIERYNPDHLKTLESYVQDQAKNNTYDLEANLAVLKLYQFNPHMLNFDITYTILLKSLTSLPHTDFVMAKCLLLPQQMKDENVQTIIDLADILERADFTLFWQRAEVNRNMFRHITGFHDSIRKFVSHVVGTTFQTIRKDLLKELLGGIEDSTLESWIKRNGWKNQGQGLVIVAMQDDKIKTKNITEKIEFDNVGALMAQCL

SEQ ID NO: 21799 - DNA, 3006 bp, DROSOPHILA
tgtttaatagctaaataatttgtgtataaggtgaacaaaagaaatagcgaataaataatagtgcataatacttagaaggaaaatggttattctcatctatgcagtttcagcaatagattttcgtgggcgtgaactgaaaaacgatgtgttaaaaattaattaattggaacttttgcacttggaaagtgcaattaaatggttattaaactaattagaaaaatgagaacgccgcccatgctgaaaccgaaggttgaataggccaaacttgtgacagttgccgttgaggaatgggtgtaagtatttccgtgctcatcggtgtaggaatgctgcccacttgagggtgagttttggaacgttcctcccatttcgggcactgtgtagggtccttcgttctgaccccgtatgtaaatgccgtttccaggtgtgccgaactcatggggaccatttcttccatcataattctgctgcgcatttgtcactggagaaaaatagagagagagtgttgaatggatgtggcggttctagtggttcccacacttgacttaccggcaaacaacagcgtgctcactatgaaaacaagtaaagtacacgatctcatgatgcagtttccagtcactgagctcaatttcaactgagagcggctcggtaatttacaatctatttatataaaccgatagaaagacgagctttttgccaattagcagctgagaatgggtaatgtcaaatgttgagctttccttgtgcgacaaacattacaagcgacaatgtaccaattttaaaatagaactaccctattgccaatatctagcattttgcgcatgcctttacccaggaaatgaaatttttaattttagttcatcagcttgggaagagaaggcaggcaaaagagagtgcagcaaatagagatttttgtgcatatatagactccgagaatcgttatataacatgcactcaaaacaaacgaaaaaacggcgcaaatcgggcgacagttcgaaactacaaaagacaaggcctgaaaactaagctactagcgccaaaaacagagtaggttttccaaagagtgtgaaatagtttggaacccaagacaaccaaattcaagtgctgcagaagtaaacacttaataagggcgacatggagaaggtttgtcagtttttccgcaacaactacgtgctggccaattgcgaggatgccatatacaaaaaggcattctccctgaatctgtcccactaccaaatctccgacgttccgggcatcatagagaagtgcgagacgctgatgaagctgttcctcaaccaaaacaagctaacaaaggtggcacctggtgcacaagatagccaatgaaataatagactcacaatcccttgactcacagattccatcctccattggtagtttgatgcgacttcaggtcctcacgttggactacaataaactggacgaattcccgctctgcatctgtcgtttggtccggctgaagtttctcaacatcagctgcaataacattagtagtttgccacccgaactgggatacctcactcagctggagacgttctggtgcaataatactgggctcctggagctgcccaacgaaattcgtaactgtgaacacctcgagacgctgggcgtacggggaaatcccttgaagaagttgcccgatgccataggcgctctgtcctccctgcgttggctaacagccgagggctgcgaactcagcgaagtgccactgaccatggcgttgctgggaaatttggtgcatctgaatcttaaggggaatcgattgcgacggctgcccaggatgctgatggccatgcagaagctgcggtttgcttttctcaacgaaaattgtattgacgagatgcccacgcggtcacaactggaggagttgcggactcttcacatgctcaacctgtccaagaatcccatcagcctgcaccgcgatctacagctaatggctttggtgaagctccaaattaacctttgtgtttctttttgttgaatttctctgaattttacagcgccagacgaacctttatgtggagctgccgtcagatcccgccaatatttgcgatggtctcgccagtcgagctagcctcaacgcccaggaacagcaggaggatcaggcgcgaggagcaggacaggatctagactcctccgactgggcgaacagcgtgcggaccagcgaactggacacaacggacgagagtgcgctggagaacaacatcgaggatctgagtgtcatgctgccggaaatgtcgcgctttgtcaccaccttttgaatgcattaatctgtgtcaacgaggtctgatattatgtagcacacataaatctgtggtttattctctacaacggggtgttttgtacatgtacctctaacaatcgtagcgcttcaaaaatgcacattggttaagcggaaatgtgggttaatgggtgccaggttaactagacatcttcttcatcagctcctcgtcctgcatggacatggccgtcagcttcttgccgatcttctcgtgaatgtccagatatttggccacacagcgatcgatgcacaccatctcgcctttgcctgtagggtgcggaaagcattaaaattacaagtgtagaattgtggtacaagtttcaagatttctatttaaatttcatcaatcgaatcaaagagaaacctgaagtgattgtcatagaaagagctgcgaactagatacagcattctatatggctatggtactcacccaactccgactcggagtagcgcggcggaatgcactttttgtggcaagcgttcgtcatgcggttatataaatcggacatcatttcgatctccatttcctgcatcagctgcagcttggcctggtctgcggtgctgatctggggcaatgccattgtgtgggtgtgggtgtgttactgatgggttttaggtactggatgctgccgcttagtaatcgaatcgcctgtccgatgctgcgcttgagtcgtaatccccttggtttgccttcctcatgcgctcacgca

SEQ ID NO: 21800 - DNA, 945 bp, DROSOPHILA
aaaagacaaggcctgaaaactaagctactagcgccaaaaacagagtaggttttccaaagagtgtgaaatagtttggaacccaagacaaccaaattcaagtgctgcagaagtaaacacttaataagggcgacatggagaaggtttgtcagtttttccgcaacaactacgtgctggccaattgcgaggatgccatatacaaaaaggcattctccctgaatctgtcccactaccaaatctccgacgttccgggcatcatagagaagtgcgagacgctgatgaagctgttcctcaaccaaaacaagctaacaaagattccatcctccattggtagtttgatgcgacttcaggtcctcacgttggactacaataaactggacgaattcccgctctgcatctgtcgtttggtccggctgaagtttctcaacatcagctgcaataacattagtagtttgccacccgaactgggatacctcactcagctggagacgttctggtgcaataatactgggctcctggagctgcccaacgaaattcgtaactgtgaacacctcgagacgctgggcgtacggggaaatcccttgaagaagttgcccgatgccataggcgctctgtcctccctgcgttggctaacagccgagggctgcgaactcagcgaagtgccactgaccatggcgttgctgggaaatttggtgcatctgaatcttaaggggaatcgattgcgacggctgcccaggatgctgatggccatgcagaagctgcggtttgcttttctcaacgaaaattgtattgacgagatgcccacgcggtcacaactggaggagttgcggactcttcacatgctcaacctgtccaagaatcccatcagcctgcaccgcgatctacagctaatggctttggtgaagctccaaattaacctttgtgtttctttttgttgaatttctctga

SEQ ID NO: 21801 - protein, 267 aa, DROSOPHILA
MEKVCQFFRNNYVLANCEDAIYKKAFSLNLSHYQISDVPGIIEKCETLMKLFLNQNKLTKIPSSIGSLMRLQVLTLDYNKLDEFPLCICRLVRLKFLNISCNNISSLPPELGYLTQLETFWCNNTGLLELPNEIRNCEHLETLGVRGNPLKKLPDAIGALSSLRWLTAEGCELSEVPLTMALLGNLVHLNLKGNRLRRLPRMLMAMQKLRFAFLNENCIDEMPTRSQLEELRTLHMLNLSKNPISLHRDLQLMALVKLQINLCVSFC

SEQ ID NO: 21802 - DNA, 3297 bp, DROSOPHILA
tggttggctttgcgcaccgattccatgccttagcttagcgcttgtgaggcggaactttgttctccggcggtggtaggggatcggcgataaagcagtcaaacaggggcttggagaagaagatcagaagtgagcctgtgatgaaggagatctggaacaggcgtggatttcgctgaatccacgtgcgtttgggtagcacagcggttcgcctgcgctgatttgcttgctgttgctccttttggtccagcaagtcttgaatttccttcggaggcctatactgcggtatggacattatttgttcctgcaaaacgagttgataatagtgtatatggaatagagaagttggctacaactcacgacttgccggttgcgttcttttccttggatgcgtctggtagataagtcttctccaaatcgattccactgcagcaaagcgattccttgtgccactttaaacagcactggcgcattgcctcaaggacatccaagcacttgtcctcctggtagtgattctctgtaaccgagtgcaagtcagcttacataaccatgaaaatggagtcaccggcggtgcttactggtcagacaggcttgtatgcggcaggcgttcggtttgcagggatccttgcgagtgtcagacatgtaatcctgcccagaattcttacgatattaaatcgctcttgcaatatgtgaaaagtacttggaagtgttctgcactcttcttcttcttggcggttgtagtcattcacagtgcacgatcaaggtagccagactgcgcgacggtcagctgtgtaggaaacctaatacatcaaagcaaaataaaaaacaatcacataaataacaacaaaaagaaataacatctcttataatgtacaaaaatttttaatctttcaaattttgatattaataccttttgcttccctgtgaataccccgcctgctgcgagagcaactgccattcacccatcgacgccgacagttgggcaccaaggaactgttcttgtgtgaaaaacacacacacatttgttttatttcactaggactcttgacgattacttcacaaatcggaaaatgccatcgaaaaagaaaaaatacaacgcacgctttccggcggtaagttgaaaccaccgattggcgacaggaaagctccagccatttggcggccgtgaacgccgaagatgggttatcagttttcgtgcatgtgtacatacatatgtacatacacgcctcgcataatcagaggctcaaaagaagtagaggagaaaccaaaccggtgcgagattataatgtttccaaaccattaccataaactccttgcagggtcgcatcaagaagatcatgcaaagcgacgaggaaatcgggaaggtggcccaggcggtgcctgttatcatctcacgcacgctggagctcttcgtggagtcgctgctgaccaagacgctgcgcatcacgaatgcgcgcaacgccaagacgctatcgccatcgcacatgaggcagtgtatcgtatccgagaaacgctttgacttcctcaaggagctggtccgcaacatacccgacatcagtgtggccgaggaggccgcctacaacgaggacgatgtgttacgcagctcgccagaggaacagtatccagattcagacacgccatatgatcttagcctgccatcgacgtcaatgcgctcgcaggcgaacggcacagctgcctacatgcgctccatgagtctgaacaacggagccggatcgggcggaggagccgcagccaccaagcggcagtttcagtcgcagcactccacccaggaaactcccaccaccagcaccaccctgcccgccaagctggcccgctccgggtccatgccggcctacacgccacggggcagaccgcccaatcacctcaagaaacagtcggtgcagctcgatactgccatacccgccccgatctgcaactacgaactcaacaagcccattgtcaagatcgactacagccacgtgcaaatgccgacggcgaacctgtgcacaccggacgcctctgattctgggtcaggatcgggcgccggatctggagcttttaacttcgacatagctgctccggtgatcaatatcgatctgacgaatatcgtggccggtggagcacctggcagtggtgtgccccccgcctctattggattaccagcggccacgccgggggacaacaataatgtgaaccaaatggctggaaagagcagcgctcccatcattccaaaggccacagcggcatcagcgacccccactgaaaccgttttcgaattagacgaagactatgacaatatttgattaggatctatgtgaatgcgcttttaaattattgatacattaatatgtactctaggtctaagaaatcacaataacattttttgcaaaataaagaccatgctggattttaagctgacgcaatgcggagtactttaaatagagaaagaaaatttatacattctagcagataatgctgtttaatttgcatacgatattaaatcagtttatctttgaattagatgtactaaacaagttcaacaattattgaaaatgtttgcattcatagacaccataaaaaagccgcctctgggcggccgaaagtcatttatgcccatcccagaggccaagttagttgacgatgtcgtcagctacatcgccaagccagagttctattcgactgttccagcggcattgaagatgcaacgccttttctatgtgcaatacagcgaactggctgccaagttggagactgacctcacagcagtgttaacccgtttggaggctgccaaaaataatttggaattggtgaggaggttcatagacaatcctgacaaggaagttcacagcctcgtgcaaatcgcacagggagtattcagatgggtgagcataccgccagtgcaaaaggttacccttcaagtgggcgcatctctgcaaatggaattcgagctgtccgaggcggaggagttcatcaaaaaggacatcaccagcctggtgaagcagcaattgcaacatgagcacgatatcgactatctgcaggatcaggtgaacacgattgagatgaacctagccgtattgtataaacatgaagtggagaactagaagcatcccaccatccttaaaattgctagtaccttgtagttgcttataaagacattcgttctaaataagtctttattgtctaaatgccttaatttccaacgaagtacagctctcccttggagttccccactaattcattcattacaattacattattagcagcccggtaaagaggtcagagtatcgggaccgtaggatccca

SEQ ID NO: 21803 - DNA, 1090 bp, DROSOPHILA
aaaaacacacacacatttgttttatttcactaggactcttgacgattacttcacaaatcggaaaatgccatcgaaaaagaaaaaatacaacgcacgctttccggcgggtcgcatcaagaagatcatgcaaagcgacgaggaaatcgggaaggtggcccaggcggtgcctgttatcatctcacgcacgctggagctcttcgtggagtcgctgctgaccaagacgctgcgcatcacgaatgcgcgcaacgccaagacgctatcgccatcgcacatgaggcagtgtatcgtatccgagaaacgctttgacttcctcaaggagctggtccgcaacatacccgacatcagtgtggccgaggaggccgcctacaacgaggacgatgtgttacgcagctcgccagaggaacagtatccagattcagacacgccatatgatcttagcctgccatcgacgtcaatgcgctcgcaggcgaacggcacagctgcctacatgcgctccatgagtctgaacaacggagccggatcgggcggaggagccgcagccaccaagcggcagtttcagtcgcagcactccacccaggaaactcccaccaccagcaccaccctgcccgccaagctggcccgctccgggtccatgccggcctacacgccacggggcagaccgcccaatcacctcaagaaacagtcggtgcagctcgatactgccatacccgccccgatctgcaactacgaactcaacaagcccattgtcaagatcgactacagccacgtgcaaatgccgacggcgaacctgtgcacaccggacgcctctgattctgggtcaggatcgggcgccggatctggagcttttaacttcgacatagctgctccggtgatcaatatcgatctgacgaatatcgtggccggtggagcacctggcagtggtgtgccccccgcctctattggattaccagcggccacgccgggggacaacaataatgtgaaccaaatggctggaaagagcagcgctcccatcattccaaaggccacagcggcatcagcgacccccactgaaaccgttttcgaattagacgaagactatgacaatatttga

SEQ ID NO: 21804 - protein, 321 aa, DROSOPHILA
MQSDEEIGKVAQAVPVIISRTLELFVESLLTKTLRITNARNAKTLSPSHMRQCIVSEKRFDFLKELVRNIPDISVAEEAAYNEDDVLRSSPEEQYPDSDTPYDLSLPSTSMRSQANGTAAYMRSMSLNNGAGSGGGAAATKRQFQSQHSTQETPTTSTTLPAKLARSGSMPAYTPRGRPPNHLKKQSVQLDTAIPAPICNYELNKPIVKIDYSHVQMPTANLCTPDASDSGSGSGAGSGAFNFDIAAPVINIDLTNIVAGGAPGSGVPPASIGLPAATPGDNNNVNQMAGKSSAPIIPKATAASATPTETVFELDEDYDNI

SEQ ID NO: 21805 - DNA, 2729 bp, DROSOPHILA
atcgcagcatttgtggagaaccaggagcggagaatttaaaattaatttgtaaacaagtcgcttccaaaagtagatgaaagtaaaaaaaaaaagttcgttagattgattgattgtgcattctgcatttcacattcagatcaaagatacattatttcggcaaaagtgtatatgatttaaccctttgtaagagttctcgtgaggcacacctataaatgtaatgtactctaaagcgagaacacttgggccgagtgattttatacctagccattacaattcaatgcaaaatgacaaagcgatagagcgtaatcatcagtatttcgttgtatgtatctatgcttaaagtcttagcccgtttcctttccatttgtagtgacaaagtttcgaagagccagagttttctatatatactatataaaatacacgcaaaacacatatttaagttaacgatcaaagagagaaacgctattaattatagatcctacaaatattactattacttattgtgtaactagagaattaaatgggaaatccaattatgtatattttcacttaagcacgtttataaattacaaatgttctacaaattgcaaaaatacctttactgaataaatgaatatggaaataattagcatttctccttttgaaaaaagtgtttggcgcgaaaagtgcgaggtgactgtggtgttttttagtcactccgtgtgatgcatcgataaatcagctttacaaacaaatcgtttactgctcatctctaagtcaactgtgcgtattttaacaattttattttttctgcgggttttttgttttattacggatatttaagcggttaatcagttagtaaatagcatttaaattatctgtgttcttagtagatacaattggctactgctagcaggccttgcagcttgtcaaacgtaaacattcttatgtaattattcagggctaggttaaacatatgatttttagcctggatgacactgatttttcctgatttccagtacagcaatgggcggacatcacggcgaaccctacacggtgccccacgcatcgacctacaaggtggagagtgtgccccaactcgtggaggtgaaggaggctctgggccgccagggattgaaggatccatggctgaggtgagccttcaaattgggattagactgcaccgtcgatctaaccggttgtcttcttgcaggaacgaagtctggcgctatgagcccaaggccttcggcacccacagatcccgcctgaacaccttccttttccgcggactcggcgtgggattctgcgctttcctggccaccgtcgccgtggagtacgcgctgggcattggcaagggtcagggcggccatggacatggccacggtcacgaggaacacggagataagggccaccattagatatactgaataaacccattgtgctatcgctccaattcactttattcgcaatacatgtacgcgtaggggttttcactaaagctaaagtagtcctccgatcagttaatgcgcggcttgagctcgtcgtagcacgagcgcagaaagatttggggcttcttggccgggttgaagtactcgtggcccttcgaccagtcgtagccgacggcgtacgcaaatatctggccgttggcgttaaatccgcatttggtaatggactgatccatggtctcgctggacttgagcttggtccgggcatccttgtcccagaaactgaaggtgccatctgagccaacggtcaccagggtgccgtgcacagggtggaatgcgatgtcatttactgcataaatatcctggtagcctgaggtgcccgtagtacggtggcacttgaaggtgaagttatcttttggattccccggattcacatactgaatggccacacggccctcaatgctgcccagcgcacagcctgtgggctcttttttcttgtcccggaaaatggaaatggcacggtgctggtacttcagcggactctcctgccgcttgtactcggttgggctattctgcagcgagtatatgatgagtcctctgttggccgtgcccaccacggccatcggatactccacatcggcgcagtagcaccgctcgggtagattgatggtcatcatgggattgggcgaacgggtgtcccagaactaaatggaaaacagttgtgaaaatgatcgtgcactttgttcggcttacctttagggtcttgtcccaggagccggtcatgaggcaggtgtacgtgggtcccttgaccatgtggcacgtcttaacgggaccgtcgtgggccgccacttgcatcacttgatcggaggcgaggtcccagagcttcacctgcttgtcgcaggaggcgacgaacactttgctgccgtcgtccgaccagcaaacgtccagcaccggtccgcccatggtcttcatcgacttgggcacagtggccccgttttgttccacctcccagcagcggaccgtgctgtcccagcttccggccaccaggaagttcttctgcaccgtgctggggctgaactccagcgccgagacggagtcgtccggcggcgaggcgacctcgaagtcgttcattcggttcgtcgattgtgtggcgccaaacattcttctgcttttgttgccgcaaaatgtttgtgtttgtattatttcgccaatgaagagtgcatagcagtgtcaccacaccccggcggaaaccgcgttgtatcgtttgattgcgacgataacgttctatcgatttgtatcggtcgc

SEQ ID NO: 21806 - DNA, 670 bp, DROSOPHILA
cagcaatgggcggacatcacggcgaaccctacacggtgccccacgcatcgacctacaaggtggagagtgtgccccaactcgtggaggtgaaggaggctctgggccgccagggattgaaggatccatggctgaggaacgaagtctggcgctatgagcccaaggccttcggcacccacagatcccgcctgaacaccttccttttccgcggactcggcgtgggattctgcgctttcctggccaccgtcgccgtggagtacgcgctgggcattggcaagggtcagggcggccatggacatggccacggtcacgaggaacacggagataagggccaccattagatatactgaataaacccattgtgctatcgctccaattcactttattcgcaatacatgtacgcgtaggggttttcactaaagctaaagtagtcctccgatcagttaatgcgcggcttgagctcgtcgtagcacgagcgcagaaagatttggggcttcttggccgggttgaagtactcgtggcccttcgaccagtcgtagccgacggcgtacgcaaatatctggccgttggcgttaaatccgcatttggtaatggactgatccatggtctcgctggacttgagcttggtccgggcatccttgtcccagaaactgaaggtgccatctgagccaac

SEQ ID NO: 21807 - protein, 110 aa, DROSOPHILA
MGGHHGEPYTVPHASTYKVESVPQLVEVKEALGRQGLKDPWLRNEVWRYEPKAFGTHRSRLNTFLFRGLGVGFCAFLATVAVEYALGIGKGQGGHGHGHGHEEHGDKGHH

SEQ ID NO: 21808 - DNA, 5734 bp, DROSOPHILA
gtggcctggatgttgcggaaaaagcctatttcggacgaagcatggaccccaggagcgaggtgaaggtgcaggtgattggtcaatgggtagaccagcatcgggagttcgacgccgacatatacgagtactatggccatgggctgagacgctataaggaaactctgaccggggcccggctcaccttcatccgaatagattatacggagccggttttcatggctccggagtctagcaacctggccaaggcctcgcttttccgagagccgaaggttggccagataagggaggatccatcgggcaactataccgagtgggagaacgcacaggaagaggattacgatgaggaaggtccaggattctactgctggtttgtgattacttgtctgcttttggccctcgctattatcctgggcatatacattgtagtaagcgctcacaacaggagaaccaagaagcgccacatgtacgaagtggccaacacgaatgtgcctccacccgcctaaaaattatggacattaagttaagttttctaaatcagaaaataacaccaggatcaacaggtgttttcagttcgaaatgtcagtttaaaaaacgagttggcagctcaattgctatgtcctcgaattaaaatttgtgtgttcgttttttgggttagatttattaaaaatttcggcttgaaaatgttaatgtgagtcaaaaaactgttgtgtgtttcattgaatatgtaaagaaatcccctggtatgaacggcaaggaatggctctaaaatcgagaaattaaagagacttgtgagctgaaggacccacatcaaaaacctaagttgtaaatagagaaaaggtaagtttcaatggaatttcatgccttaaacataagaagttttaagtattaaaaagaaatctagaaatctgaggaaataaacaaaatgatttccgaccggcatgcgttagggatttctgtctttataccacgttggcagcgccattcacaacacgcctatcatctcactcacactcgcacacagagaaagacagatagaggcagaagttcagttcatcaattcattcatctcatggaagaaccttattgataacgtcgccagagatagctagtgatttcattcgatcagggtcccgaaagacccactggtgtgcacttgttttggttttgaagttcgcatctctgggaacgtgtgtgtttcgccctgaaccacaaatatgtgagttccgaatgcgatttgtgtgacgcggccatatttaaagagttttttgtgttgaatgtggggcgagctgcgaaaattacataaatacagcgcaggtgagttcatttttgttgcgggaacccggtcgaaaggtgctctaagtgcgggtgcaagtgaatcgaaaacaatatttacccaattcaagtcgggaattatgtatttgtttcgttttttgggcctaaaaatcgcatttttcgctcacaccaacaccaagatggtaaattgtgtataacaatatggctgtctctgtctggcacaagagctaccagacgtgtcgacagtccctgttattaacagcgggttagcaggtcattttacaacagatgaaattattctgaattttaattgaccattttttggcgggcaaatcataacaaacctcgtactcatgcacctttcggggatccgctcattctaatggttattttaaattaaaaaaaactggcccattgcagcctccccctaggaacacgaagtgatggatcgcaagaaggtcctggagcttgacaagatctgccgcctgtgcatctcggagcgcaaggagatgcgcccgctgttcagcgaaaaggtgcccgaaatgctgatggactgtaccagcgtgcgggtggagcccacggagggctggccggacaagatctgcgtgcagtgcgtccacgccgtaagccggaatcacgccttcaagacgctcgtcgagcgcagcgacaaggagctgcgcgagtatatccgcggtcttaccgtggcactggtaatggaggagcagcagcagcaggaggcggcaaacgctaagcagcagcttcagctggagcggaagcaacagcgacagctgcagaagcaacagaaaatcctcgaggagcaactccagcagcagatagtccagcagcaacagcatcagcctcctgccaaaccaaaactgaagccgctgctccgcaagggctcccgccagcagaagcagaggcatttggaggccgcaccagcaccacagtcagtcccgcagcccgcccctcagccacagatgcaattaatgcaggaacatgcgccgcaacagcccactatgcagcagcagatccagcagattcatatgcccacacttcagcctgctcccgcccagctactgtccgctgccggtgccaccacgactatgccgcagcagatcctgttgcccaacggccaattgataacgactgctcagattgtagcgccgcagttggcgcagatcatcagcacagcgccgcagtcaacgactaatggtcaggccaccgctgcgcaatcgcaattcctgccacagcttctacagacgccgaacggacagacgttgcagattgttcagcagcccaatggcacgcagaccctgcagctggttcaacttgtgccgcaacgcagtttggctccgaccggagtcacgacagtgaccacaactaccaacgccacggatatgggtcagcatgtaggcgcttctctcggtgatgccgacgtgcagttgctggaggacggctgtgaggtggaagacgaggaactggaagatgtgtacgagcaactggatagcaaggcagatcacagctttgagactattgtactggacgacgatcagcagcaggacttcctaaaggaccaccacgagcaccaccaagtaatgatcaacgaggatctcacgcagagtgaaagccaagaccatgagtacttcgacgatttggaccaacagcaagcaatggacgagatagaagacgaggaggagcaaatgaagcccgaagaggaccaggatacgttcataatcgaggagattcagctggaggatgacgagatgctcgatgatccggatggggaggaaatcgaccaggattgtgagtacatcggtgaggaacaggatccgcatttgtccggcgacgtagacgacgatctggagtattccattatggagccgccggatggcgagacaagtgtggacattgaccaggcattcatggattctgagcagtcgcatcatcagcagcaccaagaagagatgcagagcatatcactggagaacgctgttgtagagttcagccaggccacaactacaacggaagccctggtgggtcccactatgaccgtcagctcggccagtccgacgccaaagcgagccaagcgaagtaaccaccaaattccagccggtgtgactctggaaccctgcgaccaccaaccacctgccgctggatcaacgaccagcagcaagctggccgcagccaactctcgccagttggtgcagacggccagcgtgattgcagccgccggtgcggacgacaactacgaaatagatgctaatctggtaactgagttcatacgacagcacacctcgcctctgggatctgggagatacatttgtcacctgtgcagcaccgagttccggcagttcaagggcctgcagaaccacatgcactcccacaccaactggatacgggccaattgcaagaaacagccgcagtgccagatctgcctaaagagctttaagggcccaggaatgctgcggatgcacatgaagacgcacgacgctgaatccagcacaccgatgtgcaccatttgcaatcgaaccttcaagtccaaggcgatcttgtacaggcacagacagacgcaccagcagagagcgtattgctgcggcgtggccaactgccgaaagaacttctcgtccgcggtgaacctcaagtggcacgtagaacgcaagcatccggaggttgtggatccgctgttcaagtgcggcgagtgcggatctttgtacgacaacgtggactcactgcagctgcatgtggagagcacggatcacagtgcagaggtgcagatcagtggccaggacgatgctttcagcggggcggtaagcatcgtcagcaacggcaccaccgacatgtcgaacatgatggcaaccggccagggtacgactttggccggcggcacgggcgatacccacgccgtggtcatgggctcatccggcgaggtgtacttcgtgacgcaggcgtagccagcggagtttgccgcagcgggcgctcctggaaacggcgagtgcctgctcggcatttagatgaccacttagatgtaatatatatacatatatatatatatatttttgtactacccccgtctagataacaatttaggaataagcacaactacacaaatattgcaatcctagatttctgtcgtagaacttgtttagtaggacctaagcgattcactcgaattttgtaagcagatacgaaactttaggtaggcagatcgaggcggatcctcacatccaaacgcttggggcataaatcctgcgtggactgtgccagtttttgtttttaattttattaccctactattattattttgttttcccggggaatacagactggcattttaggctaaacgtattttggcgttgggttttcattgttgggctttgaaataagtgaatttgttttaactgaacaacaaaataaattaacaaaccttctatgaaaccataatttgtctttcttgtacgtcccatctggccggtaatatttatttttaagcgtgtaatccaattcgctggctttgttggcttgttgttcaattgcattgacagaagaccgggaaaaaacagaacccaaacaaaattgatcgaaagaaaacaacaatcaagccaaggtcttgtctattgattcccaattgccacgtgtcgcgttcatccggttatgggaagtatctggataactacgattcgcgtatggatgcttatgtaaatctgtaaatgcctattagtgtgatttaggtacatgtacatacatatatattatattatccataaaaagtgaccccccaataatcggttatctgatcgcagtctgaaatctccggctgtcacaagaaattgttaattaattagcaaataagccgcgaaaataatcaattggaataacattgtgacagctaaaatcgccaggcgtttatttgttttgttcagattatatatggcggtcagccgcgtttcgcaagataagataaaggtttggttttccgcttacaaatatgacgcataccttcgacttaccgcccttaattttccagccagctgttggaaaatctggcccaaactaaagcttatattgtacatagatattttagatagctagatttttgattcgtaactagctgtatctaatgcaacatttttaaaatgggctttacctataccatcatatgctttacatttacatttacatatgtatatattcattgcacttataatatattcttcatcttaaatgtcatgctttcatgcttggctggaaaagtccttgcactttaaaccgtcgaaataaaacttggccacgcagccaaataaatgtcaagataaatttcgtaggccaaaacgaattaattagaaaatagaagaattctttttaagataatatttcctacaaatttgctagtctatcacatagtgtattttttacacaaaaatatttcaaacatttgaaatca

SEQ ID NO: 21809 - DNA, 3335 bp, DROSOPHILA
ctcactcacactcgcacacagagaaagacagatagaggcagaagttcagttcatcaattcattcatctcatggaagaaccttattgataacgtcgccagagatagctagtgatttcattcgatcagggtcccgaaagacccactggtgtgcacttgttttggttttgaagttcgcatctctgggaacgtgtgtgtttcgccctgaaccacaaatatgtgagttccgaatgcgatttgtgtgacgcggccatatttaaagagttttttgtgttgaatgtggggcgagctgcgaaaattacataaatacagcgcagcctccccctaggaacacgaagtgatggatcgcaagaaggtcctggagcttgacaagatctgccgcctgtgcatctcggagcgcaaggagatgcgcccgctgttcagcgaaaaggtgcccgaaatgctgatggactgtaccagcgtgcgggtggagcccacggagggctggccggacaagatctgcgtgcagtgcgtccacgccgtaagccggaatcacgccttcaagacgctcgtcgagcgcagcgacaaggagctgcgcgagtatatccgcggtcttaccgtggcactggtaatggaggagcagcagcagcaggaggcggcaaacgctaagcagcagcttcagctggagcggaagcaacagcgacagctgcagaagcaacagaaaatcctcgaggagcaactccagcagcagatagtccagcagcaacagcatcagcctcctgccaaaccaaaactgaagccgctgctccgcaagggctcccgccagcagaagcagaggcatttggaggccgcaccagcaccacagtcagtcccgcagcccgcccctcagccacagatgcaattaatgcaggaacatgcgccgcaacagcccactatgcagcagcagatccagcagattcatatgcccacacttcagcctgctcccgcccagctactgtccgctgccggtgccaccacgactatgccgcagcagatcctgttgcccaacggccaattgataacgactgctcagattgtagcgccgcagttggcgcagatcatcagcacagcgccgcagtcaacgactaatggtcaggccaccgctgcgcaatcgcaattcctgccacagcttctacagacgccgaacggacagacgttgcagattgttcagcagcccaatggcacgcagaccctgcagctggttcaacttgtgccgcaacgcagtttggctccgaccggagtcacgacagtgaccacaactaccaacgccacggatatgggtcagcatgtaggcgcttctctcggtgatgccgacgtgcagttgctggaggacggctgtgaggtggaagacgaggaactggaagatgtgtacgagcaactggatagcaaggcagatcacagctttgagactattgtactggacgacgatcagcagcaggacttcctaaaggaccaccacgagcaccaccaagtaatgatcaacgaggatctcacgcagagtgaaagccaagaccatgagtacttcgacgatttggaccaacagcaagcaatggacgagatagaagacgaggaggagcaaatgaagcccgaagaggaccaggatacgttcataatcgaggagattcagctggaggatgacgagatgctcgatgatccggatggggaggaaatcgaccaggattgtgagtacatcggtgaggaacaggatccgcatttgtccggcgacgtagacgacgatctggagtattccattatggagccgccggatggcgagacaagtgtggacattgaccaggcattcatggattctgagcagtcgcatcatcagcagcaccaagaagagatgcagagcatatcactggagaacgctgttgtagagttcagccaggccacaactacaacggaagccctggtgggtcccactatgaccgtcagctcggccagtccgacgccaaagcgagccaagcgaagtaaccaccaaattccagccggtgtgactctggaaccctgcgaccaccaaccacctgccgctggatcaacgaccagcagcaagctggccgcagccaactctcgccagttggtgcagacggccagcgtgattgcagccgccggtgcggacgacaactacgaaatagatgctaatctggtaactgagttcatacgacagcacacctcgcctctgggatctgggagatacatttgtcacctgtgcagcaccgagttccggcagttcaagggcctgcagaaccacatgcactcccacaccaactggatacgggccaattgcaagaaacagccgcagtgccagatctgcctaaagagctttaagggcccaggaatgctgcggatgcacatgaagacgcacgacgctgaatccagcacaccgatgtgcaccatttgcaatcgaaccttcaagtccaaggcgatcttgtacaggcacagacagacgcaccagcagagagcgtattgctgcggcgtggccaactgccgaaagaacttctcgtccgcggtgaacctcaagtggcacgtagaacgcaagcatccggaggttgtggatccgctgttcaagtgcggcgagtgcggatctttgtacgacaacgtggactcactgcagctgcatgtggagagcacggatcacagtgcagaggtgcagatcagtggccaggacgatgctttcagcggggcggtaagcatcgtcagcaacggcaccaccgacatgtcgaacatgatggcaaccggccagggtacgactttggccggcggcacgggcgatacccacgccgtggtcatgggctcatccggcgaggtgtacttcgtgacgcaggcgtagccagcggagtttgccgcagcgggcgctcctggaaacggcgagtgcctgctcggcatttagatgaccacttagatgtaatatatatacatatatatatatatatttttgtactacccccgtctagataacaatttaggaataagcacaactacacaaatattgcaatcctagatttctgtcgtagaacttgtttagtaggacctaagcgattcactcgaattttgtaagcagatacgaaactttaggtaggcagatcgaggcggatcctcacatccaaacgcttggggcataaatcctgcgtggactgtgccagtttttgtttttaattttattaccctactattattattttgttttcccggggaatacagactggcattttaggctaaacgtattttggcgttgggttttcattgttgggctttgaaataagtgaatttgttttaactgaacaacaaaataaattaacaaaccttctatgaaaccataa

SEQ ID NO: 21810 - protein, 835 aa, DROSOPHILA
MDRKKVLELDKICRLCISERKEMRPLFSEKVPEMLMDCTSVRVEPTEGWPDKICVQCVHAVSRNHAFKTLVERSDKELREYIRGLTVALVMEEQQQQEAANAKQQLQLERKQQRQLQKQQKILEEQLQQQIVQQQQHQPPAKPKLKPLLRKGSRQQKQRHLEAAPAPQSVPQPAPQPQMQLMQEHAPQQPTMQQQIQQIHMPTLQPAPAQLLSAAGATTTMPQQILLPNGQLITTAQIVAPQLAQIISTAPQSTTNGQATAAQSQFLPQLLQTPNGQTLQIVQQPNGTQTLQLVQLVPQRSLAPTGVTTVTTTTNATDMGQHVGASLGDADVQLLEDGCEVEDEELEDVYEQLDSKADHSFETIVLDDDQQQDFLKDHHEHHQVMINEDLTQSESQDHEYFDDLDQQQAMDEIEDEEEQMKPEEDQDTFIIEEIQLEDDEMLDDPDGEEIDQDCEYIGEEQDPHLSGDVDDDLEYSIMEPPDGETSVDIDQAFMDSEQSHHQQHQEEMQSISLENAVVEFSQATTTTEALVGPTMTVSSASPTPKRAKRSNHQIPAGVTLEPCDHQPPAAGSTTSSKLAAANSRQLVQTASVIAAAGADDNYEIDANLVTEFIRQHTSPLGSGRYICHLCSTEFRQFKGLQNHMHSHTNWIRANCKKQPQCQICLKSFKGPGMLRMHMKTHDAESSTPMCTICNRTFKSKAILYRHRQTHQQRAYCCGVANCRKNFSSAVNLKWHVERKHPEVVDPLFKCGECGSLYDNVDSLQLHVESTDHSAEVQISGQDDAFSGAVSIVSNGTTDMSNMMATGQGTTLAGGTGDTHAVVMGSSGEVYFVTQA

SEQ ID NO: 21811 - DNA, 4806 bp, DROSOPHILA
acttctttctcctccggtgggggactgccaaacttaatggatttgttctgaagcacaaaatgtgtgggggtataattagatatgtttaaatcaggtttcaaaacgctatcaaatctatttgttttttaattaggtagtgccctacctttggagcttcgccattctctagcaatagttctccctcgatgtaaggcatcaagttgctgatatcgaagttttttatgcggatcttgatctcctggtccatggcgatgtcctcgcgacttgcactctggtttgtgaaacgtatggaggtgttgaagacccggtaaatgacggcgctgacatggtgcctggagatgtgtcgcaccacgccgctcagaatggcgcccgccttcggtcggaagacataaaagtccgcatttatgaccagatgcatggtgggatcgtctgcgcgtagacccgccgtttgaccgagcaccttgatgttcttgattccgaggacgatcccgtcgagccccgagtcatagaatcccaccttggtacggataaggagctcgtggagcgcgtgcttgaaattggccatgccgtacgggcccattgctaggtgcatgtccgtggtgatgcaacgcacgcatgactccgggctgctggcatagttttccagctccttgaccgaaaatttaatgtatttctgcagtatcttggccattgcgagatcttaaactattaaaactattggttcgaatcgaccacatgaattacatctgacgatctggcatccccgcaggtgctacaagaaatgcaattttagcggttttccgccaaattgtacaccctttggatgagtaaaaaatggttagataaatcgttgaactattaatatttacaactttttaggataattattagtcactttattaaatttaatgccaatactaatggcatacattttgtattttttatatgttttggtattttttctccccgccatttgtacggtcccattgatcggagcatgcttgtggtataggtgaagaaaacgaggaaagcagagtttgaccaaatataagaaaaatagagcctaaaccgaagatataatgggagttccagcattctttcgctggctgagccggaagtatccatccgtgataatagaatgcaatgaaaacaagcaggtggacgcggacaccggtcgaaacatctacgaggaccccaccttgccgaatccaaatgggatagagtttgacaatctgtacctggacatgaacggcatcatccatccgtgcacgcatccggaggacaagccggcgccgaagaacgaggacgagatgatggtggccatcttcgaatgcatcgaccgtctgttcggtattgtacgtcctcgaaaactgctctatatggccatcgatggcgttgctccacgagccaagatgaatcagcagcgatctcgtcgcttccgagcggccaaggaaaccaccgaaaagcggctggagatagcacggatccgcgaggagctgctgagccgcggctgcaagctgccaccggagaaggagaagggtgaacactttgactccaactgcatcacgccgggcaccccgttcatggaccgactgagcaagtgtttgcactactttgttcatgatcgtcaaaacaataacccggcctggaagggcatcaaggtgatcctgtcggacgccaatgtgcccggtgagggtgagcacaagatcatggattacattcgcaagcagcgtgcccagcctgatcacgatcccaacacgcagcacgtcttgtgcggagccgacgccgatctcatcatgttgggtctggccacgcacgagcccaacttcacaatcattcgggaggagttcctgccgaataagccgcgtccctgcgacatctgcaacggatttggccacgagatggacaagtgtgtcggactcggagcgactgcgccaactagcgccaattttaagcccgatgtgcccataggcgccgaggtaaagttcatctttgtgcggctgagtgtgctacgcgagtacctaaagcagactcttgagatgccgaatctgccatttgagtacagtttcgagcgcgcgttggacgactgggtgttcatgtgcttctttgtgggcaatgattttctgccccacctgcctagcctggagattcgcgagggtgcagtagatcgattggtggagttatacaagaagtgcgtttacaagacaaggggctatctcaccgactcgggagatgtaaatcttgaccgggtgcagctgattatgaccgacttgggcaatgccgaggaccagatcttcaagagccgacagcgacgcgaggagcagttcaaggccagggacaaggcgcgcaagaggcaggaaaggaatcaggaccacggatccttgaatcagtctgcttttggcgccagcgccgtgggtccaaacagccagcaaaggagcgtcggcaactacaaggaggaggccgcggcacttcgtaatagaaaacggacgagtgacatggccaatttggatgacgaagatgaggaggagaataacgacgaggtgcgattgtgggaggatggcttcaaggaccgctactacgaatccaagtttgacgtggcaccgggtaaccagcagttccgatacgctgtagccctgcagtatgtccgaggattgtgctgggttcttaagtactactatcagggctgtgcctcctggaactggtacttcccataccattatgcacccttcgcatcggattttgtcaacatccagggactgtccacgatgttcgaaaagggcacaaagccgtttaatccgctcgagcaactgatgggcgtctttccggcagccagtagttcacacgtgcccgagccgtgggccaagctcatgtccgatccggagtcaccgatcattgacttctatccggaggactttaagatcgatctgaatggcaagaagttcgcctggcagggagtggctctgctgccgttcgtcgatgagaagcgtctcttcaaggctttggttccctactatgatcaacttactggagaggaggtgaagcgaaacaagcgtggagacaattacctgtacatcagcaatcagagtccgcactacaaaaaggtgaagaaaatcagcgaaaaggatgatgagagcgtttgcaaagccatctcatttgacggtatgcgcggcactttgggaaaaaccgaactaaacactgccatcagcggcgttcttaagtcgccgatttccgggctatcggacattaatgacaatataaccgtgacgaccacgttcagggatccggaatacgatgaagactacattttcgaagcgaagcgcctcgaaaacgccgtagatccgccacaggtgctgccaaatgagcagtctggtaacaagcatcgtcccgtcatcggttttaatagccacttgaccagggcctacgttccggatagtggtcaccgcatgctgaacgctggcataaggaaccaacagggtggcggtggcaatggaggtggaggaggaggctacgggcaaggaggcggctacggccagggaataggcggaaaccaaggacagagctatcagaacaatagccgaaactataactacaactacaacaataactacaatcagcaccagggtggcggctatcaaaacaactacaataaccgacagcagcagcaatatggccacaatcagagattcaaccaggacaattcgaatcagcagcagcgcaactttaacaactataatggtccaaggaacaacaactaccagcaacaaggcggcagcaggcaacagaatcagaattatagacggttttaggtgtatcatacaaacaatataatatgtagcgcataacaaaagtgtaatccatattaatttacattattttttaatgaagaaaatatactgattaaggatttccaaacaaactcatgccaagttctgagtttgttctttaaatgaaatacccattgcatttctatcaaagcagcttacagccaacatctagtcttagtgcctcaaagaaaataagtcaaattacaataatgatcatttctctttccattgattgcgtaaaaaaagcaaactagctggataatacaaaaaaatgagacgattgttattttcagataaggaaaatggaacataatttgacaggaaattggataatatcaaaacaatttctagtggagtaaacaattgaatttaagaaaaacttcgcaaacattttgttttaaatccggagtcataataaatccagtagtttttatggaatagcattcgctatatttaacgaatggaatgttattatttcgatttccatgtaacataataaatattttaatttcgaaaacaatactcattacaactatgcgagaatcttaaagtttacaaggggcttttcttaaaacgattgtgctttcttaacagggaaaagttcactgagcttgaaaaatatatagattatatttacgaatgcttcaaaatccatgagcttaaacgaaagcgaatagttagaaatatgtatcgattatatgaatacgcttaaaaggtaacacaatgtgagcttagttcacgttcgattcggaagagtttagctatcggttcggcatctgttgcgagcttatcagatattggtgataacgttcttgttgcgatcggatatgctgtcgaacttgccatggctggagaatggcgtgcgcatgcgtcgcgtgaagctgcgaaggcaacgctgtccatccagactgtccggattgttagtcaccgcaagaagattgactaaaatgagttgcagaaacgttagaaattgtaaacatcc

SEQ ID NO: 21812 - DNA, 2806 bp, DROSOPHILA
cttgtggtataggtgaagaaaacgaggaaagcagagtttgaccaaatataagaaaaatagagcctaaaccgaagatataatgggagttccagcattctttcgctggctgagccggaagtatccatccgtgataatagaatgcaatgaaaacaagcaggtggacgcggacaccggtcgaaacatctacgaggaccccaccttgccgaatccaaatgggatagagtttgacaatctgtacctggacatgaacggcatcatccatccgtgcacgcatccggaggacaagccggcgccgaagaacgaggacgagatgatggtggccatcttcgaatgcatcgaccgtctgttcggtattgtacgtcctcgaaaactgctctatatggccatcgatggcgttgctccacgagccaagatgaatcagcagcgatctcgtcgcttccgagcggccaaggaaaccaccgaaaagcggctggagatagcacggatccgcgaggagctgctgagccgcggctgcaagctgccaccggagaaggagaagggtgaacactttgactccaactgcatcacgccgggcaccccgttcatggaccgactgagcaagtgtttgcactactttgttcatgatcgtcaaaacaataacccggcctggaagggcatcaaggtgatcctgtcggacgccaatgtgcccggtgagggtgagcacaagatcatggattacattcgcaagcagcgtgcccagcctgatcacgatcccaacacgcagcacgtcttgtgcggagccgacgccgatctcatcatgttgggtctggccacgcacgagcccaacttcacaatcattcgggaggagttcctgccgaataagccgcgtccctgcgacatctgcaacggatttggccacgagatggacaagtgtgtcggactcggagcgactgcgccaactagcgccaattttaagcccgatgtgcccataggcgccgaggtaaagttcatctttgtgcggctgagtgtgctacgcgagtacctaaagcagactcttgagatgccgaatctgccatttgagtacagtttcgagcgcgcgttggacgactgggtgttcatgtgcttctttgtgggcaatgattttctgccccacctgcctagcctggagattcgcgagggtgcagtagatcgattggtggagttatacaagaagtgcgtttacaagacaaggggctatctcaccgactcgggagatgtaaatcttgaccgggtgcagctgattatgaccgacttgggcaatgccgaggaccagatcttcaagagccgacagcgacgcgaggagcagttcaaggccagggacaaggcgcgcaagaggcaggaaaggaatcaggaccacggatccttgaatcagtctgcttttggcgccagcgccgtgggtccaaacagccagcaaaggagcgtcggcaactacaaggaggaggccgcggcacttcgtaatagaaaacggacgagtgacatggccaatttggatgacgaagatgaggaggagaataacgacgaggtgcgattgtgggaggatggcttcaaggaccgctactacgaatccaagtttgacgtggcaccgggtaaccagcagttccgatacgctgtagccctgcagtatgtccgaggattgtgctgggttcttaagtactactatcagggctgtgcctcctggaactggtacttcccataccattatgcacccttcgcatcggattttgtcaacatccagggactgtccacgatgttcgaaaagggcacaaagccgtttaatccgctcgagcaactgatgggcgtctttccggcagccagtagttcacacgtgcccgagccgtgggccaagctcatgtccgatccggagtcaccgatcattgacttctatccggaggactttaagatcgatctgaatggcaagaagttcgcctggcagggagtggctctgctgccgttcgtcgatgagaagcgtctcttcaaggctttggttccctactatgatcaacttactggagaggaggtgaagcgaaacaagcgtggagacaattacctgtacatcagcaatcagagtccgcactacaaaaaggtgaagaaaatcagcgaaaaggatgatgagagcgtttgcaaagccatctcatttgacggtatgcgcggcactttgggaaaaaccgaactaaacactgccatcagcggcgttcttaagtcgccgatttccgggctatcggacattaatgacaatataaccgtgacgaccacgttcagggatccggaatacgatgaagactacattttcgaagcgaagcgcctcgaaaacgccgtagatccgccacaggtgctgccaaatgagcagtctggtaacaagcatcgtcccgtcatcggttttaatagccacttgaccagggcctacgttccggatagtggtcaccgcatgctgaacgctggcataaggaaccaacagggtggcggtggcaatggaggtggaggaggaggctacgggcaaggaggcggctacggccagggaataggcggaaaccaaggacagagctatcagaacaatagccgaaactataactacaactacaacaataactacaatcagcaccagggtggcggctatcaaaacaactacaataaccgacagcagcagcaatatggccacaatcagagattcaaccaggacaattcgaatcagcagcagcgcaactttaacaactataatggtccaaggaacaacaactaccagcaacaaggcggcagcaggcaacagaatcagaattatagacggttttag

SEQ ID NO: 21813 - protein, 908 aa, DROSOPHILA
MGVPAFFRWLSRKYPSVIIECNENKQVDADTGRNIYEDPTLPNPNGIEFDNLYLDMNGIIHPCTHPEDKPAPKNEDEMMVAIFECIDRLFGIVRPRKLLYMAIDGVAPRAKMNQQRSRRFRAAKETTEKRLEIARIREELLSRGCKLPPEKEKGEHFDSNCITPGTPFMDRLSKCLHYFVHDRQNNNPAWKGIKVILSDANVPGEGEHKIMDYIRKQRAQPDHDPNTQHVLCGADADLIMLGLATHEPNFTIIREEFLPNKPRPCDICNGFGHEMDKCVGLGATAPTSANFKPDVPIGAEVKFIFVRLSVLREYLKQTLEMPNLPFEYSFERALDDWVFMCFFVGNDFLPHLPSLEIREGAVDRLVELYKKCVYKTRGYLTDSGDVNLDRVQLIMTDLGNAEDQIFKSRQRREEQFKARDKARKRQERNQDHGSLNQSAFGASAVGPNSQQRSVGNYKEEAAALRNRKRTSDMANLDDEDEEENNDEVRLWEDGFKDRYYESKFDVAPGNQQFRYAVALQYVRGLCWVLKYYYQGCASWNWYFPYHYAPFASDFVNIQGLSTMFEKGTKPFNPLEQLMGVFPAASSSHVPEPWAKLMSDPESPIIDFYPEDFKIDLNGKKFAWQGVALLPFVDEKRLFKALVPYYDQLTGEEVKRNKRGDNYLYISNQSPHYKKVKKISEKDDESVCKAISFDGMRGTLGKTELNTAISGVLKSPISGLSDINDNITVTTTFRDPEYDEDYIFEAKRLENAVDPPQVLPNEQSGNKHRPVIGFNSHLTRAYVPDSGHRMLNAGIRNQQGGGGNGGGGGGYGQGGGYGQGIGGNQGQSYQNNSRNYNYNYNNNYNQHQGGGYQNNYNNRQQQQYGHNQRFNQDNSNQQQRNFNNYNGPRNNNYQQQGGSRQQNQNYRRF

SEQ ID NO: 21814 - DNA, 5469 bp, DROSOPHILA
tgttgtaggtggccagaatggcctgccgctcgatgcacataatcttgacgttggacttcttgttccggcaatcgtccagaatgaccaggggcaggaagacggacttgtcccagcaaagcgcagcgttatagacgatcacccgactggcgtacaatgactgcaagatctcgtcgctcagcgagtgacccagaaaagcagtcaggaaattcagctgcgcctccgtccagaagcgcaggttaggaggacgtatggcgggcagcggcagatgcagtgacggtaggtccgaggcattggccttcatggagacgaggtccgcgtaaagctccaaatcctccttgcccatcaaggacttcctgctcagcagcgtaaacatgttcagcgtagcgcccgaggacaaaaccagcgtcttgggctcctccaggtagtggcgacatgcctgcttgtacaccttcacgcagctattcccgttgacatggaccacctgcgatcgcagccccaaggagcgggcgttgttggcgaatgcttcgtgctcgctggtgcggaatgtgcacgggaactgctggcagcagcgccgtcccgccaagaagtagagcagctgttgcggaatgtacttgtcctggatgatgtggttcatttctgctagcttcaaacagattgacactaaattaagtgaagtgcgccgcaatgcgcgcggcaattgcaagttccgttattgccaccgtcgtgaaaatagaaaaatggcggaatggaacacagggctgtattttcgctggcgcaaagcttgctcattaagggtattccttgcatatactcaaacaaatgtgtagtggaaatttgtaaaaaaaaaagatccaggtgtcattacaaactgaattataaaacatactttgttattttcaaagaataagagataagtttccaagacgggagagtttcctttacaggaatatattaaaatattcaattcacaatcccatagattccattcaaatgaaatgattcactttgtactaatatgcttttgcattctttattttttgaaatgaatgtacatgttaaatgaattctcctctaaaatgaggctgcgccaaattcgtttagatatcttaaagaaaactttgttatattggaaattctccgcagatccagcattataagtgcacaatctttataactaaactttcttagcgtaagccaaaatatatttaataaacaacaaaatacaaatcaaattctacttaagtgatacaatgatacaatttttactgagctttggcgcagaatttattttgaagtgtgttttatcaattgtgttattagccatccagtgtcatcttgtttacaattatcaaaatatctattacatattaaatacaattcttaactggtttgtatgtggaatacatatatgtaaatttaagtaagctacagaggtgttggttaaccacattaaccacatcattgggtgacaggcaccgccttaaagaaagtttgacttctccgcggcgttttgagatccgctgctctggttcgaccaaccggtgttcccattctggaatagagtagaatagattctggctgggatccaggtttcttaggggatggtttcagttttgactctaacctgtggctccgagttgtcggtctttattccgttggcggccggattgttgttcgggttattcggccccttccgtccaccaaagttgttggcattgttgtggcccccgttctgagccatccaagatagaaaattgccgccctgcggagcaagtgagagagttttttgtttgaaacaatgattgaggtgtgaaggcttgcctgttggtcctggttttggttctgcagctggttgccgaccaggctccactggttcaaggcggcagcgaccagtgcgggattgatgggcaatgagttgagattgagcattgactggttgctcatgttttggccctggttggaggagctcgatccctgcgagttgatgcccagggcctgcaggttgggcatgtccaggtggccacggttcatccagccgttgctgccgcccacgttgccgttatgcggctggttcattccgtgaaaattcgactggcgactgttgtactggctgccgccgtcctggcggttcgtgttcccgccactggagtgattgccgccattgttgtggtagcccccgcccgagttgccgccgtaattgttgccacccatgccgtagccggcggtgccaatgttgtgattattgggcacaattgcgttctcaccgccgtgagcattgtgttggttattacctcggtggtgtccgttgcggcccggattcatgtggttaccctgtgggtggtatgagtgcatgccaaagctgttggcagagttgtagttgtagctctggacctgttggtttctgttctgctcggcctttggagcagcattcgacacatggaccgaaacgcctgtggaaagtgtctcattaattccctgattcttctccacgcggcagtgactcacccttgataatgtgatcctctccgcacagggactgtgccacgtcgggatcaaggaaggttacaaagctaaaggccctgaagggccggggaatgaacacatcagtgacttcgccaaacttggagaaatactcgcgcaagtcgtccgagttaatgtcctcggtgcagcggcccacgaacaccttgcaaggcacctggtggcccatgccctatgagaatagaaggattagtaggcgtgaaattgcagggctaacaagaggacttaccttcgagttgggcaccttaacctcgcaccagcgaccgtcgatcagatggcgattggtgagcacgcgcatctgggcatcgtaagagccgaagcgcacgaaaccgaagcccttggactggcccgacttggtgtccttcttgatctgggccatcagcacctcgccgtaggtctcgaagtactcacgcaagctctcctctgtggtcttccacggcaagccgagcacgatgagatcagtgcagcgcagacgggtctcgatgcgtttggtcttggcagttgagttctccaagttatcgtcgctcttgcgcttgttctctgcagggggggattacagaattatttaaggttcaacagggagtcatacaactcgaatttacccttgggaaagacgcaaaagtaagcgtactcgccccagccggactccacgctgggcggaaacagtctgccctcgttggagcgaactccgcgcacagccttcgtgtccaggttgcggtacttcagaccgcaggatccagggaactgagcttgcagtgtggacagaagcagagtgccatcctcctcagccggcagctcgatgggctcgtcgccctcctcctccgacacttgaacgaaatccatttcctagaaggctgctagaaacgaggaggggattaaagaactctatcgccgcaggggctcacacttcgctctagaaatgatccaccatgtcattcagtcaacggaagcatcccacatattctgcatcgctgcattcatgaatgcactcactcagttcatccgttctattcagatgcatcccaaggtacaatattcaacacaaaaaggttgccccgaaccactctatacacacattgctcgtgggaccaagccaaaacaaaaaggatcctacactaggtcaatctactaaaaacgacaaataaacaatgtttctatctcttgtaatttcgatgatataattttagtaagtattacaaacatattcatatattattagtgttcatgtttaggcgtttctttacgttattattagttaaaaattctctgaatcagacgctacttatgtcccaccatcggctaaatgcctattctacgtacatttagttaataaacaaaagaagaatacccaatcccaagtttacgatgtatggcatacatatgtatatgttttgaactactcaagaaaacagatatttcacccacttaatacgagtaaactgacgtttgtgagtgtggaatcgcggcaggaattggaaaatcaatgaatgaaagccacataaattgaaaatatccaatcctgtcgtctgtgtgtgagtgcaagtgtgtggcacacacacacacgcacacaaacgcaatcgtcgaggggaggacataatgtgtagacggaggcagtttggcggtcctaaaagatggttggttacacaacaattcttacactattgacagggattagttggttgctgtaatttctgactgcgtatggcaagtagatatagatttctgatcccagatctcagatcgcacgctctctcacacgaattcgattcacacccaggcaaaatcaggtattcactgtacgttccacgctcggttcttgacacaacacacgcttcgatgcacaaccactttcaatcggtgcgaaataggaatcaggtaatatttacaattgacagcttaacaaattttcaaacgacgagtgaagcatttcttctcgctttccgttttgattttcttttcctttgtatgtatcgcctgacgtatgcgcagtgtggccgaacagggctagtgagaaataccagccggcgggtagatatactaaaagtgtattatttttagttaaaacagtgcattgtcacataaattttaatagcctctttattaaactatatgagcgttgattgccactatgaatatctaagcaatatattacattacaatatggcaattatattggcatttggtactgtcgaataaaataccaaaccttgcagtgctgcccatcagctataccaaaaaaaaacttggcagcattgcgcatcgtgttcatttgaaatttcgaaacacaaaacattataaataaattcaaacgaaattagctcgccatggaaatgcgtacgataaaaacagctagactttattaatcaataacatttattatttacagctgaaggagtttcgattgctcttgcagaccgcgcttgaatgacaaaatgcattagttggtttcgaaatattaatgattggctaacaattatgatacattattatttatacacaattaaaaaaggcatcgctgatttgcactacacaaatattattgtattttctcgtaatattagtaaaatcacagtgaaatattactgcacgccgtagagttgaaaatgtagttctgggcctccagaatgtgcatttcagttaaacatatagcaactaacaggataatgtaaccgctgtaccggatcgcgcgcaggaagtcccacagcttgtcgcagaagatgctcagcaggacgcagtgcagcagggcgtgcacgttgacgatgcgccacatccaggcgacgcagaagaaccaggtcgacttgaacacgtaatcctggcaatgcgactggttgccgctcacgtcctcgcgctccagcatgttctggtagacggcaatgtagcgattccacgccgtcgagctcagcagcagctggcccgtgaagctgatcacgt

SEQ ID NO: 21815 - DNA, 3161 bp, DROSOPHILA
agaaatgcttcactcgtcgtttgaaaatttgttaagctgtcaattgtaaatattacctgattcctatttcgcaccgattgaaagtggttgtgcatcgaagcgtgtgttgtgtcaagaaccgagcgtggaacgtacagtgaatacctgattttgcctgggtgtgaatcgaattcgtgtgagagagcgtgcgatctgagatctgggatcagaaatctatatctacttgccatacgcagtcagaaattacagcaaccaactaatccctgtcaatagtgtaagaattgttgtgtaaccaaccatcttttaggaccgccaaactgcctccgtctacacattatgtcctcccctcgacgattgcgtttgtgtgcgtgtgtgtgtgtgccacacacttgcactcacacacagacgacaggattggatattttcaatttatgtggctttcattcattgattttccaattcctgccgcgattccacactcacaaacgtcagtttactcgtattaagtgggtgaaatatctgttttcttgagtagttcaaaacatatacatatgtatgccatacatcgtaaacttgggattgggtattcttcttttgtttattaactaaatgtacgtagaataggcatttagccgatggtgggacataagtagcgtctgattcagagaatttttaactaataataacgtaaagaaacgcctaaacatgaacactaataatatatgaatatgtttgtaatacttactaaaattatatcatcgaaattacaagagatagaaacattgtttatttgtcgtttttagtagattgacctagtgtaggatcctttttgttttggcttggtcccacgagcaatgtgtgtatagagtggttcggggcaacctttttgtgttgaatattgtaccttgggatgcatctgaatagaacggatgaactgagtgagtgcattcatgaatgcagcgatgcagaatatgtgggatgcttccgttgactgaatgacatggtggatcatttctagagcgaagtgtgagcccctgcggcgatagagttctttaatcccctcctcgtttctagcagccttctaggaaatggatttcgttcaagtgtcggaggaggagggcgacgagcccatcgagctgccggctgaggaggatggcactctgcttctgtccacactgcaagctcagttccctggatcctgcggtctgaagtaccgcaacctggacacgaaggctgtgcgcggagttcgctccaacgagggcagactgtttccgcccagcgtggagtccggctggggcgagtacgcttacttttgcgtctttcccaaggacaagcgcaagagcgacgataacttggagaactcaactgccaagaccaaacgcatcgagacccgtctgcgctgcactgatctcatcgtgctcggcttgccgtggaagaccacagaggagagcttgcgtgagtacttcgagacctacggcgaggtgctgatggcccagatcaagaaggacaccaagtcgggccagtccaagggcttcggtttcgtgcgcttcggctcttacgatgcccagatgcgcgtgctcaccaatcgccatctgatcgacggtcgctggtgcgaggttaaggtgcccaactcgaagggcatgggccaccaggtgccttgcaaggtgttcgtgggccgctgcaccgaggacattaactcggacgacttgcgcgagtatttctccaagtttggcgaagtcactgatgtgttcattccccggcccttcagggcctttagctttgtaaccttccttgatcccgacgtggcacagtccctgtgcggagaggatcacattatcaagggcgtttcggtccatgtgtcgaatgctgctccaaaggccgagcagaacagaaaccaacaggtccagagctacaactacaactctgccaacagctttggcatgcactcataccacccacagggtaaccacatgaatccgggccgcaacggacaccaccgaggtaataaccaacacaatgctcacggcggtgagaacgcaattgtgcccaataatcacaacattggcaccgccggctacggcatgggtggcaacaattacggcggcaactcgggcgggggctaccacaacaatggcggcaatcactccagtggcgggaacacgaaccgccaggacggcggcagccagtacaacagtcgccagtcgaattttcacggaatgaaccagccgcataacggcaacgtgggcggcagcaacggctggatgaaccgtggccacctggacatgcccaacctgcaggccctgggcatcaactcgcagggatcgagctcctccaaccagggccaaaacatgagcaaccagtcaatgctcaatctcaactcattgcccatcaatcccgcactggtcgctgccgccttgaaccagtggagcctggtcggcaaccagctgcagaaccaaaaccaggaccaacagggcggcaattttctatcttggatggctcagaacgggggccacaacaatgccaacaactttggtggacggaaggggccgaataacccgaacaacaatccggccgccaacggaataaagaccgacaactcggagccacagaatgggaacaccggttggtcgaaccagagcagcggatctcaaaacgccgcggagaagtcaaactttctttaaggcggtgcctgtcacccaatgatgtggttaatgtggttaaccaacacctctgtagcttacttaaatttacatatatgtattccacatacaaaccagttaagaattgtatttaatatgtaatagatattttgataattgtaaacaagatgacactggatggctaataacacaattgataaaacacacttcaaaataaattctgcgccaaagctcagtaaaaattgtatcattgtatcacttaagtagaatttgatttgtattttgttgtttattaaatatattttggcttacgctaagaaagtttagttataaagattgtgcacttataatgctggatctgcggagaatttccaatataacaaagttttctttaagatatctaaacgaatttggcgcagcctcattttagaggagaattcatttaacatgtacattcatttcaaaaaataaagaatgcaaaagcatattagtacaaagtga

SEQ ID NO: 21816 - protein, 530 aa, DROSOPHILA
MDFVQVSEEEGDEPIELPAEEDGTLLLSTLQAQFPGSCGLKYRNLDTKAVRGVRSNEGRLFPPSVESGWGEYAYFCVFPKDKRKSDDNLENSTAKTKRIETRLRCTDLIVLGLPWKTTEESLREYFETYGEVLMAQIKKDTKSGQSKGFGFVRFGSYDAQMRVLTNRHLIDGRWCEVKVPNSKGMGHQVPCKVFVGRCTEDINSDDLREYFSKFGEVTDVFIPRPFRAFSFVTFLDPDVAQSLCGEDHIIKGVSVHVSNAAPKAEQNRNQQVQSYNYNSANSFGMHSYHPQGNHMNPGRNGHHRGNNQHNAHGGENAIVPNNHNIGTAGYGMGGNNYGGNSGGGYHNNGGNHSSGGNTNRQDGGSQYNSRQSNFHGMNQPHNGNVGGSNGWMNRGHLDMPNLQALGINSQGSSSSNQGQNMSNQSMLNLNSLPINPALVAAALNQWSLVGNQLQNQNQDQQGGNFLSWMAQNGGHNNANNFGGRKGPNNPNNNPAANGIKTDNSEPQNGNTGWSNQSSGSQNAAEKSNFL

SEQ ID NO: 21817 - DNA, 5253 bp, DROSOPHILA
agatgcagtgacggtaggtccgaggcattggccttcatggagacgaggtccgcgtaaagctccaaatcctccttgcccatcaaggacttcctgctcagcagcgtaaacatgttcagcgtagcgcccgaggacaaaaccagcgtcttgggctcctccaggtagtggcgacatgcctgcttgtacaccttcacgcagctattcccgttgacatggaccacctgcgatcgcagccccaaggagcgggcgttgttggcgaatgcttcgtgctcgctggtgcggaatgtgcacgggaactgctggcagcagcgccgtcccgccaagaagtagagcagctgttgcggaatgtacttgtcctggatgatgtggttcatttctgctagcttcaaacagattgacactaaattaagtgaagtgcgccgcaatgcgcgcggcaattgcaagttccgttattgccaccgtcgtgaaaatagaaaaatggcggaatggaacacagggctgtattttcgctggcgcaaagcttgctcattaagggtattccttgcatatactcaaacaaatgtgtagtggaaatttgtaaaaaaaaaagatccaggtgtcattacaaactgaattataaaacatactttgttattttcaaagaataagagataagtttccaagacgggagagtttcctttacaggaatatattaaaatattcaattcacaatcccatagattccattcaaatgaaatgattcactttgtactaatatgcttttgcattctttattttttgaaatgaatgtacatgttaaatgaattctcctctaaaatgaggctgcgccaaattcgtttagatatcttaaagaaaactttgttatattggaaattctccgcagatccagcattataagtgcacaatctttataactaaactttcttagcgtaagccaaaatatatttaataaacaacaaaatacaaatcaaattctacttaagtgatacaatgatacaatttttactgagctttggcgcagaatttattttgaagtgtgttttatcaattgtgttattagccatccagtgtcatcttgtttacaattatcaaaatatctattacatattaaatacaattcttaactggtttgtatgtggaatacatatatgtaaatttaagtaagctacagaggtgttggttaaccacattaaccacatcattgggtgacaggcaccgccttaaagaaagtttgacttctccgcggcgttttgagatccgctgctctggttcgaccaaccggtgttcccattctggaatagagtagaatagattctggctgggatccaggtttcttaggggatggtttcagttttgactctaacctgtggctccgagttgtcggtctttattccgttggcggccggattgttgttcgggttattcggccccttccgtccaccaaagttgttggcattgttgtggcccccgttctgagccatccaagatagaaaattgccgccctgcggagcaagtgagagagttttttgtttgaaacaatgattgaggtgtgaaggcttgcctgttggtcctggttttggttctgcagctggttgccgaccaggctccactggttcaaggcggcagcgaccagtgcgggattgatgggcaatgagttgagattgagcattgactggttgctcatgttttggccctggttggaggagctcgatccctgcgagttgatgcccagggcctgcaggttgggcatgtccaggtggccacggttcatccagccgttgctgccgcccacgttgccgttatgcggctggttcattccgtgaaaattcgactggcgactgttgtactggctgccgccgtcctggcggttcgtgttcccgccactggagtgattgccgccattgttgtggtagcccccgcccgagttgccgccgtaattgttgccacccatgccgtagccggcggtgccaatgttgtgattattgggcacaattgcgttctcaccgccgtgagcattgtgttggttattacctcggtggtgtccgttgcggcccggattcatgtggttaccctgtgggtggtatgagtgcatgccaaagctgttggcagagttgtagttgtagctctggacctgttggtttctgttctgctcggcctttggagcagcattcgacacatggaccgaaacgcctgtggaaagtgtctcattaattccctgattcttctccacgcggcagtgactcacccttgataatgtgatcctctccgcacagggactgtgccacgtcgggatcaaggaaggttacaaagctaaaggccctgaagggccggggaatgaacacatcagtgacttcgccaaacttggagaaatactcgcgcaagtcgtccgagttaatgtcctcggtgcagcggcccacgaacaccttgcaaggcacctggtggcccatgccctatgagaatagaaggattagtaggcgtgaaattgcagggctaacaagaggacttaccttcgagttgggcaccttaacctcgcaccagcgaccgtcgatcagatggcgattggtgagcacgcgcatctgggcatcgtaagagccgaagcgcacgaaaccgaagcccttggactggcccgacttggtgtccttcttgatctgggccatcagcacctcgccgtaggtctcgaagtactcacgcaagctctcctctgtggtcttccacggcaagccgagcacgatgagatcagtgcagcgcagacgggtctcgatgcgtttggtcttggcagttgagttctccaagttatcgtcgctcttgcgcttgttctctgcagggggggattacagaattatttaaggttcaacagggagtcatacaactcgaatttacccttgggaaagacgcaaaagtaagcgtactcgccccagccggactccacgctgggcggaaacagtctgccctcgttggagcgaactccgcgcacagccttcgtgtccaggttgcggtacttcagaccgcaggatccagggaactgagcttgcagtgtggacagaagcagagtgccatcctcctcagccggcagctcgatgggctcgtcgccctcctcctccgacacttgaacgaaatccatttcctagaaggctgctagaaacgaggaggggattaaagaactctatcgccgcaggggctcacacttcgctctagaaatgatccaccatgtcattcagtcaacggaagcatcccacatattctgcatcgctgcattcatgaatgcactcactcagttcatccgttctattcagatgcatcccaaggtacaatattcaacacaaaaaggttgccccgaaccactctatacacacattgctcgtgggaccaagccaaaacaaaaaggatcctacactaggtcaatctactaaaaacgacaaataaacaatgtttctatctcttgtaatttcgatgatataattttagtaagtattacaaacatattcatatattattagtgttcatgtttaggcgtttctttacgttattattagttaaaaattctctgaatcagacgctacttatgtcccaccatcggctaaatgcctattctacgtacatttagttaataaacaaaagaagaatacccaatcccaagtttacgatgtatggcatacatatgtatatgttttgaactactcaagaaaacagatatttcacccacttaatacgagtaaactgacgtttgtgagtgtggaatcgcggcaggaattggaaaatcaatgaatgaaagccacataaattgaaaatatccaatcctgtcgtctgtgtgtgagtgcaagtgtgtggcacacacacacacgcacacaaacgcaatcgtcgaggggaggacataatgtgtagacggaggcagtttggcggtcctaaaagatggttggttacacaacaattcttacactattgacagggattagttggttgctgtaatttctgactgcgtatggcaagtagatatagatttctgatcccagatctcagatcgcacgctctctcacacgaattcgattcacacccaggcaaaatcaggtattcactgtacgttccacgctcggttcttgacacaacacacgcttcgatgcacaaccactttcaatcggtgcgaaataggaatcaggtaatatttacaattgacagcttaacaaattttcaaacgacgagtgaagcatttcttctcgctttccgttttgattttcttttcctttgtatgtatcgcctgacgtatgcgcagtgtggccgaacagggctagtgagaaataccagccggcgggtagatatactaaaagtgtattatttttagttaaaacagtgcattgtcacataaattttaatagcctctttattaaactatatgagcgttgattgccactatgaatatctaagcaatatattacattacaatatggcaattatattggcatttggtactgtcgaataaaataccaaaccttgcagtgctgcccatcagctataccaaaaaaaaacttggcagcattgcgcatcgtgttcatttgaaatttcgaaacacaaaacattataaataaattcaaacgaaattagctcgccatggaaatgcgtacgataaaaacagctagactttattaatcaataacatttattatttacagctgaaggagtttcgattgctcttgcagaccgcgcttgaatgacaaaatgcattagttggtttcgaaatattaatgattggctaacaattatgatacattattatttatacacaattaaaaaaggcatcgctgatttgcactacacaaatattattgtattttctcgtaatattagtaaaatcacagtgaaatattactgcacgccgtagagttgaaaatgtagttctgggcctccagaatgtgcatttcagttaaacatatagcaactaacaggataatgtaaccgctgtaccggatcgcgcgcaggaagtcccacagcttgtcgcagaagatgctcagcaggacgcagtgcagcagggcgtgcacgttgacgatgcgccacatccaggcgacgcagaagaaccaggtcgacttgaacacgtaatcctggcaatgcgactggttgccgctcacgtcctcgcgctccagcatgttctggtagacggcaatgtagcgattccacgccgtcgagctcagcagcagctggcccgtgaagctgatcacgttcttggccaccttgcgcgtggtggccttcatcttcggtatcatcatg

SEQ ID NO: 21818 - DNA, 1913 bp, DROSOPHILA
tcaggcgatacatacaaaggaaaagaaaatcaaaacggaaagcgagaagaaatgcttcactcgtcgtttgaaaatttgttaagctgtcaattccttctaggaaatggatttcgttcaagtgtcggaggaggagggcgacgagcccatcgagctgccggctgaggaggatggcactctgcttctgtccacactgcaagctcagttccctggatcctgcggtctgaagtaccgcaacctggacacgaaggctgtgcgcggagttcgctccaacgagggcagactgtttccgcccagcgtggagtccggctggggcgagtacgcttacttttgcgtctttcccaaggacaagcgcaagagcgacgataacttggagaactcaactgccaagaccaaacgcatcgagacccgtctgcgctgcactgatctcatcgtgctcggcttgccgtggaagaccacagaggagagcttgcgtgagtacttcgagacctacggcgaggtgctgatggcccagatcaagaaggacaccaagtcgggccagtccaagggcttcggtttcgtgcgcttcggctcttacgatgcccagatgcgcgtgctcaccaatcgccatctgatcgacggtcgctggtgcgaggttaaggtgcccaactcgaagggcatgggccaccaggtgccttgcaaggtgttcgtgggccgctgcaccgaggacattaactcggacgacttgcgcgagtatttctccaagtttggcgaagtcactgatgtgttcattccccggcccttcagggcctttagctttgtaaccttccttgatcccgacgtggcacagtccctgtgcggagaggatcacattatcaagggcgtttcggtccatgtgtcgaatgctgctccaaaggccgagcagaacagaaaccaacaggtccagagctacaactacaactctgccaacagctttggcatgcactcataccacccacagggtaaccacatgaatccgggccgcaacggacaccaccgaggtaataaccaacacaatgctcacggcggtgagaacgcaattgtgcccaataatcacaacattggcaccgccggctacggcatgggtggcaacaattacggcggcaactcgggcgggggctaccacaacaatggcggcaatcactccagtggcgggaacacgaaccgccaggacggcggcagccagtacaacagtcgccagtcgaattttcacggaatgaaccagccgcataacggcaacgtgggcggcagcaacggctggatgaaccgtggccacctggacatgcccaacctgcaggccctgggcatcaactcgcagggatcgagctcctccaaccagggccaaaacatgagcaaccagtcaatgctcaatctcaactcattgcccatcaatcccgcactggtcgctgccgccttgaaccagtggagcctggtcggcaaccagctgcagaaccaaaaccaggaccaacagggcggcaattttctatcttggatggctcagaacgggggccacaacaatgccaacaactttggtggacggaaggggccgaataacccgaacaacaatccggccgccaacggaataaagaccgacaactcggagccacagaatgggaacaccggttggtcgaaccagagcagcggatctcaaaacgccgcggagaagtcaaactttctttaaggcggtgcctgtcacccaatgatgtggttaatgtggttaaccaacacctctgtagcttacttaaatttacatatatgtattccacatacaaaccagttaagaattgtatttaatatgtaatagatattttgataattgtaaacaagatgacactggatggctaataacacaattgataaaacacacttcaaaataaattctgcgccaaagctcagta

SEQ ID NO: 21819 - protein, 530 aa, DROSOPHILA; identical to SEQ ID NO: 21816

SEQ ID NO: 21820 - DNA, 5218 bp, DROSOPHILA
agatgcagtgacggtaggtccgaggcattggccttcatggagacgaggtccgcgtaaagctccaaatcctccttgcccatcaaggacttcctgctcagcagcgtaaacatgttcagcgtagcgcccgaggacaaaaccagcgtcttgggctcctccaggtagtggcgacatgcctgcttgtacaccttcacgcagctattcccgttgacatggaccacctgcgatcgcagccccaaggagcgggcgttgttggcgaatgcttcgtgctcgctggtgcggaatgtgcacgggaactgctggcagcagcgccgtcccgccaagaagtagagcagctgttgcggaatgtacttgtcctggatgatgtggttcatttctgctagcttcaaacagattgacactaaattaagtgaagtgcgccgcaatgcgcgcggcaattgcaagttccgttattgccaccgtcgtgaaaatagaaaaatggcggaatggaacacagggctgtattttcgctggcgcaaagcttgctcattaagggtattccttgcatatactcaaacaaatgtgtagtggaaatttgtaaaaaaaaaagatccaggtgtcattacaaactgaattataaaacatactttgttattttcaaagaataagagataagtttccaagacgggagagtttcctttacaggaatatattaaaatattcaattcacaatcccatagattccattcaaatgaaatgattcactttgtactaatatgcttttgcattctttattttttgaaatgaatgtacatgttaaatgaattctcctctaaaatgaggctgcgccaaattcgtttagatatcttaaagaaaactttgttatattggaaattctccgcagatccagcattataagtgcacaatctttataactaaactttcttagcgtaagccaaaatatatttaataaacaacaaaatacaaatcaaattctacttaagtgatacaatgatacaatttttactgagctttggcgcagaatttattttgaagtgtgttttatcaattgtgttattagccatccagtgtcatcttgtttacaattatcaaaatatctattacatattaaatacaattcttaactggtttgtatgtggaatacatatatgtaaatttaagtaagctacagaggtgttggttaaccacattaaccacatcattgggtgacaggcaccgccttaaagaaagtttgacttctccgcggcgttttgagatccgctgctctggttcgaccaaccggtgttcccattctggaatagagtagaatagattctggctgggatccaggtttcttaggggatggtttcagttttgactctaacctgtggctccgagttgtcggtctttattccgttggcggccggattgttgttcgggttattcggccccttccgtccaccaaagttgttggcattgttgtggcccccgttctgagccatccaagatagaaaattgccgccctgcggagcaagtgagagagttttttgtttgaaacaatgattgaggtgtgaaggcttgcctgttggtcctggttttggttctgcagctggttgccgaccaggctccactggttcaaggcggcagcgaccagtgcgggattgatgggcaatgagttgagattgagcattgactggttgctcatgttttggccctggttggaggagctcgatccctgcgagttgatgcccagggcctgcaggttgggcatgtccaggtggccacggttcatccagccgttgctgccgcccacgttgccgttatgcggctggttcattccgtgaaaattcgactggcgactgttgtactggctgccgccgtcctggcggttcgtgttcccgccactggagtgattgccgccattgttgtggtagcccccgcccgagttgccgccgtaattgttgccacccatgccgtagccggcggtgccaatgttgtgattattgggcacaattgcgttctcaccgccgtgagcattgtgttggttattacctcggtggtgtccgttgcggcccggattcatgtggttaccctgtgggtggtatgagtgcatgccaaagctgttggcagagttgtagttgtagctctggacctgttggtttctgttctgctcggcctttggagcagcattcgacacatggaccgaaacgcctgtggaaagtgtctcattaattccctgattcttctccacgcggcagtgactcacccttgataatgtgatcctctccgcacagggactgtgccacgtcgggatcaaggaaggttacaaagctaaaggccctgaagggccggggaatgaacacatcagtgacttcgccaaacttggagaaatactcgcgcaagtcgtccgagttaatgtcctcggtgcagcggcccacgaacaccttgcaaggcacctggtggcccatgccctatgagaatagaaggattagtaggcgtgaaattgcagggctaacaagaggacttaccttcgagttgggcaccttaacctcgcaccagcgaccgtcgatcagatggcgattggtgagcacgcgcatctgggcatcgtaagagccgaagcgcacgaaaccgaagcccttggactggcccgacttggtgtccttcttgatctgggccatcagcacctcgccgtaggtctcgaagtactcacgcaagctctcctctgtggtcttccacggcaagccgagcacgatgagatcagtgcagcgcagacgggtctcgatgcgtttggtcttggcagttgagttctccaagttatcgtcgctcttgcgcttgttctctgcagggggggattacagaattatttaaggttcaacagggagtcatacaactcgaatttacccttgggaaagacgcaaaagtaagcgtactcgccccagccggactccacgctgggcggaaacagtctgccctcgttggagcgaactccgcgcacagccttcgtgtccaggttgcggtacttcagaccgcaggatccagggaactgagcttgcagtgtggacagaagcagagtgccatcctcctcagccggcagctcgatgggctcgtcgccctcctcctccgacacttgaacgaaatccatttcctagaaggctgctagaaacgaggaggggattaaagaactctatcgccgcaggggctcacacttcgctctagaaatgatccaccatgtcattcagtcaacggaagcatcccacatattctgcatcgctgcattcatgaatgcactcactcagttcatccgttctattcagatgcatcccaaggtacaatattcaacacaaaaaggttgccccgaaccactctatacacacattgctcgtgggaccaagccaaaacaaaaaggatcctacactaggtcaatctactaaaaacgacaaataaacaatgtttctatctcttgtaatttcgatgatataattttagtaagtattacaaacatattcatatattattagtgttcatgtttaggcgtttctttacgttattattagttaaaaattctctgaatcagacgctacttatgtcccaccatcggctaaatgcctattctacgtacatttagttaataaacaaaagaagaatacccaatcccaagtttacgatgtatggcatacatatgtatatgttttgaactactcaagaaaacagatatttcacccacttaatacgagtaaactgacgtttgtgagtgtggaatcgcggcaggaattggaaaatcaatgaatgaaagccacataaattgaaaatatccaatcctgtcgtctgtgtgtgagtgcaagtgtgtggcacacacacacacgcacacaaacgcaatcgtcgaggggaggacataatgtgtagacggaggcagtttggcggtcctaaaagatggttggttacacaacaattcttacactattgacagggattagttggttgctgtaatttctgactgcgtatggcaagtagatatagatttctgatcccagatctcagatcgcacgctctctcacacgaattcgattcacacccaggcaaaatcaggtattcactgtacgttccacgctcggttcttgacacaacacacgcttcgatgcacaaccactttcaatcggtgcgaaataggaatcaggtaatatttacaattgacagcttaacaaattttcaaacgacgagtgaagcatttcttctcgctttccgttttgattttcttttcctttgtatgtatcgcctgacgtatgcgcagtgtggccgaacagggctagtgagaaataccagccggcgggtagatatactaaaagtgtattatttttagttaaaacagtgcattgtcacataaattttaatagcctctttattaaactatatgagcgttgattgccactatgaatatctaagcaatatattacattacaatatggcaattatattggcatttggtactgtcgaataaaataccaaaccttgcagtgctgcccatcagctataccaaaaaaaaacttggcagcattgcgcatcgtgttcatttgaaatttcgaaacacaaaacattataaataaattcaaacgaaattagctcgccatggaaatgcgtacgataaaaacagctagactttattaatcaataacatttattatttacagctgaaggagtttcgattgctcttgcagaccgcgcttgaatgacaaaatgcattagttggtttcgaaatattaatgattggctaacaattatgatacattattatttatacacaattaaaaaaggcatcgctgatttgcactacacaaatattattgtattttctcgtaatattagtaaaatcacagtgaaatattactgcacgccgtagagttgaaaatgtagttctgggcctccagaatgtgcatttcagttaaacatatagcaactaacaggataatgtaaccgctgtaccggatcgcgcgcaggaagtcccacagcttgtcgcagaagatgctcagcaggacgcagtgcagcagggcgtgcacgttgacgatgcgccacatccaggcgacgcagaagaaccaggtcgacttgaacacgtaatcctggcaatgcgactggttgccgctcacgtcctcgcgctccagcatgttctggtagacggcaatgtagcgattccacgccgtcgagctcagcagcagctggcccgtgaagctgatcacgttcttggccacct

SEQ ID NO: 21821 - DNA, 1637 bp, DROSOPHILA
cggaaagcgagaagaaatgcttcactcgtcgtttgaaaatttgttaagctgtcaattgtaaatattacctgattcctatttcgcaccgattgaaagtggttgtgcatcgaagcgtgtgttgtgtcaagaaccgagcgtggaacgtacagtgaatacctgattttgcctgggtgtgaatcgaattcgtgtgagagagcgtgcgatctgagatctgggatcagaaatctatatctacttgccatacgcagtcagaaattacagcaaccaactaatccctgtcaatagtccttctaggaaatggatttcgttcaagtgtcggaggaggagggcgacgagcccatcgagctgccggctgaggaggatggcactctgcttctgtccacactgcaagctcagttccctggatcctgcggtctgaagtaccgcaacctggacacgaaggctgtgcgcggagttcgctccaacgagggcagactgtttccgcccagcgtggagtccggctggggcgagtacgcttacttttgcgtctttcccaaggacaagcgcaagagcgacgataacttggagaactcaactgccaagaccaaacgcatcgagacccgtctgcgctgcactgatctcatcgtgctcggcttgccgtggaagaccacagaggagagcttgcgtgagtacttcgagacctacggcgaggtgctgatggcccagatcaagaaggacaccaagtcgggccagtccaagggcttcggtttcgtgcgcttcggctcttacgatgcccagatgcgcgtgctcaccaatcgccatctgatcgacggtcgctggtgcgaggttaaggtgcccaactcgaagggcatgggccaccaggtgccttgcaaggtgttcgtgggccgctgcaccgaggacattaactcggacgacttgcgcgagtatttctccaagtttggcgaagtcactgatgtgttcattccccggcccttcagggcctttagctttgtaaccttccttgatcccgacgtggcacagtccctgtgcggagaggatcacattatcaagggcgtttcggtccatgtgtcgaatgctgctccaaaggccgagcagaacagaaaccaacaggtccagagctacaactacaactctgccaacagctttggcatgcactcataccacccacagggtaaccacatgaatccgggccgcaacggacaccaccgagggcggcaattttctatcttggatggctcagaacgggggccacaacaatgccaacaactttggtggacggaaggggccgaataacccgaacaacaatccggccgccaacggaataaagaccgacaactcggagccacagaatgggaacaccggttggtcgaaccagagcagcggatctcaaaacgccgcggagaagtcaaactttctttaaggcggtgcctgtcacccaatgatgtggttaatgtggttaaccaacacctctgtagcttacttaaatttacatatatgtattccacatacaaaccagttaagaattgtatttaatatgtaatagatattttgataattgtaaacaagatgacactggatggctaataacacaattgataaaacacacttcaaaataaattctgcgccaaagctcagta

SEQ ID NO: 21822 - protein, 331 aa, DROSOPHILA
MDFVQVSEEEGDEPIELPAEEDGTLLLSTLQAQFPGSCGLKYRNLDTKAVRGVRSNEGRLFPPSVESGWGEYAYFCVFPKDKRKSDDNLENSTAKTKRIETRLRCTDLIVLGLPWKTTEESLREYFETYGEVLMAQIKKDTKSGQSKGFGFVRFGSYDAQMRVLTNRHLIDGRWCEVKVPNSKGMGHQVPCKVFVGRCTEDINSDDLREYFSKFGEVTDVFIPRPFRAFSFVTFLDPDVAQSLCGEDHIIKGVSVHVSNAAPKAEQNRNQQVQSYNYNSANSFGMHSYHPQGNHMNPGRNGHHRGRQFSILDGSERGPQQCQQLWWTEGAE

SEQ ID NO: 21823 - DNA, 4441 bp, DROSOPHILA
cacggcatggtgcacgttgatcagcggtggcggtgagatggtaatacccagatattcgcttataatcgtattgggtgagagtagtttcaccgccaggcagatcttgtccagttgcatagtctgcaggcttggctgactggtctcgcttagctcctcgtaggcctccttgcttatcagacggaagcattgtacatccccttctacggaaaacgcagtgcatcagttagtgttaacaatgtatgacgagctatgtacttactattgggctgaaggattagctcccttcgcagaagagcgtccttggccacccattcgaagcgatcatcgccgctgcagctcgtggtatcgtaaacattgttcagccggcaggcggtgtctatttggtacttgaacggcaccttcaggcagagcgattcgataatatccgtggccagaaccaccttcaccgtctcatcgctggcattgaccaacgcctggaggtagtcattcctcatgttatcgtacagcaggaatatggagcactcctgcaggctgccagtgaggcagtggctcaggatcatgtagttcagcttgacaatgtggtagtaggtgggtaaaatgatgaggatgttgcctgaaaataggaaaaaggtagtagactttctctcattctttccacatggaggttaatgataaagagcagcctgtgagcgtttcgcttcaaatgggtttaatttattaaatctgatttacaaagttacctatacataaataaacgcggcgattccccattcgtataaactaggtttcaagacagacacacattactaaaatagatcgatattactaaatggcttgacatcttcgactaaaactaatataactattcaacagacataggcatgtatgtgttctttcgtgcagaggcggcgcgacttctggtcggtgatttgttcacgaggtgagaggatatactcgtagcagtatctgagtggactggagctggagctggagcagtgggctatgagcgcggcgtgctctccaagtccttgatctggcgcaggatctctgacttctttttcaccttgtccagctggtccttgtccagcttcttctgctcgccggcctggatcctgctctcgatctgttcgatttcccggattttcttgcgcagcttcttcaactgcttggcagggtccaccacctcctgggcggcgtccagtttcagggtgtcctccagtgtcttggatatcgagttgatgtcccggctgccagagggctgctgttgctgctgctgctgctgctgactgactttgggtggcggacacgtgctgggcggcataaccaggacgccgggcgccggcgcctttggctgcctgccggattccttctcctgcttcttggccctggtgcgctcctgcttctcgcgctccttcttggactcggcggccagcaggggacacatgccaggcggcactccggcctggcgctgcgccacgaactgcttgcccttgctctcgtagagtggcacctcctcctgcggcacgtagccgtccttgacgcgccgcgccttgcgccaggtgccatccggccgcttggtggccggaatgaacttgccctcgctgctctgtaggtacgtgctcatcttgctgcttctataaaaaacaatgcccactcgccaggcgatacttatcgatagctttgctattgcgggtggaaccttttgcgcggcgagatcgaattttcatgcgattaatcgcgcacgagcttgcagaatcattcactctcagccgttccaacgcgcacttttcaaatcgtattttgaataattgctaaccgcttcctttctcgcctatataacccttagtacccattcaaaccatttttgaccataactaatgactaataacttactaaatatgttctataagccatgaacacctggcaaacacctggcgaatactcacctggcgaatactccggtttggtgcgcagcagatacatgatgtcgataataagatcatagtcgacgaaatccggcttggcgctcttcaccacatagccgtgcagactgtagctgttcaggacatcgatgcactcgtggttgccgttcatggccgccagtgagatggcgttctgctggaacaggtccacaatgtagggatcagcgcccatgaagagcagcaggcgcagatgattggccttgttcagttcggaggcgaagtgcaccgccgttttgccggtcagcgagtggcggtagtttacgggagccaggtcgtagtttacggcgtacaggaagggacgtagggcggcgtccgtgcccaactctccgtaggcctgcaggcacttgtccatctgctcgttgcgcggattgttggcgcgaaaagcctccggaatctccttgtagatgtccggacccttgtggatgccggccagggcaatgcagctgtgcagctcgttcaagtaggagacacgtggtgcgacctccggctgcttaatcatattcagttgcaatccctcgccaaagaagtcggtgaacttcttggggtttcccatttgcgacagcagcaccaccctcaggttctgatggctacttagcgccatgcgtatctcgctcaacaggatgtcggtgtagggatcatgcaggtggacatcgttcaccaccaggtgactgatgttgcgaaactgctggctggtcagcgagcgcaaaaagtactgcgccgtcgagtaaataataaaagtgctggagctaacggcgctgaagtacggcaactggatgcccaccgtctcgcccagctgctcgccgaagaagttggccgttcgctggctgttgtaggtggccagaatggcctgccgctcgatgcacataatcttgacgttggacttcttgttccggcaatcgtccagaatgaccaggggcaggaagacggacttgtcccagcaaagcgcagcgttatagacgatcacccgactggcgtacaatgactgcaagatctcgtcgctcagcgagtgacccagaaaagcagtcaggaaattcagctgcgcctccgtccagaagcgcaggttaggaggacgtatggcgggcagcggcagatgcagtgacggtaggtccgaggcattggccttcatggagacgaggtccgcgtaaagctccaaatcctccttgcccatcaaggacttcctgctcagcagcgtaaacatgttcagcgtagcgcccgaggacaaaaccagcgtcttgggctcctccaggtagtggcgacatgcctgcttgtacaccttcacgcagctattcccgttgacatggaccacctgcgatcgcagccccaaggagcgggcgttgttggcgaatgcttcgtgctcgctggtgcggaatgtgcacgggaactgctggcagcagcgccgtcccgccaagaagtagagcagctgttgcggaatgtacttgtcctggatgatgtggttcatttctgctagcttcaaacagattgacactaaattaagtgaagtgcgccgcaatgcgcgcggcaattgcaagttccgttattgccaccgtcgtgaaaatagaaaaatggcggaatggaacacagggctgtattttcgctggcgcaaagcttgctcattaagggtattccttgcatatactcaaacaaatgtgtagtggaaatttgtaaaaaaaaaagatccaggtgtcattacaaactgaattataaaacatactttgttattttcaaagaataagagataagtttccaagacgggagagtttcctttacaggaatatattaaaatattcaattcacaatcccatagattccattcaaatgaaatgattcactttgtactaatatgcttttgcattctttattttttgaaatgaatgtacatgttaaatgaattctcctctaaaatgaggctgcgccaaattcgtttagatatcttaaagaaaactttgttatattggaaattctccgcagatccagcattataagtgcacaatctttataactaaactttcttagcgtaagccaaaatatatttaataaacaacaaaatacaaatcaaattctacttaagtgatacaatgatacaatttttactgagctttggcgcagaatttattttgaagtgtgttttatcaattgtgttattagccatccagtgtcatcttgtttacaattatcaaaatatctattacatattaaatacaattcttaactggtttgtatgtggaatacatatatgtaaatttaagtaagctacagaggtgttggttaaccacattaaccacatcattgggtgacaggcaccgccttaaagaaagtttgacttctccgcggcgttttgagatccgctgctctggttcgaccaaccggtgttcccattctggaatagagtagaatagattctggctgggatccaggtttcttaggggatggtttcagttttgactctaacctgtggctcc

SEQ ID NO: 21824 - DNA, 2178 bp, DROSOPHILA
atgaaccacatcatccaggacaagtacattccgcaacagctgctctacttcttggcgggacggcgctgctgccagcagttcccgtgcacattccgcaccagcgagcacgaagcattcgccaacaacgcccgctccttggggctgcgatcgcaggtggtccatgtcaacgggaatagctgcgtgaaggtgtacaagcaggcatgtcgccactacctggaggagcccaagacgctggttttgtcctcgggcgctacgctgaacatgtttacgctgctgagcaggaagtccttgatgggcaaggaggatttggagctttacgcggacctcgtctccatgaaggccaatgcctcggacctaccgtcactgcatctgccgctgcccgccatacgtcctcctaacctgcgcttctggacggaggcgcagctgaatttcctgactgcttttctgggtcactcgctgagcgacgagatcttgcagtcattgtacgccagtcgggtgatcgtctataacgctgcgctttgctgggacaagtccgtcttcctgcccctggtcattctggacgattgccggaacaagaagtccaacgtcaagattatgtgcatcgagcggcaggccattctggccacctacaacagccagcgaacggccaacttcttcggcgagcagctgggcgagacggtgggcatccagttgccgtacttcagcgccgttagctccagcacttttattatttactcgacggcgcagtactttttgcgctcgctgaccagccagcagtttcgcaacatcagtcacctggtggtgaacgatgtccacctgcatgatccctacaccgacatcctgttgagcgagatacgcatggcgctaagtagccatcagaacctgagggtggtgctgctgtcgcaaatgggaaaccccaagaagttcaccgacttctttggcgagggattgcaactgaatatgattaagcagccggaggtcgcaccacgtgtctcctacttgaacgagctgcacagctgcattgccctggccggcatccacaagggtccggacatctacaaggagattccggaggcttttcgcgccaacaatccgcgcaacgagcagatggacaagtgcctgcaggcctacggagagttgggcacggacgccgccctacgtcccttcctgtacgccgtaaactacgacctggctcccgtaaactaccgccactcgctgaccggcaaaacggcggtgcacttcgcctccgaactgaacaaggccaatcatctgcgcctgctgctcttcatgggcgctgatccctacattgtggacctgttccagcagaacgccatctcactggcggccatgaacggcaaccacgagtgcatcgatgtcctgaacagctacagtctgcacggctatgtggtgaagagcgccaagccggatttcgtcgactatgatcttattatcgacatcatgtatctgctgcgcaccaaaccggagtattcgccagcaaagctatcgataagtatcgcctggcgagtgggcattgttttttatagaagcagcaagatgagcacgtacctacagagcagcgagggcaagttcattccggccaccaagcggccggatggcacctggcgcaaggcgcggcgcgtcaaggacggctacgtgccgcaggaggaggtgccactctacgagagcaagggcaagcagttcgtggcgcagcgccaggccggagtgccgcctggcatgtgtcccctgctggccgccgagtccaagaaggagcgcgagaagcaggagcgcaccagggccaagaagcaggagaaggaatccggcaggcagccaaaggcgccggcgcccggcgtcctggttatgccgcccagcacgtgtccgccacccaaagtcagtcagcagcagcagcagcagcaacagcagccctctggcagccgggacatcaactcgatatccaagacactggaggacaccctgaaactggacgccgcccaggaggtggtggaccctgccaagcagttgaagaagctgcgcaagaaaatccgggaaatcgaacagatcgagagcaggatccaggccggcgagcagaagaagctggacaaggaccagctggacaaggtgaaaaagaagtcagagatcctgcgccagatcaaggacttggagagcacgccgcgctcatag

SEQ ID NO: 21825 - protein, 725 aa, DROSOPHILA
MNHIIQDKYIPQQLLYFLAGRRCCQQFPCTFRTSEHEAFANNARSLGLRSQVVHVNGNSCVKVYKQACRHYLEEPKTLVLSSGATLNMFTLLSRKSLMGKEDLELYADLVSMKANASDLPSLHLPLPAIRPPNLRFWTEAQLNFLTAFLGHSLSDEILQSLYASRVIVYNAALCWDKSVFLPLVILDDCRNKKSNVKIMCIERQAILATYNSQRTANFFGEQLGETVGIQLPYFSAVSSSTFIIYSTAQYFLRSLTSQQFRNISHLVVNDVHLHDPYTDILLSEIRMALSSHQNLRVVLLSQMGNPKKFTDFFGEGLQLNMIKQPEVAPRVSYLNELHSCIALAGIHKGPDIYKEIPEAFRANNPRNEQMDKCLQAYGELGTDAALRPFLYAVNYDLAPVNYRHSLTGKTAVHFASELNKANHLRLLLFMGADPYIVDLFQQNAISLAAMNGNHECIDVLNSYSLHGYVVKSAKPDFVDYDLIIDIMYLLRTKPEYSPAKLSISIAWRVGIVFYRSSKMSTYLQSSEGKFIPATKRPDGTWRKARRVKDGYVPQEEVPLYESKGKQFVAQRQAGVPPGMCPLLAAESKKEREKQERTRAKKQEKESGRQPKAPAPGVLVMPPSTCPPPKVSQQQQQQQQQPSGSRDINSISKTLEDTLKLDAAQEVVDPAKQLKKLRKKIREIEQIESRIQAGEQKKLDKDQLDKVKKKSEILRQIKDLESTPRS

SEQ ID NO: 21826 - DNA, 4471 bp, DROSOPHILA
tacattggagcacacgctgtcaaccgacccgaccgcgaggtgaagctggacgacattggactgatccaccgcaaggtggacgacgagttccagcccttcatgatcggcttcttccgcggaccggagctgatcaaggcgacggcccacagcagccaccacaggagcaagcgaagcgccagccatccacgcaagcgcaagaagtcggtgtcgcccaacaacgtgccgctgctggaaccgatggagagcacgcgcagctgccagatgcagaccctgtacatagacttcaaggatctgggctggcatgactggatcatcgcaccagagggctatggcgccttctactgcagcggcgagtgcaatttcccgctcaatgcgcacatgaacgccacgaaccatgcgatcgtccagaccctggtccacctgctggagccgaagaaggtgcccaagccctgctgcgctccgaccaggctgggagcactacccgttctgtaccacctgaacgacgagaatgtgaacctgaaaaagtatagaaacatgattgtgaaatcctgcgggtgccattgaattcaatttaccacttaggctaagcactatagcactatatatataaagcatttctgtgtagatgtccatctctgtactaatctcgaatatttttatacaaaaatatacagcgctgtacctaactgaagttcgtctcttgaggagtttcatttgtggctagtattaaaagatacttcttctttattgtctcacatctactcatgattgggatgcacaaatttcaaatatttcaaaacaacgatgatagacgcaatgtggtactaaaagtacgtattttgattctggttagctctcatttaaaattaacagtcatttcacagcaataaaaggcacaatcaagtcctatttggacttcggcacgcttctttggatcattcttaattattttaggactcaattagtagggaagcaggcaatatgcgcgaggaagcgggctttatcgcttgtgaatccagtggtggcggaaggcaaacaattccataatcaagttgccgacacgcttgtcaattagcgccgacatcaggcggccatcaaacaccggtgtctgcacattcaacgacacacacgcatctctgaaaggagagcacattagactggagtattctccgcaacttggattgcacttacaagatttcaaacaccggaatgttgtttcggaagtattcctgcaacataaatacaccattgacgaatttggctcgactaatgctgagcatcatatcgggatcctttctatacaggatcacaaagatgtgccggttgggcgtgtcgatgggtctgacaaacttgccgaggacactttcaataaaggctggcgtgttcctgctgtggaactcctcgcagtcgccgcctgcgtagagcacgaagaactgcctctcgatgaagtgcgaattgaaatggtgtggtttcgacagcatgttctcctccacttcccgggcccaactgaagtgggcgttaacggacaggaggtacaaggatggcagctggggcgtcggtagaaaggttatgggcggaggcttgaagaagcccacgaatccatcctcactctcgaagatcttcgatagcgtatcagtcagcacggtgtattgggaaactggctcgcagtctcggcgccacatgtccagctcgctgcagtgcttcagcaagtcgtggtacattttaaagaagtaataccgcgtgcgcatcaccatctccgccgtagccttggacataaccatccagatccattcgtctataaagacgttcacgttgcgatcggtcaaactcatttcactgtcgcagatcggggagaggcgaatccgtggatgtcctaattaatacaaaatgaatgataaccagaatgatataacatgaaattcattcgagcttacccgagaacatggcaacagccagaggaacgaccagggtggcgtaaacaatgtggctcttctgcctgttgcacacaatccacggtgtgcggaagctctgtgccgaaatattcagtggctccaagaaatcgcggagcacggtgttcggatgcatggaaacgttcccggagaaggccgactttagcgaactctttctagtgtccacggcatagatgttgggatacattccgcccgtgagggccgccttaaccatgtgccaattgcaggacatctggttgagattgttcatcgacagcttacctcggctgtgaatcaaattggctgcccgcaaggagctcacgatctcggaacgaatggaggtgagttgctccatcaggccattcagcatgaattcatactcatccttaaggtatagcggcggcgtcctgttgtgcattcggttttgccactccttgtacaagcgcacgaagatgaagtgatcggaaaactgattgtcggacaggtaggtccgctctttcttgatgctgttctggatgtagatggtgaacctgtcccacaagttgtcgatgtcctcggtaaacggaatgcccaacgggtccgccgtcgacagagagctgacaatcgtgagtattggatccaggcagcgcagcaggatgccgaagatcagcatgcggccgagttgacaggagaccgggatgtccatcaggcggcagcccagccaggtcacatcctcggcgtcatcgagcacatctattttcttgaggaactgcacggcatggtgcacgttgatcagcggtggcggtgagatggtaatacccagatattcgcttataatcgtattgggtgagagtagtttcaccgccaggcagatcttgtccagttgcatagtctgcaggcttggctgactggtctcgcttagctcctcgtaggcctccttgcttatcagacggaagcattgtacatccccttctacggaaaacgcagtgcatcagttagtgttaacaatgtatgacgagctatgtacttactattgggctgaaggattagctcccttcgcagaagagcgtccttggccacccattcgaagcgatcatcgccgctgcagctcgtggtatcgtaaacattgttcagccggcaggcggtgtctatttggtacttgaacggcaccttcaggcagagcgattcgataatatccgtggccagaaccaccttcaccgtctcatcgctggcattgaccaacgcctggaggtagtcattcctcatgttatcgtacagcaggaatatggagcactcctgcaggctgccagtgaggcagtggctcaggatcatgtagttcagcttgacaatgtggtagtaggtgggtaaaatgatgaggatgttgcctgaaaataggaaaaaggtagtagactttctctcattctttccacatggaggttaatgataaagagcagcctgtgagcgtttcgcttcaaatgggtttaatttattaaatctgatttacaaagttacctatacataaataaacgcggcgattccccattcgtataaactaggtttcaagacagacacacattactaaaatagatcgatattactaaatggcttgacatcttcgactaaaactaatataactattcaacagacataggcatgtatgtgttctttcgtgcagaggcggcgcgacttctggtcggtgatttgttcacgaggtgagaggatatactcgtagcagtatctgagtggactggagctggagctggagcagtgggctatgagcgcggcgtgctctccaagtccttgatctggcgcaggatctctgacttctttttcaccttgtccagctggtccttgtccagcttcttctgctcgccggcctggatcctgctctcgatctgttcgatttcccggattttcttgcgcagcttcttcaactgcttggcagggtccaccacctcctgggcggcgtccagtttcagggtgtcctccagtgtcttggatatcgagttgatgtcccggctgccagagggctgctgttgctgctgctgctgctgctgactgactttgggtggcggacacgtgctgggcggcataaccaggacgccgggcgccggcgcctttggctgcctgccggattccttctcctgcttcttggccctggtgcgctcctgcttctcgcgctccttcttggactcggcggccagcaggggacacatgccaggcggcactccggcctggcgctgcgccacgaactgcttgcccttgctctcgtagagtggcacctcctcctgcggcacgtagccgtccttgacgcgccgcgccttgcgccaggtgccatccggccgcttggtggccggaatgaacttgccctcgctgctctgtaggtacgtgctcatcttgctgcttctataaaaaacaatgcccactcgccaggcgatacttatcgatagctttgctattgcgggtggaaccttttgcgcggcgagatcgaattttcatgcgattaatcgcgcacgagcttgcagaatcattcactctcagcc

SEQ ID NO: 21827 - DNA, 2169 bp, DROSOPHILA
atggggaatcgccgcgtttatttatgtataggcaacatcctcatcattttacccacctactaccacattgtcaagctgaactacatgatcctgagccactgcctcactggcagcctgcaggagtgctccatattcctgctgtacgataacatgaggaatgactacctccaggcgttggtcaatgccagcgatgagacggtgaaggtggttctggccacggatattatcgaatcgctctgcctgaaggtgccgttcaagtaccaaatagacaccgcctgccggctgaacaatgtttacgataccacgagctgcagcggcgatgatcgcttcgaatgggtggccaaggacgctcttctgcgaagggagctaatccttcagcccaataaaggggatgtacaatgcttccgtctgataagcaaggaggcctacgaggagctaagcgagaccagtcagccaagcctgcagactatgcaactggacaagatctgcctggcggtgaaactactctcacccaatacgattataagcgaatatctgggtattaccatctcaccgccaccgctgatcaacgtgcaccatgccgtgcagttcctcaagaaaatagatgtgctcgatgacgccgaggatgtgacctggctgggctgccgcctgatggacatcccggtctcctgtcaactcggccgcatgctgatcttcggcatcctgctgcgctgcctggatccaatactcacgattgtcagctctctgtcgacggcggacccgttgggcattccgtttaccgaggacatcgacaacttgtgggacaggttcaccatctacatccagaacagcatcaagaaagagcggacctacctgtccgacaatcagttttccgatcacttcatcttcgtgcgcttgtacaaggagtggcaaaaccgaatgcacaacaggacgccgccgctataccttaaggatgagtatgaattcatgctgaatggcctgatggagcaactcacctccattcgttccgagatcgtgagctccttgcgggcagccaatttgattcacagccgaggtaagctgtcgatgaacaatctcaaccagatgtcctgcaattggcacatggttaaggcggccctcacgggcggaatgtatcccaacatctatgccgtggacactagaaagagttcgctaaagtcggccttctccgggaacgtttccatgcatccgaacaccgtgctccgcgatttcttggagccactgaatatttcggcacagagcttccgcacaccgtggattgtgtgcaacaggcagaagagccacattgtttacgccaccctggtcgttcctctggctgttgccatgttctcgggacatccacggattcgcctctccccgatctgcgacagtgaaatgagtttgaccgatcgcaacgtgaacgtctttatagacgaatggatctggatggttatgtccaaggctacggcggagatggtgatgcgcacgcggtattacttctttaaaatgtaccacgacttgctgaagcactgcagcgagctggacatgtggcgccgagactgcgagccagtttcccaatacaccgtgctgactgatacgctatcgaagatcttcgagagtgaggatggattcgtgggcttcttcaagcctccgcccataacctttctaccgacgccccagctgccatccttgtacctcctgtccgttaacgcccacttcagttgggcccgggaagtggaggagaacatgctgtcgaaaccacaccatttcaattcgcacttcatcgagaggcagttcttcgtgctctacgcaggcggcgactgcgaggagttccacagcaggaacacgccagcctttattgaaagtgtcctcggcaagtttgtcagacccatcgacacgcccaaccggcacatctttgtgatcctgtatagaaaggatcccgatatgatgctcagcattagtcgagccaaattcgtcaatggtgtatttatgttgcaggaatacttccgaaacaacattccggtgtttgaaatcttagatgcgtgtgtgtcgttgaatgtgcagacaccggtgtttgatggccgcctgatgtcggcgctaattgacaagcgtgtcggcaacttgattatggaattgtttgccttccgccaccactggattcacaagcgataa

SEQ ID NO: 21828 - protein, 722 aa, DROSOPHILA
MGNRRVYLCIGNILIILPTYYHIVKLNYMILSHCLTGSLQECSIFLLYDNMRNDYLQALVNASDETVKVVLATDIIESLCLKVPFKYQIDTACRLNNVYDTTSCSGDDRFEWVAKDALLRRELILQPNKGDVQCFRLISKEAYEELSETSQPSLQTMQLDKICLAVKLLSPNTIISEYLGITISPPPLINVHHAVQFLKKIDVLDDAEDVTWLGCRLMDIPVSCQLGRMLIFGILLRCLDPILTIVSSLSTADPLGIPFTEDIDNLWDRFTIYIQNSIKKERTYLSDNQFSDHFIFVRLYKEWQNRMHNRTPPLYLKDEYEFMLNGLMEQLTSIRSEIVSSLRAANLIHSRGKLSMNNLNQMSCNWHMVKAALTGGMYPNIYAVDTRKSSLKSAFSGNVSMHPNTVLRDFLEPLNISAQSFRTPWIVCNRQKSHIVYATLVVPLAVAMFSGHPRIRLSPICDSEMSLTDRNVNVFIDEWIWMVMSKATAEMVMRTRYYFFKMYHDLLKHCSELDMWRRDCEPVSQYTVLTDTLSKIFESEDGFVGFFKPPPITFLPTPQLPSLYLLSVNAHFSWAREVEENMLSKPHHFNSHFIERQFFVLYAGGDCEEFHSRNTPAFIESVLGKFVRPIDTPNRHIFVILYRKDPDMMLSISRAKFVNGVFMLQEYFRNNIPVFEILDACVSLNVQTPVFDGRLMSALIDKRVGNLIMELFAFRHHWIHKR

SEQ ID NO: 21829 - DNA, 2779 bp, DROSOPHILA
atccttacggaggaagataatttggaatttactatagtaactgatgaggtatttcaaggtggaatattgacaaacttaaaagtgatagcctaccgtttgataggtcatttttcgagactctttttgaattgctccaacaaatccttcagagctttcaattcctttagcagattctccttgtgtttccttgatttgtggctagttttggattccaaaatcttgatctcctctttcaatttgacgatatcattggcgatttctttaaccctgttcttttttatcttcataaattgctctgaggcctatggaatacccaattctacaaggttattcacaacattaaatagtttcgatacatacaagtttgagaacatagttaagttcctcgcctctgcccttctcggaaaatttgtcagtgaattgacgtctatcatatgtaaaaaaaaaattatttttacgggtcatttgaataataaaatacttacttagcaggaaattcgtttaaattattattcgaccttgggtggaaaatgtttctaccgtggtaaaagtttctatgccttggtaaatttctgtgcaactcattggaaggccaactaatatttagaagatttacaaataaagtttggataaatttccagtactacataccaaactctttcttgacatagcacctgaggttgaaatagcctgttgcacgatgccgagcctaagattcgtgcaacaggaaacatggcttcttaagtttaggatagaacgaaatcagtgtggcagaaatacattttacaagtctgaaagtacaatgtggatatttgacgtacggtcaaaagcaactacttcgatatgaaatttagaatttgcaataaatttagaaataattattacgcattttataaatagtaagcagatgtgtatcaaggccatttcataagtaagataaggaaactgggcgattaatttagtttaggcgtttcaaatctttattgtttcattctttacgtcaggcgtacatagtcttcgatggtttcccaatcggagcgtcgtagtacagtggtcgttgctgtgagcttggagacctgaacggatttccggacccagctccagatcccgatccgtttcctggtccagtgtggcgagatggcgaggcgacgccgggagcagctaggaagcccaggaggcccaaaaggagcaggcagcacaatgcgatcagcttcatggttggcaatctcaagtgaatctgaatgccgacctccggcaatagcttgtttttatacgctgcactcgtatgcccttgggattgggaagcacccggggggattttgctattcgctgaaatcaccgactttgggtgatttcttatcagctggggggcgtcgatcagattttctctccttcctctcgcgattggaattcaccttcacatcgaactccatgccacggatgcagcgggtcaggtcggttagattggcctcgacgcgcttttgcttgagtgccagctcatgggattgcagatccaagattccgcgttcctgacgatgggatttgattagatggcgctcgatttttgtatcatctatcttgaaaggtaacaacttactgtttgcagatcctccagttttagttgattttctatgcgactctgatcgggcaggacaaccagataacttctatatatcaaaatgttatgattgaatatgtataatcacagaatgcaacctacctgatggtgcagcctctgaagcggctgagaatagatctgattattgggttaatgtccatgcttacgaaaatgaaaacagctaattttgattatctctaaaagtttgaaagtaattgcaaagtgttgaagatacttcaaactggcaaactgctgatatggagctgaaattctgcatataaccacattttatagttatctcattcttcgctatgccaaaaactatgctacgcattcttgctgtcccataggtggcgcgttggttacgcatgtcaaatgtaaaattaccatcgcccttgccagtacaaacaagttgttgcaatcatttagttttatgtttatttattcattcttatgtttcggagggcttgtttcaactctttgagcactaatataagtttacccctcgcagtcttcgcctcggacgacttacttttctcaagggctttgatttgcatttcaagtgactcgatttgtgcggtcagttccatgatccttgcctcttttcccttgttcccctgcaaatgtttcttggaggtaaacgttctttatgagtcattgaaatgtttagttaggagatactcacaacatgatacgtgtcgataccgccactgcctcctttgtcaaaaagatcgctaaacggtcgtctcttgctgcatggaaattgtggatttaagggaactcacattgcggacgtacttaccatagaaacatggtatctcttgtctttaaaaaagtaagaatcttataagccccccgaaacatactttaagctctgcgtcaaatttgtgtacttatgcttttttcgttaataagtttctccacgccaactaggtgaggcaaaaacacattcaaaaatggctaacaaatgatccaagtaaacctaacccctcttgctttgcgaatatatttgttaaacatttccaatatacgaattcggtaggagaatcaatactcagacatacatagttagtcagtgatcatttagttagttagttttttccttaaattgtctgtgatacattacatattacggataattcacgatgatctgggacttct

SEQ ID NO: 21830 - DNA, 609 bp, DROSOPHILA
atggacattaacccaataatcagatctattctcagccgcttcagaggctgcaccatcagaagttatctggttgtcctgcccgatcagagtcgcatagaaaatcaactaaaactggaggatctgcaaacagaacgcggaatcttggatctgcaatcccatgagctggcactcaagcaaaagcgcgtcgaggccaatctaaccgacctgacccgctgcatccgtggcatggagttcgatgtgaaggtgaattccaatcgcgagaggaaggagagaaaatctgatcgacgccccccagctgataagaaatcacccaaagtcgggcatacgagtgcagcgtataaaaacaagctattgccggaggtcggcattcagattcacttgagattgccaaccatgaagctgatcgcattgtgctgcctgctccttttgggcctcctgggcttcctagctgctcccggcgtcgcctcgccatctcgccacactggaccaggaaacggatcgggatctggagctgggtccggaaatccgttcaggtctccaagctcacagcaacgaccactgtactacgacgctccgattgggaaaccatcgaagactatgtacgcctga

SEQ ID NO: 21831 - protein, 202 aa, DROSOPHILA
MDINPIIRSILSRFRGCTIRSYLVVLPDQSRIENQLKLEDLQTERGILDLQSHELALKQKRVEANLTDLTRCIRGMEFDVKVNSNRERKERKSDRRPPADKKSPKVGHTSAAYKNKLLPEVGIQIHLRLPTMKLIALCCLLLLGLLGFLAAPGVASPSRHTGPGNGSGSGAGSGNPFRSPSSQQRPLYYDAPIGKPSKTMYA

SEQ ID NO: 21832 - DNA, 4143 bp, DROSOPHILA
cacgcccaccctggtgtccaccaactacgagtacacgcccagctggtaagtccgttgtccagttcaaagagagttcgtctggatccaaggatctcttcttccagctggggaaccatcgatcgcaacggacaaaagtcggagaacgggtgtccgcgatgcggattcatggtcttcgccgcggaacaggtgaagagcgcgaagaacgtgtggcacaagctctgtttctactgcatggagtgccggaaatacctggactcgaccaatctgaacgacggacccgatggcggcatctattgccgatcgtgctacgccaagttctatgggccaaagggtgtgggctacggaatcggagctggcacactgacaatggcttaacaactcgaccaaaaaagcgcgttcaagaactaatcccaccagcatggaataagctccaagattcgtgctggggatttcagtccttgagcgcccacatttttgaggatgacgaataggtgtagtattgcaattccacaagagtgtacttttagctccaagacaacgacatttagttatgaaagtatagaaggcgaatgagttggcggtggttagtatagaaattgtataagtctcgaacataagtaccgaaaaatgcattctaaccttcgacttgaacttcatcgtaaaacctgcgaaaacgaatttccaaaccttgtttatcgaggatgcccaagaatccaaaggattggtgtgcaaatgcaaatgcacaccattttcaatcgataccgccattcgaaatcctttgaacttctgagttactccctatgatatgatatacatatatggcagtcgtagcaacaaatcaatatcctataagtttcgaacgactaataaacgacaagtggtaactttgtacatgtggttctgttgttttcaaatatttattatataataagtaataagtaacggtaggacagattacttggagagggtcaaagcgtcatctattgcaggagctctttattcaaaatatattaacgataatgctaagggtacatagtatgggaacggaagtggcgatcaccaggccgctgcccgagaacgtggagttgcagcagtcggcggagaagacaaggatcttggggtacagcgatctccagaagttgatccgctggttgttcagcaggttgtccgtgttgaagctctcgtcgatcagaagcactgaatcgttattgggggtcatggcgttccacttcacgtacacgttcgacttcgtggggttcgaggtcttggcgaagttcgcccacagggtcatgatgatgtcggcgatcttcttgtcggtcgacttccagtcaacggagttggtcatgtagggattgccccacacgaagatctggtcgaagtacttgggcacacttatccagctgggcagatcctggagcaccgatctcggccgcatcctaaacaggtagctgtacacctggctatcgttactgatcagatcggcgaacgtctgcatgggtgtgatgtagaacttttcggtgtgggcactaattatgtgcttgttcgccttcttggcgtccgtatccgagtcatttgcgtacataaagttgatggcatccgatatcaattcgtagttggagcaccactcgtagttgcgcaccagcttgtgcatgtcggtcacggcgatgtcggtgtagaagccctccagatcggaggggctgatgtccgtgtcgaggttgtccttgaacaaggtcagcacctcctccatgtcggtcactccaataatgacgggcaccctgtggtagctgcccttcttgaaaaggatctccggctggttctcgatgaacggataggaagtgttgctcaggccaaagtccaccacgggtccccagctcacctggggcaggttctccgagagccgcttggcatcgatcctcttcaggcactggataaacatcgaggttggccttcgcggacaggcgaaggtgctggacacctggtccagcgatccctcgtactcgtacggcattttgacggtactcagcggattgcccgacattatgatggccttgtggaacccacccttcgaccactcacccgacgtcatgtgcagcgccacactcacggcccccgcatcgtggcccatcagggtaatccgattcgagtctccgccaaagaaattaatgttcttcttgacccagtagagcgcggctgactggtccatcaggccatagtttccctgggcctcgccgtcgtcggtggtgaagaacccgaagatgttcagccgatacgagaaggtcaccacaatcaccttctgcttgaagaccaactggaatggctccacatccgccggactgccagtggagaagtcgccggaatggatccacacaacaactgcgtatccattgatttcgggcagtcctatcataaaaatgatataaaagtataacataaatgttttatagttatttaaggtgcaagagaaggtcgttttgcgggggtgacccagaaatatcgacgcttgatattcgatatgaatgcatttacatacaaatttcaacctaaatccagcctaagagatttctatgccaaccccattgtgttcggataaaccatgataaccaaactctaaatgcgaaaccaaattaaaaataagtatttgcataaacatttgaagaggccacaaaagttaacaagcggaatcctagttggattgatccaaatctcaatgcttatagggaattgtgcttaccatcaggtacaaagacgttcagatacaagcagttctcctcgtacttcctctccgcatcctgggcactcgagtcggactgtatgattttcaggatctgctcggtttctttgcccacggaaggcatggcgttctgccagcagtccggttggaagacggtcgcattgaaaatgcccttccagggtgttagttcgatatccggcggctggaatctcctggcatgtgcatagcgaatgcccaggtaggccttgatgttctgcgtccggaacatcttcagataggttccggaaatgactccgttgcccggaatgtggatgaagggtgcgtccacgcattgcacaggtacgaaacagtaatcgctgactagatgaagaaacacggccaagtaggccaggaagttcgctctgcagtccatggctcgtccggttccttcacatctttccctgttttgaactcaggcgacactgttcgcaatctttcgcaggcacgcgagcactccgttgccatggcgaaaatacacaaaaatattgttgcctaggattttgtaactatggcactcatccatctccttgcgccgaggttgtttttatttatttagcctacgtcaccatcggaatgctgttaaccccagatggcccccatttgcaaaaagtgcaaaatataataactgatatatattttaaattatattttattttaacatatacagattcattgttagattgcaagaaatcggatttcttgatgacaaaatctaatctagatctttttatcagctttaaaaataataatactaatcggaggttaaaagttctaaacgaattttactgataccctacttctaagcaacatacatattgttcgtaaattctaaatgtcatgtgtttagcatgaacgtcaatttcccacacaacttaacttatactcctcgaaattttggaaattgctctgaagatcgaaaatgtcccatgaaccgcagaagcccgccaagtcagcagtgaaggagcctccggttgtgagcgaggagaccagaaccacggacaagtgcctggcggacttttgcttgaagggtggaagtggcctgatcatcggcagcgcggtcaccttgttcttcacgcgcccacaaacctatcccatttggctgggactgggcgtcggtatgggcgtggcctacgactgctgccaggcccgctggaatcaacagtagtgttcgaaagatctctgagcttcgattaaatgtgggcttcctctcgataaacgttctagatacaacagggcttccgcttttgtaatcattttaaatattctcggaaattccccccctcctaattgcttgtattgtattaaagtgcagaaaaaacccaaactacacactttgcaaagcctgttcgaaagcgatttgaaaaatatggttt

SEQ ID NO: 21833 - DNA, 1812 bp, DROSOPHILA
atggactgcagagcgaacttcctggcctacttggccgtgtttcttcatctagtcagcgattactgtttcgtacctgtgcaatgcgtggacgcacccttcatccacattccgggcaacggagtcatttccggaacctatctgaagatgttccggacgcagaacatcaaggcctacctgggcattcgctatgcacatgccaggagattccagccgccggatatcgaactaacaccctggaagggcattttcaatgcgaccgtcttccaaccggactgctggcagaacgccatgccttccgtgggcaaagaaaccgagcagatcctgaaaatcatacagtccgactcgagtgcccaggatgcggagaggaagtacgaggagaactgcttgtatctgaacgtctttgtacctgatggactgcccgaaatcaatggatacgcagttgttgtgtggatccattccggcgacttctccactggcagtccggcggatgtggagccattccagttggtcttcaagcagaaggtgattgtggtgaccttctcgtatcggctgaacatcttcgggttcttcaccaccgacgacggcgaggcccagggaaactatggcctgatggaccagtcagccgcgctctactgggtcaagaagaacattaatttctttggcggagactcgaatcggattaccctgatgggccacgatgcgggggccgtgagtgtggcgctgcacatgacgtcgggtgagtggtcgaagggtgggttccacaaggccatcataatgtcgggcaatccgctgagtaccgtcaaaatgccgtacgagtacgagggatcgctggaccaggtgtccagcaccttcgcctgtccgcgaaggccaacctcgatgtttatccagtgcctgaagaggatcgatgccaagcggctctcggagaacctgccccaggtgagctggggacccgtggtggactttggcctgagcaacacttcctatccgttcatcgagaaccagccggagatccttttcaagaagggcagctaccacagggtgcccgtcattattggagtgaccgacatggaggaggtgctgaccttgttcaaggacaacctcgacacggacatcagcccctccgatctggagggcttctacaccgacatcgccgtgaccgacatgcacaagctggtgcgcaactacgagtggtgctccaactacgaattgatatcggatgccatcaactttatgtacgcaaatgactcggatacggacgccaagaaggcgaacaagcacataattagtgcccacaccgaaaagttctacatcacacccatgcagacgttcgccgatctgatcagtaacgatagccaggtgtacagctacctgtttaggatgcggccgagatcggtgctccaggatctgcccagctggataagtgtgcccaagtacttcgaccagatcttcgtgtggggcaatccctacatgaccaactccgttgactggaagtcgaccgacaagaagatcgccgacatcatcatgaccctgtgggcgaacttcgccaagacctcgaaccccacgaagtcgaacgtgtacgtgaagtggaacgccatgacccccaataacgattcagtgcttctgatcgacgagagcttcaacacggacaacctgctgaacaaccagcggatcaacttctggagatcgctgtaccccaagatccttgtcttctccgccgactgctgcaactccacgttctcgggcagcggcctggtgatcgccacttccgttcccatactatgtacccttagcattatcgttaatatattttga

SEQ ID NO: 21834 - protein, 603 aa, DROSOPHILA
MDCRANFLAYLAVFLHLVSDYCFVPVQCVDAPFIHIPGNGVISGTYLKMFRTQNIKAYLGIRYAHARRFQPPDIELTPWKGIFNATVFQPDCWQNAMPSVGKETEQILKIIQSDSSAQDAERKYEENCLYLNVFVPDGLPEINGYAVVVWIHSGDFSTGSPADVEPFQLVFKQKVIVVTFSYRLNIFGFFTTDDGEAQGNYGLMDQSAALYWVKKNINFFGGDSNRITLMGHDAGAVSVALHMTSGEWSKGGFHKAIIMSGNPLSTVKMPYEYEGSLDQVSSTFACPRRPTSMFIQCLKRIDAKRLSENLPQVSWGPVVDFGLSNTSYPFIENQPEILFKKGSYHRVPVIIGVTDMEEVLTLFKDNLDTDISPSDLEGFYTDIAVTDMHKLVRNYEWCSNYELISDAINFMYANDSDTDAKKANKHIISAHTEKFYITPMQTFADLISNDSQVYSYLFRMRPRSVLQDLPSWISVPKYFDQIFVWGNPYMTNSVDWKSTDKKIADIIMTLWANFAKTSNPTKSNVYVKWNAMTPNNDSVLLIDESFNTDNLLNNQRINFWRSLYPKILVFSADCCNSTFSGSGLVIATSVPILCTLSIIVNIF

SEQ ID NO: 21835 - DNA, 3208 bp, DROSOPHILA
ggccagctgggcgagattcacagccaggtgaacaagttgcagcgtgaaatcgacgagcccagatttaaggagtctttgaaaaacttccggaaggccaattacgagatagaggtgacacgcctctgcattgaggacttgggccaatatcgtttagcgttggagtgggcccttatccagtttcactctgaaaaaatggagatgattaaccgtctgatccgcgagtactggcgtaagatatatcgcggaaatgacattgactatattcaggtgaagactgatgaggtaagctcggatgcttcggcggatcggcgaaagacatacaactacagagtggtccagtcgaagaactactcagagatcgagatgcggggacgctgtagtgctggccagcgcgtccttgcctcccttattatccgcttggcactggccgagaccttcagcagtaattgtggtgtcctagctctggatgagcccaccacgaacttggatcgcgccaatataaactcgctatgtgaagccctgaattgcatcgtggaggagcgccaaagccagtccaactttatgctcatcatcatcactcacgacgagaatttcgtttcgtctctgggcaagataacctcctaccatcgggtcttccgcaacgaggagtgcaagtcggttatacggagagtggaggcgggtccatcaaagaaagctttgatagatcaataaaaaatattatttttgttatcaatctatgtttgcttgtctagtcatcaaatcagttatagacggggacaattggccgcgcaggtgtggtaacaaagaatgatgggtttagtttttagaaatggccaatacgtgtggtctgttgctgctggcaatacttgcttatgcagaagttgcatgccactccgtacaatttggcatgctgcactttctagctgttcccatatatgagactgaaatattcaccactgaatttgtggatttcgtagacgtgaagtacacacaaaaggtattttaaatatattactttaaataaagtggaagatctcttaggtatttttgtacagggtagcatgtgctttcatataaacatgatattggtcatcgatgaaagtgaaatggaatggaaaggccaggcgtccgttctgtccggcggtattggttacaacttcactatcttaagactaacatttaaccagccagaggttgccaaagtcacagtagtcatttacgggatccccaggtaggaactgcacagcagatatttatcctagatcctaatcagtcttagtcttgtttgttcgtagggacattccagtggtatccgtcttccggcagatcgctgcgaatcagtggggacagccacgctaaatgcatgcggtttccaaaaacgctccttagattttgatacactcctctgtcgtacttttctttgctctccttagtgcgatcggcggaaacaccgccccttaaaacaatgggcacatggtaggccaggaggaggactccataagccagagctaaaatatttaagctgtagaagaccaggtacatgttggtccaaaaactgcccgttaccaggtgtaacatggggcaggcgagttttaacaccgtcacccagttgctgtagatgtggccgtggatgacccacatgtatatggagttgtacaccagtgcgtaaactgatcccacgaagagatagaatataaagcccatgaagaagcgatggtttctgagtccaatgcagcagccggtgtagatacagtggtgatcccgcttcagaatgcacactttgcaggccttgcaatgccaagatctgggtggtgctagcttctggcactcgccgcactcacgccaattcaactgatccgatggtggttccacctttttcactggaaatgggatatgcattttatcggatttattataagacctgctgcgacttaccatttacacttgtgtcaatcatcatgcaggcaatcatgtttcccttgatgttaaacaccaggaacatggccataagaaaggtgaaggtgtggaagaagccacccggttcatggaaggcaggcagcaccaccacaatctcgaacataaacaccaccgggagaaagaccgcaatgatgaggaagcacaagatgtccaccatccggctgggcattgggttgctccggattctcatgatctgtgctactaaggtaaataaataggcaccgatctccgatatgtcagaaagagaactaacttgataaccggttgctgtaacatcacgtgcggttgagctttattttatcaagctttcgaggccaaagctaatgggtcgccggtaaaaagctcgctttctatgtttttgcggcgaaaagtttgcgttcagtatgattgaatgtgattcattgaacccgagttcaatataatttgataaactccaaagctaaccgaattaaagtttgatatcaagcgcggggtggtgtaaaactgcggccatgcacttatacatgttatcaagacgggccacacgtcgtatgcttgatggcgtgtgccatgaatacatacatatacatttaaacgccaacggcaagccagcattgagaatttaattaacttgaaaggattcactccttcgaatgccgccgtaatcggggtaaaaccttaattacatgcctctttaataagtgtgccgacacctgattgcttgcgatatcaagtatttatgcaggtgtcaagggtcattaagtaaacagttcgctatggaaccgtcgccgtcagccggaacggaaaggcagggatcctcgttatttctgctgaagagcttcgtcaggagtctgcggcagttcctcaaccagactagtctgcatggactcaagtttgtgggcgattccggcctgagtagctgggagaggtgggaaaggagcacatccaagtgcggattttgagctacatttgcaaaaccctttttagatcgtttttccttggctcctttgtcaccgccctcatcatcacggtgcacctcatatcgaacatctatgtgaagtgggatagcacgccggttataatcggcatcagcccacaggccacctccattttgaaggttccttttccggcaataaccatatgcaatatgaaccaggtgcagaggagtctggtagccaattacagagagtaagttcggttttcctctaaggcaatcgtccatccatcattttgaaattaaattatgttccag

SEQ ID NO: 21836 - DNA, 1153 bp, DROSOPHILA
cggagatcggtgcctatttatttaccttagtagcacagatcatgagaatccggagcaacccaatgcccagccggatggtggacatcttgtgcttcctcatcattgcggtctttctcccggtggtgtttatgttcgagattgtggtggtgctgcctgccttccatgaaccgggtggcttcttccacaccttcacctttcttatggccatgttcctggtgtttaacatcaagggaaacatgattgcctgcatgatgattgacacaagtgtaaatgtgaaaaaggtggaaccaccatcggatcagttgaattggcgtgagtgcggcgagtgccagaagctagcaccacccagatcttggcattgcaaggcctgcaaagtgtgcattctgaagcgggatcaccactgtatctacaccggctgctgcattggactcagaaaccatcgcttcttcatgggctttatattctatctcttcgtgggatcagtttacgcactggtgtacaactccatatacatgtgggtcatccacggccacatctacagcaactgggtgacggtgttaaaactcgcctgccccatgttacacctggtaacgggcagtttttggaccaacatgtacctggtcttctacagcttaaatattttagctctggcttatggagtcctcctcctggcctaccatgtgcccattgttttaaggggcggtgtttccgccgatcgcactaaggagagcaaagaaaagtacgacagaggagtgtatcaaaatctaaggagcgtttttggaaaccgcatgcatttagcgtggctgtccccactgattcgcagcgatctgccggaagacggataccactggaatgtccctacgaacaaacaagactaagactgattaggatctaggataaatatctgctgtgcagttcctacctggggatcccgtaaatgactactgtgactttggcaacctctggctggttaaatgttagtcttaagatagtgaagttgtaaccaataccgccggacagaacggacgcctggcctttccattccatttcactttcatcgatgaccaatatcatgtttatatgaaagcacatgctaccctgtacaaaaatacctaagagatcttccactttatttaaagtaatatatttaaaa

SEQ ID NO: 21837 - protein, 271 aa, DROSOPHILA
MPSRMVDILCFLIIAVFLPVVFMFEIVVVLPAFHEPGGFFHTFTFLMAMFLVFNIKGNMIACMMIDTSVNVKKVEPPSDQLNWRECGECQKLAPPRSWHCKACKVCILKRDHHCIYTGCCIGLRNHRFFMGFIFYLFVGSVYALVYNSIYMWVIHGHIYSNWVTVLKLACPMLHLVTGSFWTNMYLVFYSLNILALAYGVLLLAYHVPIVLRGGVSADRTKESKEKYDRGVYQNLRSVFGNRMHLAWLSPLIRSDLPEDGYHWNVPTNKQD

SEQ ID NO: 21838 - DNA, 4870 bp, DROSOPHILA
taaggccaaaatacatataaataaaaacgcatataagttctataaatataatgtcaacgtatcggggaaaccacggcatttggcatgcattccccacatcatgattactcatcgcttgctaaggttagccctttcatatcggccaatatatgtagtttaatgtatggaaatgacgcctagttgaggcaggcttaaccaaacgaccagtgaatgtaaggttttgcatatcattggcatgcaagctacgtagggaattttagctatagtttcagttgcataagattatctagcaattagcatagatgacttaaggcacgtagctccgcaaatgtgggtttacagccagtgcatattacgcacttggccacttttaatacaaggtaatagatcttcaaaaatagcttctttaataaaatatttaaaaaattgcataaagtgtaaactttggtttacgtagttgctgacatttggttttttaacagtattcattttttcaatatcggtggcttggataataaagaaaagaagaagtctttattgacttttaaagtaatcactacaaaacaaagtctgggtcttagtaatattatatacccataacgatgccataatttaatcttgagcttaaactaactaattagcattaaaatgataccagaactaaaagctatagttaagcacaagactagtagctcttagtggtgattccatcccctttttttttaaagtcaattaataattctcagctcgtgttcatagttctcgacaagccgttgcaaattgttttggactgatcagcgtgccgaacagacaaccaattgattgacaggccaaaaaaaatctaaaacgccggggggttttttcgcagacttctagacagatgtgcataaacaaagacgacccctcgaaaaacataaacttcgagcatctcacgaaagcttttatacgagaaaagcttctctccaaagagctgggtcttcaaaaacgctcagtttcttcgcaaacttcaaccggaacggacgtattgatctcggattttccttggatcttgcgtggaaccaaggataggtgtcagattctcgatttgtttgctttgagcgacgcgtaaacaaagtgacatgatgaggccccaattagcggccatagccactgtcatggtgctggctgcgatctgcggttttggcactggttccgtgctggaagtacccggagtcacccaggcaccaccactcccacctcgtaacctccgaaacaaccaaacgcggtcgcgcattcccaacaacttccgagtgcgttacagtgaaaatacagcacgcgatcgaaagaacaaaaacacaacttgcaaaattgtaattaaaaattaaactaaaattcataaatttttaacatcaaaaataacttaatggtacttaatacatataaaaaacgtcgcttaatagagttcagtatcacttagtgattcattggtaaatttgaaatgctgactaaaataaaaaacaaaacaaacgctataaatatcatatggtaaaatgacaaaatagcagaaaaagagaagagatgaatataaaatatttgactcaaaagctttgaagaagtgttttgaagtgacataagcaacctcaatttgtgacagaaataaatacaagaaaaataaaataaattatccctttgtttgaaatgcaaaaatccattttgcataatgtgtgtttgttctctcgatcgcccactgtaatgtgaattttaaacttgccgactggctgctgacttttggccagcaggtttcgttttggccagaacaagttcaatgcgctggcctcgtgtttgcttaatgtagcgtctcccttctttttatttgtactgccattctccagagcattgcgaccccaccaattgctcccagatgcgactacaaggagctgatgaccaatctgcacgatcgcgttggcatcttggtgaccttggacgaggaccagcgccaccggctggaagtcatcgataagaagtgagaactggtttgacatagacggatcatatgaaatatttttgtaaaaccggtagagcaaaaaccgcgcatcaatagctcttcggaaacttttttgtgacactgcgacttatttggcagaggaattaactctttaatgatgttcaattttttgccaatataattatatttatttgatcaagtatcgttgggtagcacctgctcttgctttttgggtcaaatttattgttatgggttcgcagaaatttgctgatgattttcacacgcagtttatagattggatctcatcgttttgcttgtttggataatatatttttttctttgttgcctttaatcggttatttcttacgatcgtttgaaaacggaaatctgcaagcggcaaactcaaactgattagcgagcgaaacaatacaaacagaaatatatcttagagctttatcatttactgaacccaaggaaaatcgtctaagtgggccatttcgaagtcaatgagggcttctttatcattttctatttattaactatttataaaacatattttagattggatcagctggtggaaagcagttcggcccgcatggaatcgatgaaggcccagcaattggacttcctgcacagactggacagttttgagcacatccagcggctttcgaggaacactctagatgagcttaaaggtgaaaccgatcaggttttcggaccccgaaatgttagggagctaaaacacaagctaagaaatcgcaaaaagatgaagggtaacatactagaaatgtcgatgttgtgctattgtattgtgtttgtctctctggttgcccagtccacattgaaaatcaaatttttataaagttatttctttatcggcagatatctcgcgcactgttcgtgacgtttcccaggaacagtatcccagctcgggaataggtacatttaatgaatccaacttgaatttatcaagtcgtctggatgccttggccacgcttttggcttctactgctctcagtgtcagatctgtgcaggttgaagtggccaatctttcacgggccattaggtaataatatttaagtaattcaaattgtaattgaactaaaaattatctatcttttaggcgccaaagccgtttgatccagggtaagggattgaggtcgacaccaggtcagcagccaatcttctacggtccaagtggattaaatggaccaacagctacacggcagttgcctagtagttgctcctattccttcctttctaaccacggaattctaaaagtacagctcacacccgaatcggaatccttctacgtatcctgcgatgaggattggactgttattttgagccgcacctccgatgatgtgaacttcgaacgcggctggctggattatcgcgatggctttggcaatttggctggggacttctttattggtctcaacaaactgcatgccctcacttcatcggccttgcacgaactgcggattgtgatggaggacttctcgggcaacgtggcgtatgcgggatattcgttgtttgccattggcagcgaaaaggaactatatccactcgtcttgctgggcaaattccaggataatttgactccttcagctggagattcattgtcctatcatgctggagctaagtttagcactgtggatcaggataatgacaactgcctggagtgcaattgcgccctgagacacaagggagctggatggtttaacaactgcgcaaagagcaacttattcggcgaatataccacccagaaccaacctggagaaactgggatctggtgggacaccttttcagggcagaattcgctgaaacgggttcgttggatgattcgtcccatttccgaaggaatagatgatgccaggcgataggatatctagaagaacatctacccatatccaactgccatctccgaaatcagggataacccacaatcgattgcttgcattttaaccctagctttagctttgaatctctctgtgcgtgtgtgtgtaatatttatggaaaattacttaatacctagataatacagtaaatttacgagtactcgcctgaaagtacgtcatctctgggagatttcctctaatcggtcgattagtggaacgcatgctatattttgggtataaatagatggggggtttcaatggaatttccagttattcgagtgtgtttactgtggattaccttagacatggccaagaccagcttatgtctggtaccaattctctgtcaatttctgggactacatgccgctttgctagactctttacttaatcagagtaccatatactaccttaaaccatcagcggatgtttccctggagaatgtggaacagttgtcgtctgtggaatctgttaagttgattgtccacggttacctgggatcttgcacccatggctctataatgcctctgagaaatggtgagaattcgcagagaaaaattctcataagcgatagatatctaacttcttttttataatgcaacaattccgaagcctatactgctcagggatatgagaatgttttggtggctgactggggtcctgtggccaatctagattatcccagttcgcgattggctgtgaagaacgtggcccagattctagccaaattattggaggaattcctacagcgccatgggatctccttagaaggagtccatgtcataggacacagcttgggagctcatatcgcaggacgaattggacgttatttcaacggatctttgggcagagttacgggtctggatccggctcttcccctattttcaagccgatcggatgatagcttgcactcgaatgccgctcaattcgtggatgtgattcacacggactatcccttgtttggcgacattcgacctcgaggaactgt

SEQ ID NO: 21839 - DNA, 1501 bp, DROSOPHILA
caaacttcaaccggaacggacgtattgatctcggattttccttggatcttgcgtggaaccaaggataggtgtcagattctcgatttgtttgctttgagcgacgcgtaaacaaagtgacatgatgaggccccaattagcggccatagccactgtcatggtgctggctgcgatctgcggttttggcactggttccgtgctggaagtacccggagtcacccaggcaccaccactcccacctcgtaacctccgaaacaaccaaacgcggtcgcgcattcccaacaacttccgaagcattgcgaccccaccaattgctcccagatgcgactacaaggagctgatgaccaatctgcacgatcgcgttggcatcttggtgaccttggacgaggaccagcgccaccggctggaagtcatcgataagaaattggatcagctggtggaaagcagttcggcccgcatggaatcgatgaaggcccagcaattggacttcctgcacagactggacagttttgagcacatccagcggctttcgaggaacactctagatgagcttaaagatatctcgcgcactgttcgtgacgtttcccaggaacagtatcccagctcgggaataggtacatttaatgaatccaacttgaatttatcaagtcgtctggatgccttggccacgcttttggcttctactgctctcagtgtcagatctgtgcaggttgaagtggccaatctttcacgggccattaggcgccaaagccgtttgatccagggtaagggattgaggtcgacaccaggtcagcagccaatcttctacggtccaagtggattaaatggaccaacagctacacggcagttgcctagtagttgctcctattccttcctttctaaccacggaattctaaaagtacagctcacacccgaatcggaatccttctacgtatcctgcgatgaggattggactgttattttgagccgcacctccgatgatgtgaacttcgaacgcggctggctggattatcgcgatggctttggcaatttggctggggacttctttattggtctcaacaaactgcatgccctcacttcatcggccttgcacgaactgcggattgtgatggaggacttctcgggcaacgtggcgtatgcgggatattcgttgtttgccattggcagcgaaaaggaactatatccactcgtcttgctgggcaaattccaggataatttgactccttcagctggagattcattgtcctatcatgctggagctaagtttagcactgtggatcaggataatgacaactgcctggagtgcaattgcgccctgagacacaagggagctggatggtttaacaactgcgcaaagagcaacttattcggcgaatataccacccagaaccaacctggagaaactgggatctggtgggacaccttttcagggcagaattcgctgaaacgggttcgttggatgattcgtcccatttccgaaggaatagatgatgccaggcgatag

SEQ ID NO: 21840 - protein, 459 aa, DROSOPHILA
MRPQLAAIATVMVLAAICGFGTGSVLEVPGVTQAPPLPPRNLRNNQTRSRIPNNFRSIATPPIAPRCDYKELMTNLHDRVGILVTLDEDQRHRLEVIDKKLDQLVESSSARMESMKAQQLDFLHRLDSFEHIQRLSRNTLDELKDISRTVRDVSQEQYPSSGIGTFNESNLNLSSRLDALATLLASTALSVRSVQVEVANLSRAIRRQSRLIQGKGLRSTPGQQPIFYGPSGLNGPTATRQLPSSCSYSFLSNHGILKVQLTPESESFYVSCDEDWTVILSRTSDDVNFERGWLDYRDGFGNLAGDFFIGLNKLHALTSSALHELRIVMEDFSGNVAYAGYSLFAIGSEKELYPLVLLGKFQDNLTPSAGDSLSYHAGAKFSTVDQDNDNCLECNCALRHKGAGWFNNCAKSNLFGEYTTQNQPGETGIWWDTFSGQNSLKRVRWMIRPISEGIDDARR

SEQ ID NO: 21841 - DNA, 2932 bp, DROSOPHILA
agcttccggcaactgcagccgtgcgagaaccatcccatacgttctctccagtactccgtgaccggcgacatgatcctggtcatctccggaaacgcccaggccaaggtcctcgaccgcgatggattcgagaaactggagtgctgcaagggcgaccagtatatctcggacatgtcgcgcaccaagggccacgtggcacagttgacctccggctgctggcatccatttaacagggagcagttcctgaccgcagctctcgacggtactctgcgcatctggcagggattgaagtccaaggaacagttgcaggtgatcaagacaagggcgcagggaggcctccgcaccaacgcagcatcatgcaactttaacagggacgccacactcatagcagcgggctgcgtggatggttccattcagacgtgggacacgcgcaagatgtttgtgaacaccacgcactgcgtcagggatgcgcatcagaagggttcggagatcacctccattgtgttctcgtacatgggtcagcagttggccactcgcagcaacgacgagaccatgaagctttgggatctgcggcagttcaaacagccgctgcatacctggacaaacctgttctcccgctacgacacaacagattgctgctttagtccagatgaccgtctgctagtcaccggagaatcgcttccgaagggccaggccgaagcgaacctgtatttctacagcactaagagctacgaggaagtgcagcggattcccgtgtccaacgcgcacgtggtgaaaacgctgtggcacccaaagctcaaccaactgttcgtgagctgtggcaatggaaccattaagtgctattacgatgagcaccgcagcatccggggcgccaagctgtgcgtagtgaagacgcatcgcaagaggcagcccatggagatggtgggagtctcccagatcattacgccgcacgccctgccattgttcaggcaggaaaagtcccgtacctcgcgtaagcggatggagaaggcccgtatggatcctgtcaagtcccagcgaccggacttgcccatcaccagcggtcagggcggccgcgtggccagctccggcggcaccctctcctcctatgtcatccgcaatctgggcctgagcaagcgggtggacgacgaccaggatcccagggaagccatcttgaagtatgccaaggacgcagccgagaatccttactggatagcaccggcctacaagcagacgcagccaaaggccatcttctccgaaaaactacccgccgacgagccggccaccaagaagcccaagacagaggcggacaaataggaagtcaatctatttataagagcttagatatgttaataaactcgttacgacgtaagaactttagcttagcttaaaatacaagtgtgtggatctcagacctcctgcattcggtagcaatcggagacgaccttccatttatcattctcggcggtaacgatgaaagtctgctgaaatttgcgtaactgctgatctgcgaacttgacggagccgctggccatgatgaggtaggccagctggttggacacagcctgatccacaataggctgcgcgtccagggtgttcaactggtggtttgaggatggcagctcctgaaagtagctctcgatcatctggcggccgatggccccgtttccattccagctaagcgtagcattgtccaaatagaggcgtccaatttgctgcaggtggaatctatttgagtttcgttttcccatgaaatgcagactttcaaggcggatctctacttacttggcgtcggttgtccacggaggcgtagtacaggcgtgtgaaggtatccgccgtacgggcgcagctctcgaccttggctttcaaatcctttaaacaaatagttgctatgctaaattgctaaaaaactaaatattttcaactcacgctgtccatgtttcccgcgattctcgaattagagtgaccgtcctcgggtggtcagaaaaaaactctccagaaagaaagaaacaaaaatattactaccaccatttgaaatacaaaaacgctactaatctacgtgagtacccttaatatttatttaaagtttaaaaaagtcaagatgttcaaacacttaaaaacaagtttattgcaaacattttctgcaaattgcccgaaaaacaaatgatgacttttatttttcaagttgtttatttctaatcataattttaattaacaattagacacaatttaaagcatagcgatcacaatttgaattggtaacctaacatttgaagattccctgtcggagtggcccattgggggtcactggaaaatcgagcgagtctagggcgactacgaggcactgcggctagaactatgagtatggctaaaactagctaagctaagacctgttttaagactaaagccccccgacctaggcctccagcccccgggtgtccttcaatggctccaggggctgcaggttgaccgtcttgtagcctcgatcccgccggaaccagagccagttgtccccgttgaaatagtcctcgatgtgctccaggctgcggcccttcgtctccggctggaaaaggcacataaaggcagtgagcaggaaactggacacgccgaagaccaggaacacgccgcgcatcttgagcatggcctgcaaagcgggaaacttcttcgcgaagatgaacagagcgacgttcatggaggcaaacactccgccggcagtccgtccgcgtatcctagccgggaagagctcgccgatcataatgccgggcatcaccatcagagccgtgttgaagatgatgtagcccaagagacagccggcaccaacgaatacgtcgtacgacattttcggttgatcgaatctggcatactgatagacactgagcaccaggcagaacaagccggagccgattcccgacactatcatgatcctgcggcggcgaac

SEQ ID NO: 21842 - DNA, 805 bp, DROSOPHILA
atggacagcgatttgaaagccaaggtcgagagctgcgcccgtacggcggataccttcacacgcctgtactacgcctccgtggacaaccgacgccaacaaattggacgcctctatttggacaatgctacgcttagctggaatggaaacggggccatcggccgccagatgatcgagagctactttcaggagctgccatcctcaaaccaccagttgaacaccctggacgcgcagcctattgtggatcaggctgtgtccaaccagctggcctacctcatcatggccagcggctccgtcaagttcgcagatcagcagttacgcaaatttcagcagactttcatcgttaccgccgagaatgataaatggaaggtcgtctccgattgctaccgaatgcaggaggtctgagatccacacacttgtattttaagctaagctaaagttcttacgtcgtaacgagtttattaacatatctaagctcttataaatagattgacttcctatttgtccgcctctgtcttgggcttcttggtggccggctcgtcggcgggtagtttttcggagaagatggcctttggctgcgtctgcttgtaggccggtgctatccagtaaggattctcggctgcgtccttggcatacttcaagatggcttccctgggatcctggtcgtcgtccacccgcttgctcaggcccagattgcggatgacataggaggagagggtgccgccggagctggccacgcggccgccctgaccgctggtgatgggcaagtccggtcgctgggacttgacaggatccatacgggccttct

SEQ ID NO: 21843 - protein, 133 aa, DROSOPHILA
MDSDLKAKVESCARTADTFTRLYYASVDNRRQQIGRLYLDNATLSWNGNGAIGRQMIESYFQELPSSNHQLNTLDAQPIVDQAVSNQLAYLIMASGSVKFADQQLRKFQQTFIVTAENDKWKVVSDCYRMQEV

SEQ ID NO: 21844 - DNA, 3885 bp, DROSOPHILA
acgatgtctccatctgtgtgagcaccgtggcatgttcatccacaccgggcagagccggctcctcgcccacttggaagtccacgtagacgatcttgtgcgagaaggccgagaattgattgccaaagcaagcggtatacacgcccgttgtctcggcaacgaactgatgactatcgaaggtggccttctccagactgtagatgaccttgccctgcggatccttcagggtgacgtccacgtccaattggccaccggccgacacctggaactcaaagtaggcgctcgagttcttcttgatctcctcgtagaagcaatccaccgcgttatcggccagatcgaaggtgaattcgacggcagagatgcagtgcatcatcagagctaccgcaaatacaacgatttgtgtgttcatggttcgccctttttgctttttggtattccctgctggattcgtatgattccctgcttcaccgcctgttattcttccagctgcaaaagaaatgcgctcggtcagtgccaagattccggccaaatgctatgccacctgtcattccaattccatttacttaccagcctccgtccggattacgtgacgtgtttttgttatttgtgatatgctatcgatatcgccagcattcggcgttttgtgttattcgccgcacgataggtctggggttctgacgtgtcaacactcttttccgccactcgctgtgcagcactgcggacccacgtatatgctatcggctactgagcagcagagttgccactctttttttttctttggcgccattatcaaaaattgttaagcacttaaaaataaactttaacaataaacatagttgtatacatatatgattaaaaatttacatatatatattttttttatatatttatattataaattttaaaagtactaattttttaaaaatgtacatttcagaatttgaattgtaaagccataattctttaagagtaaatggagaaaaaaagaaaagcggaacaccgtctacacctgcaggtgtatcagttctttcttggagagaacggtgatcagattgtttgccgtggttatgcccagaatctcgtcaatctcgttgcccaaggtgatgagcttttgtttacccaaggtgacgggaggtccgtttcgcctgcggagaccatcagccgaattattagccggaaagtagacgagaacgtagcgtacagggtcacatatggctacgtaatccagatccggactgcagacggtgaatttccgcacaaccttggaggcctgcacgtagccgaaggcgtgcagctggccctcgtggcggacactccattcatctggacgactgggctggtacatctgtagccatatggaggcgtcgacgccctggcgggtagcaaaggcggctggaaagccaggacgcagcgtggtggtgagcaccagtggcgggggaccaagaaaaatagtgtgggtgatgcacccgctggtcaaattgaagcgtactaaaagaagaaaatgtatttattaagcatatgcagcagatgtataatagaatgcttacccatcttcatttcttcatcagcggatattaagtcacattcttcaacgggatcctgcagacttggaatgggcagtggtggagcttccattggatgtacttcctccgctacgtcatctttcttctgcgcgaacaaacgtggccagttctgaatctccgccttggttagtgacaattctaggccattctcagccaacttaaatgcacttaaatcatctcccacactggcgtataactcttcgtcgaatataacctcatccagatgctttacaacgacagtggttttagaaccgctcacgttaaactctttagcggatgcagttgaaggaacattgaaacgaatgagcacattattatccgtttgggaccagctataactaggtggacctccattttccagctggccatcgtgatcacctgaggaattcaagcgggcagcggctgcttcatcggctgcccgacgctcctcgggagtctgaacatcgcggttgctggcaatgactagggactcggcgcgaggctcaaaggcgcagtagtgcacagagccagtggtctccagccgttgacagatattatatgaccactcgtcattggtgggcgaatgagtccaccgtgcccaggtcaagtccatgtaatagacgtgcgtctgatcttggccaactgcatcacggcgtgccacatgaccggccaccagcgagatctgcttacgttcctgcagcacatccagccgggcatcgaagagtgcaaagccgcgatgaccactgttattattcaccggcgagcgtgtaatccgttgccactcctgcacatcggtgcgcgttctgtcgccggtgtccaccagatggtaactggttataccgtcgcagatcacacagaatcgttccgaaacgaaaactatggtgtagttgtagtcacccgaccgatgtagttccccatcgccctgatccctatagtccaccgtgaggacaacgcgctgggcacgtgcgcgtccagtctgtagatcgtagttgcactgcaccagctggtggcgcttgttaaagaagtagctgcagtggcgcatccatggatcggctaccaggtgattgtgtcgggcaaagagctccgtgtgcagcagcgagaactgattgctgctcggatccagcacgtaggcatcacatccaagttcctggcgaagaacaggcaccgaatcgaatgccaatttgtagccagaaaagtccgagcacaccaggttgcgatccactttcagttccaccaccggcatcttgctttactgcgccaatgctgagttggattatattggagatttcgaaaaaatagagatagatattccaaaacaaatcaaatcaaatcggtagtagaccggatagagatggcagatgaccgttcggccgtgactcgtatcgactttttatcgacaagtgggggatatgtacgataccttggcaattttcaaatctaataagattcctttttttagtttgaaatttaactaaacaattaaatagctaaaaagaaaacattagttagtcacatatttttttatcgaatcgaaagtttaagcaatgtatcgatatagcccacatcggtatctagctcatctcgatagcgcctgcctatcgacggacggccatcggtagttgcgtgccgtgggaaaaacataacgggagcggagcagctgttgcctgctaattgaaaaattagacacaagaacgcaaaattgtgagtttcgtgtggagtttggccaagtgaaaagcgttggcgggaggcgactactccaccacaacaaatccagtagtagctgcaatacgactcacccgactccacaaagttagtttagtgacacaattcggtacgtgcgatagggcgaggggcaactcaaaagttcaaaatctcaagtatatcaagtaattccgcatcgtcgtgttccgcccacccaaaataatgcacattgaggatgccaagtgacgagagagtagaagcgacgatgtccacggtgcgcctgcccattgtgggcatgacttgccagtcgtgtgtgcgcaatatcacagagcacattggccagaaatcgggaatccttggcgtgcgcgtcattctcgaggagaatgcgggctatttcgactacgatccccgacagacggatcccgcccggatagccagcgatatcgacgacatgggcttcgagtgcagctatccaggggatgcagcagatcctcccgaaactcccgccagcgcatggaccaacatacgggtggtgggcatgacctgccagtcgtgcgtgcgcaacatcgaaggcaatatcggcaccaagccgggcatccattccattgaggtgcaactggcggcc

SEQ ID NO: 21845 - DNA, 1826 bp, DROSOPHILA
atttgatttgttttggaatatctatctctattttttcgaaatctccaatataatccaactcagcattggcgcagtaaagcaagatgccggtggtggaactgaaagtggatcgcaacctggtgtgctcggacttttctggctacaaattggcattcgattcggtgcctgttcttcgccaggaacttggatgtgatgcctacgtgctggatccgagcagcaatcagttctcgctgctgcacacggagctctttgcccgacacaatcacctggtagccgatccatggatgcgccactgcagctacttctttaacaagcgccaccagctggtgcagtgcaactacgatctacagactggacgcgcacgtgcccagcgcgttgtcctcacggtggactatagggatcagggcgatggggaactacatcggtcgggtgactacaactacaccatagttttcgtttcggaacgattctgtgtgatctgcgacggtataaccagttaccatctggtggacaccggcgacagaacgcgcaccgatgtgcaggagtggcaacggattacacgctcgccggtgaataataacagtggtcatcgcggctttgcactcttcgatgcccggctggatgtgctgcaggaacgtaagcagatctcgctggtggccggtcatgtggcacgccgtgatgcagttggccaagatcagacgcacgtctattacatggacttgacctgggcacggtggactcattcgcccaccaatgacgagtggtcatataatatctgtcaacggctggagaccactggctctgtgcactactgcgcctttgagcctcgcgccgagtccctagtcattgccagcaaccgcgatgttcagactcccgaggagcgtcgggcagccgatgaagcagccgctgcccgcttgaattcctcaggtgatcacgatggccagctggaaaatggaggtccacctagttatagctggtcccaaacggataataatgtgctcattcgtttcaatgttccttcaactgcatccgctaaagagtttaacgtgagcggttctaaaaccactgtcgttgtaaagcatctggatgaggttatattcgacgaagagttatacgccagtgtgggagatgatttaagtgcatttaagttggctgagaatggcctagaattgtcactaaccaaggcggagattcagaactggccacgtttgttcgcgcagaagaaagatgacgtagcggaggaagtacatccaatggaagctccaccactgcccattccaagtctgcaggatcccgttgaagaatgtgacttaatatccgctgatgaagaaatgaagatggtacgcttcaatttgaccagcgggtgcatcacccacactatttttcttggtcccccgccactggtgctcaccaccacgctgcgtcctggctttccagccgcctttgctacccgccagggcgtcgacgcctccatatggctacagatgtaccagcccagtcgtccagatgaatggagtgtccgccacgagggccagctgcacgccttcggctacgtgcaggcctccaaggttgtgcggaaattcaccgtctgcagtccggatctggattacgtagccatatgtgaccctgtacgctacgttctcgtctactttccggctaataattcggctgatggtctccgcaggcgaaacggacctcccgtcaccttgggtaaacaaaagctcatcaccttgggcaacgagattgacgagattctgggcataaccacggcaaacaatctgatcaccgttctctccaagaaagaactgatacacctgcaggtgtag

SEQ ID NO: 21846 - protein, 580 aa, DROSOPHILA
MPVVELKVDRNLVCSDFSGYKLAFDSVPVLRQELGCDAYVLDPSSNQFSLLHTELFARHNHLVADPWMRHCSYFFNKRHQLVQCNYDLQTGRARAQRVVLTVDYRDQGDGELHRSGDYNYTIVFVSERFCVICDGITSYHLVDTGDRTRTDVQEWQRITRSPVNNNSGHRGFALFDARLDVLQERKQISLVAGHVARRDAVGQDQTHVYYMDLTWARWTHSPTNDEWSYNICQRLETTGSVHYCAFEPRAESLVIASNRDVQTPEERRAADEAAAARLNSSGDHDGQLENGGPPSYSWSQTDNNVLIRFNVPSTASAKEFNVSGSKTTVVVKHLDEVIFDEELYASVGDDLSAFKLAENGLELSLTKAEIQNWPRLFAQKKDDVAEEVHPMEAPPLPIPSLQDPVEECDLISADEEMKMVRFNLTSGCITHTIFLGPPPLVLTTTLRPGFPAAFATRQGVDASIWLQMYQPSRPDEWSVRHEGQLHAFGYVQASKVVRKFTVCSPDLDYVAICDPVRYVLVYFPANNSADGLRRRNGPPVTLGKQKLITLGNEIDEILGITTANNLITVLSKKELIHLQV

SEQ ID NO: 21847 - DNA, 4434 bp, DROSOPHILA
atggaccaacagctacacggcagttgcctagtagttgctcctattccttcctttctaaccacggaattctaaaagtacagctcacacccgaatcggaatccttctacgtatcctgcgatgaggattggactgttattttgagccgcacctccgatgatgtgaacttcgaacgcggctggctggattatcgcgatggctttggcaatttggctggggacttctttattggtctcaacaaactgcatgccctcacttcatcggccttgcacgaactgcggattgtgatggaggacttctcgggcaacgtggcgtatgcgggatattcgttgtttgccattggcagcgaaaaggaactatatccactcgtcttgctgggcaaattccaggataatttgactccttcagctggagattcattgtcctatcatgctggagctaagtttagcactgtggatcaggataatgacaactgcctggagtgcaattgcgccctgagacacaagggagctggatggtttaacaactgcgcaaagagcaacttattcggcgaatataccacccagaaccaacctggagaaactgggatctggtgggacaccttttcagggcagaattcgctgaaacgggttcgttggatgattcgtcccatttccgaaggaatagatgatgccaggcgataggatatctagaagaacatctacccatatccaactgccatctccgaaatcagggataacccacaatcgattgcttgcattttaaccctagctttagctttgaatctctctgtgcgtgtgtgtgtaatatttatggaaaattacttaatacctagataatacagtaaatttacgagtactcgcctgaaagtacgtcatctctgggagatttcctctaatcggtcgattagtggaacgcatgctatattttgggtataaatagatggggggtttcaatggaatttccagttattcgagtgtgtttactgtggattaccttagacatggccaagaccagcttatgtctggtaccaattctctgtcaatttctgggactacatgccgctttgctagactctttacttaatcagagtaccatatactaccttaaaccatcagcggatgtttccctggagaatgtggaacagttgtcgtctgtggaatctgttaagttgattgtccacggttacctgggatcttgcacccatggctctataatgcctctgagaaatggtgagaattcgcagagaaaaattctcataagcgatagatatctaacttcttttttataatgcaacaattccgaagcctatactgctcagggatatgagaatgttttggtggctgactggggtcctgtggccaatctagattatcccagttcgcgattggctgtgaagaacgtggcccagattctagccaaattattggaggaattcctacagcgccatgggatctccttagaaggagtccatgtcataggacacagcttgggagctcatatcgcaggacgaattggacgttatttcaacggatctttgggcagagttacgggtctggatccggctcttcccctattttcaagccgatcggatgatagcttgcactcgaatgccgctcaattcgtggatgtgattcacacggactatcccttgtttggcgacattcgacctcgaggaactgtggacttctatccgaattttggactggctccacagccaggatgcgaaaatgtggatgttgttgctgccagtaagctactccacgaggcttgtaagctcgattgtgtttacttatttattggttttgatattttgtatacttttaattagatagttgcagtcacaatcgagcagtcatgttctacgctgaatcaattggaatgcctgagaattttccagcggtttcttgcagtttaacggccattaaaagtcggcgtgtagaggactgcctaagggaaaaatcaaaaactaatacagaaaacgcaaatgattatcaaactgtctttatgggcgaacatgttaaccgcaggttagtattagtttttgtaacaataaccacaaattttcttaacaatattttactagcgccaccttgtactattatttggaaactaatggagcgccaccctacggccagggcaggaactcacatttctgattttacttgtcgcacttaagtatagatggcggttaaaccccgaaaacatgtatttcttcagaaatagatgccgccacctaacaacccatttggacccacattctataaaagaatatattttattataattcttaaaaccaataatcatttaaaagtaatttataggctttaagcgaaaaacttttgtcttgcagttttgttaatgcaactttattacgttaaagagacatacgatagcttaagcctttccagcacataaatttagtcttgtcaaaactccttcatcctcctaaagctactcatcttttatttcactaaattcctgttcaatcggcaaatgaatttcaattagctgcgaccatcatccttattagaacctgcaatcaaaagttccgcaagcgcaacgactcataaatcacattcattttatgaatgaaaagaacaaacagtccccctcttcggattcttcggttacctggattctgtggatgactgcggacccgggggttatttatgggccaataactttacaactaaacgctcatctacatttaatggcgataatttttgacgcaattcgagaggcagacacgtcggcggtctcgggcttccaccacttggatcgggtatcctaacttgcagaggagttgttggcctacaaacaagaggaagcaaccgcagaagataacgaaaaacacttgacacctcggtctgcttggtgcggtggcttggcgattcggtgtttcagtggtgattgggccccacttttctttccctcgcatagccagcggccaactacactgagaaaacacttgcataaatcagaggagagattaaaactcttatcataaaacaatgttaaatatgttaaatattttgtttctcctgagcacagctgacaaagctaaataaaccttagaaaaatgataacttaataattttctctcagtgttcagaatgcgtgaggtaagtgtatagaaggtgaggccaataagaagagcaccaatgagaataagtaaacaaaggcagcgatcgtaaattccctgttaagaggcaaatgccactaaaaggagttggaatgctgtaaatttggggatttcgagatggcaacagctggctgtcgatcggaagtccaccgaaaacgcaagctggatgtgggtggcacaggtgctgcagttggatcaagtggttcggtggtcaatggtcggggatcacccttcatttaagtcgatcatagatcattgtatcgtgccgcaaatcgatttcaggctccattagccgccctgcacaggaaactcgcgcatttggtgccaagcttatgctttgtttttccccagcttttccatggtgaaaatccagcaagttagccgctctattgatgctcggtcaaccagcgagtttctgttttccgtttctgtttgctgaacgttatttctttgtttaccgagtgccgcgcgccaaagtctggactatttttttttttttttggtttttgctcttctcatatgcgttctcaatatttccatcatttcccttgacgcattttccccatttcctcggcagtccgctttttgttctgccaccaccacctaccttccttccctgaaatttgtgtcatgcgttggcttttcctgtccgccactcgttttgcttttttctctggctttaatttctgtttgctgggaaagtaaaacaaagcgagagttgttgacttttgattctggcgatggctgaatggctgaatggttgggtgccttgtgggtgggggtcgtctcaggttaagcggggttaaggggaccaagagggcccttgagagggtacgtgccaatgaccaatgttccgctctaattcatatgaaatatgagctcgggaactgttttcagggggagaagcagaagtagtgtttaacttcattagtataaaaactaagaaagaacaaatcaacataatctctaataatgaaaactagtatgttttataataagaccaacgtcttggttattttataaattttatcagagacctaaaaaactgcatgcttctataaaaatacattttttcttgcgccagcctattatccttttagcctgtctgctctgtatgtttgacccctgcgctgtcgtgttttaacttatataattcctcacatgttttgacacatttcttaatggcaccccacacacggacactcgcccaaagatacaggtaaaaaaggtgaaaaaaaaaggaacccagaggcaagacaaaatgaacaaatgcgaacacaaagccgaggaga

SEQ ID NO: 21848 - DNA, 1101 bp, DROSOPHILA
atggccaagaccagcttatgtctggtaccaattctctgtcaatttctgggactacatgccgctttgctagactctttacttaatcagagtaccatatactaccttaaaccatcagcggatgtttccctggagaatgtggaacagttgtcgtctgtggaatctgttaagttgattgtccacggttacctgggatcttgcacccatggctctataatgcctctgagaaatgcctatactgctcagggatatgagaatgttttggtggctgactggggtcctgtggccaatctagattatcccagttcgcgattggctgtgaagaacgtggcccagattctagccaaattattggaggaattcctacagcgccatgggatctccttagaaggagtccatgtcataggacacagcttgggagctcatatcgcaggacgaattggacgttatttcaacggatctttgggcagagttacgggtctggatccggctcttcccctattttcaagccgatcggatgatagcttgcactcgaatgccgctcaattcgtggatgtgattcacacggactatcccttgtttggcgacattcgacctcgaggaactgtggacttctatccgaattttggactggctccacagccaggatgcgaaaatgtggatgttgttgctgccagtaagctactccacgaggcttatagttgcagtcacaatcgagcagtcatgttctacgctgaatcaattggaatgcctgagaattttccagcggtttcttgcagtttaacggccattaaaagtcggcgtgtagaggactgcctaagggaaaaatcaaaaactaatacagaaaacgcaaatgattatcaaactgtctttatgggcgaacatgttaaccgcaggagttggaatgctgtaaatttggggatttcgagatggcaacagctggctgtcgatcggaagtccaccgaaaacgcaagctggatgtgggtggcacaggtgctgcagttggatcaagtggttcggtggtcaatggtcggggatcacccttcatttaagtcgatcatagatcattgtatcgtgccgcaaatcgatttcaggctccattag

SEQ ID NO: 21849 - protein, 366 aa, DROSOPHILA
MAKTSLCLVPILCQFLGLHAALLDSLLNQSTIYYLKPSADVSLENVEQLSSVESVKLIVHGYLGSCTHGSIMPLRNAYTAQGYENVLVADWGPVANLDYPSSRLAVKNVAQILAKLLEEFLQRHGISLEGVHVIGHSLGAHIAGRIGRYFNGSLGRVTGLDPALPLFSSRSDDSLHSNAAQFVDVIHTDYPLFGDIRPRGTVDFYPNFGLAPQPGCENVDVVAASKLLHEAYSCSHNRAVMFYAESIGMPENFPAVSCSLTAIKSRRVEDCLREKSKTNTENANDYQTVFMGEHVNRRSWNAVNLGISRWQQLAVDRKSTENASWMWVAQVLQLDQVVRWSMVGDHPSFKSIIDHCIVPQIDFRLH

SEQ ID NO: 21850 - DNA, 3232 bp, DROSOPHILA
agcagtacttgtcactaccttcttttctttcgctggccgtcagcttcgctcatggtctcgtgctgctctgctcgatggcgaacctattcctctgctgctggaccctcaagaagctgctgcgagcaatgcaggggctcagctggtgattttgcgacaacataacacaatcaaccaactcggtaccataccacctcattttgtgagagctgcattttggggcactatatgcccatactcatcctccgcctcgattcacattcaacggtgtaggctaaagggtctaaatataatgtaaatgtaccatccagatgcttgtgtggaattgtaatcgtgtgtatatggaatgaaaaatgttgtttgcgtagcgttaccaaaaatagtaatcaaatgtttcacatttgttgtccatagtcgtatatgtatgtttgtattgtattgtatatccctatatgcgatatttactcgtagctagaatctactctaaatctagacaaattgtgtaagaagtaataaatgtgcttttgaccgctgtctaattgttaattgtagttgaagactttattgtttgtatacatatatgcggcaagcatacgtaataatatgcatttgcataagagagaatacagtgtataaaataaatatccaaacctttaaatggacaaataaggtcgtaagcaaattggtttcttcctttatatgagtttcaaacgataatactgtggtgagatatctattgtggttggttggctgaccgaaagaaaattatcgcatttgcaaaactagcctcactccaatgataaagaattattttttcgtgataatatagaaaaatactatttgcatttcgagaaataaaatatcaaattgagtttaatattaggtttgatttactaattaaaaatcacgattaagcggcatcgttaacgagtaatatacacaataaatacacgattattatgagctaggaaaatctttggagaccaataagtgtgtggggatcctacagccgccacaggcgactgctgttgcctccgatggcgccctcagcctcgccgcgcagcttgttgtcgtcggtgcgccagacgaagggctccaggcggtcctcgtcgtccaggaagttattgatcgcctccagactggctatgttctcgtgcagcagcgagttgcatctgctcagctgatgcgatatgctccgaatcttggcgaattgctcggcgtacgaggcgtacgtcttctgcatgtccacgaatccggcaaagagggtggtgatcgagttgctcaccaccttggtacgttccacgaggtgattctgttcgctggccacatagctggcgcacagattaagatgtgtttgcatgcgggtacatatgttgatcaaatgctgcgagtttagtcgctccagaatctctgcatctcgtgtattggtcgccgacgtgatggattcacggagcacgggcagaaactgcggtatattgcgcaatcgtgccaagtccatgtccacatcctcgccagcatcgatggcaccgggacgcacaatcactatattatgactagaggccgtggactgtggtcgcttcggtttcacggcgctggtgagtccactcggatgtgacttcctggccgccgcacggctggcgctgctctgctggagcatatgcgccggcttgctgcgtatcttgggcgaatcaccgattggccgatctgtataggacacatatggcaggtcggagcagacgctaagcggcggcgaaggcggtctgctcagttcggagccgccgggcgaagcggcctcggcgatgatctgcttgctagctatcacaatgctagctgggcccactccagctcccgggcccaccactgttccgcctgctcctcctgtcgtctgctggcgatgaccaactccgcgtcgtttgttggccgccgccgtggccgccagcatcatggagctgccatcgccgagggatccagtgcccgctcctggtggctggcgtccgtcgaagatctcgtggccatcggcctcagcccgctgctgcgaatgctcggcgcccatttatcgatccgattcctgtcgattccgactccaagttccgcgtactcctggcccgaattttgtggttagctggcgctgtcactgttgctgtcctgggcccacctgctgcttcatttccagtggcccaagccagtcgatttacacctcaaaacaaatcgatgccaaagcctcaaatcgaatcgcaacaaagtctcattcaggacctaaaaatttcccagctgccagctgaaatgcgctagtgcgtttttcggtattaaagtacagataacgagctgtttccactgcacgcttgatgtcagctttcaaatagtaggggggtttacatattcattgaaattcggcttttcttaaaaaaaaaaaaaaacgaatataataaaagtgaaactttactaaataaatcataaaactataagctagtgatattgaaattattacaaaatgttcatattaaatagttgtatattgaaagcttcggttaggtattttaaatacagaaatactaattctttggttttaagatctagacatggagtttaaatttgaagccatagcttataacttttaatttcctatcatttcctagactttctgttgataattttaaatataaacactataacttttgtttgcaagctcttctaatttcgttgtctattgttttgaaatcgagctccacttggactgtataagtagggggatgtcgttggggttcagataagaccaggcgataagtggagagccctctcttccaatgcttccgtataagttcaccagtgttttggtggccgtcgtcgtcgttctgccgtttgaggtgctaattctcagcatgggatatagattctgttttggttttggttttggtttcgatttcagctcgagcaatattcagcaaagtcagttggctgacgaccgtgatcgcgatagcaacactttcactcaccagaacggattgcaatggtgagcagggaacagggctttgctggaataatcttatcgaggtgcaccatcgatccccctgcctatttgttttttaagtctacgcatatactattattattattttctgggactgccatttacaattttcctatattttatacaaaagtttaactaatgttggtctaggtcacgaattacaacgctaaagatgttttgtcaccaaaaatggaatttttcttttaa

SEQ ID NO: 21851 - DNA, 1232 bp, DROSOPHILA
cgattcgatttgaggctttggcatcgatttgttttgaggtgtaaatcgactggcttgggccactggaaatgaagcagcaggtgggcccaggacagcaacagtgacagcgccagctaaccacaaaattcgggccaggagtacgcggaacttggagtcggaatcgacaggaatcggatcgataaatgggcgccgagcattcgcagcagcgggctgaggccgatggccacgagatcttcgacggacgccagccaccaggagcgggcactggatccctcggcgatggcagctccatgatgctggcggccacggcggcggccaacaaacgacgcggagttggtcatcgccagcagacgacaggaggagcaggcggaacagtggtgggcccgggagctggagtgggcccagctagcattgtgatagctagcaagcagatcatcgccgaggccgcttcgcccggcggctccgaactgagcagaccgccttcgccgccgcttagcgtctgctccgacctgccatatgtgtcctatacagatcggccaatcggtgattcgcccaagatacgcagcaagccggcgcatatgctccagcagagcagcgccagccgtgcggcggccaggaagtcacatccgagtggactcaccagcgccgtgaaaccgaagcgaccacagtccacggcctctagtcataatatagtgattgtgcgtcccggtgccatcgatgctggcgaggatgtggacatggacttggcacgattgcgcaatataccgcagtttctgcccgtgctccgtgaatccatcacgtcggcgaccaatacacgagatgcagagattctggagcgactaaactcgcagcatttgatcaacatatgtacccgcatgcaaacacatcttaatctgtgcgccagctatgtggccagcgaacagaatcacctcgtggaacgtaccaaggtggtgagcaactcgatcaccaccctctttgccggattcgtggacatgcagaagacgtacgcctcgtacgccgagcaattcgccaagattcggagcatatcgcatcagctgagcagatgcaactcgctgctgcacgagaacatagccagtctggaggcgatcaataacttcctggacgacgaggaccgcctggagcccttcgtctggcgcaccgacgacaacaagctgcgcggcgaggctgagggcgccatcggaggcaacagcagtcgcctgtggcggctgtag

SEQ ID NO: 21852 - protein, 349 aa, DROSOPHILA
MGAEHSQQRAEADGHEIFDGRQPPGAGTGSLGDGSSMMLAATAAANKRRGVGHRQQTTGGAGGTVVGPGAGVGPASIVIASKQIIAEAASPGGSELSRPPSPPLSVCSDLPYVSYTDRPIGDSPKIRSKPAHMLQQSSASRAAARKSHPSGLTSAVKPKRPQSTASSHNIVIVRPGAIDAGEDVDMDLARLRNIPQFLPVLRESITSATNTRDAEILERLNSQHLINICTRMQTHLNLCASYVASEQNHLVERTKVVSNSITTLFAGFVDMQKTYASYAEQFAKIRSISHQLSRCNSLLHENIASLEAINNFLDDEDRLEPFVWRTDDNKLRGEAEGAIGGNSSRLWRL

SEQ ID NO: 21853 - DNA, 3097 bp, DROSOPHILA
aagtgaacatcgtaggtccgggagccttcgcctccatcctcgtggaggccagtggcaagcagccgattacgttgggcaagcctggccgcgagttgggtgatctgcttgtcgagcattaccaaatcgttcagcccagtcgggtgctcatgatcggagatatgttggcccaggacgttagctttggacgccagtgcggattccaaacgctgctcgtgctcagcggcggatgcagcaaggaggagctcctggccgagacggatccgcagcgcataccggactactatgcggacagcgtggccgatgtggcccagatgctgggcgaggcgcccaagtcgcgtgtctagacggcgtccggcggaggagatcgaaaaacgatatatccattggctatagctgtacctgggtacctgggtagctgatatagtgtcgtattcctaaccagatcacattctgtctgcgaaatttgaatcatagtaagcaaacagagttgacgaacttgggagttccaggaaaacaaaaccactgcaaccatttggtcgtaaaagatccatagatgtacagtgcatataaacaaataaacaatatatatgtatatagtctagctgaaacaatgcactatattttattagctaaaatatatgtacacaattactaatgacattagagacaagcgatcgaactttgggataccccgcaattcacagtgtaaagagatttaaggttgtgaacaaataaaaagtttagttttatttataaatttcgccaaaaaaaatatagatttaatgccttttaaaaaacaaaaaagagatgcaagttaattgaaacttttgcactaattatagtagataatgtctagattatagggtattcctcacttccaaagtcaaggaacacattgtgcagtgagtaatcggagtcactttgggtttccgcctattaccaacaaacaaacttggttaaaaatcagcagataagattgacaaatacttgaacactatcatcacaccgaatgcgccgagtcagagttactcgatgccggattattattgattgctatctggcccaggcaatcggccagatagtcgggcatctgggaatggtcaatcggcagtcgctggacatcctccagctttgtgccgccggtaaggacgaggagcgtctggtagccactggcgcgagcgaatccaatatcgctggccaggctatcgcccacgaagagcacgcggctgggcggaatttcccgatggcgttccagtagaagcttgcgcagatcctcgcccggtttgcccaaggttatgggctgacggccaacggcctgggtcaccacgtcgataaaggctccaggtcctgtttggattggaaacaaggggaaaaactgtgtcatggattttacaaaagaccatgcttacctatgatttcacccttgccaaatggaatcaaagcatcggcagctccggcgaggaaaaggcacttcggattctgtagctggaaatgggcacgcatcaacttggccgccgacaggttgaagtcaacgtcgatgatgaccgcatccaccgattcgccagagaagatggcctcgtgcagatccttcagcctcgtgatgattcccgaaccattctattcaaattccatctagagattggaattccttcacccagatttctaatacctacctcttgggccaaacgaaatccggcatttacgaggatttccttaaatggcgacgtggccaggcagtagatgagtccctcgaatttaatggacctcaagtgatcgcagatggtttgggcaggatgaacgatttgatgctggtgaggaagagttaatagtttaccatatatgttgttcccaatcattcctgctcacctcatcaatctttagatggccctgtttctcaaacttctcgatgtgctccttcaccgaactgatgctgttgttggtcacgaaggtcacatccttgccaagatgggccaaatgggccaatgcctcggcggaaccgggtatgaaatccctcagtggataccaaacaacacctggcggtacaagacccacatatgaccatatatagtgtaggtacaaatgaaacaaacttgccatcgcaatcgcagaaaaccaaatcgaatgagtcaaagaactcatcgcgttccttttcagtcatattctttagatacttaacctagggaatagatatttttaaacaattgaaagcttatccctttagatctgataaattaaaaatcaggcaactgaatcggcttattcaagcagataatgattctattattcattatttccattctaccctacacaccgaactcattccgatcgagtgatggaaactatgacacaaatccggatttcgagagattttagcacggcaattccaatttcgatccagattcggattccgattcctcgcagcgcaaagttccagtccagcgatgcagcgactcaaccgaagtgccagagacagatgtgtaactaagtccagcgagacgagttcgccaatctggaagactcagcccgaagagaactgcctggtcgtggaacgaggaacgaggaacgattgcattacacatttcaaattgcattagaccagcagcaggcagcccagcgtgtgcagattggggcgaggtaagtggcacacactgcgggcaaatgttcatagtagatcaaaaaatatatatatgatattttcaataatcataggacaaactaagaaaattgaaaatatagcagagatccatgtagatctgtgtgtcactcgttaagatcgcacgaccacagcagatttgcatagtgtatagttagtagtaattgctgctgcaggtgcgcttcgttactacgaagtttgtgtgcgtgtcttttcccagtgtagttacacttcaatcgctcgtaatccgtggactgctcgactgggaactaggtggtatggtgtagtaagtggtgtctctgtcaattgaatgttgtccagccaagtcgctgggtggcgttccaattgatttgctttcatcgcctctcaattgagtaatttggatgccaccttatccagtgcatccggtttacttatctacgaaaatatatttctatttgcata

SEQ ID NO: 21854 - DNA, 921 bp, DROSOPHILA
atggcaagtttgtttcatttgtacctacactatatatggtcatatgtgggtcttgtaccgccaggtgttgtttggtatccactgagggatttcatacccggttccgccgaggcattggcccatttggcccatcttggcaaggatgtgaccttcgtgaccaacaacagcatcagttcggtgaaggagcacatcgagaagtttgagaaacagggccatctaaagattgatgagcatcaaatcgttcatcctgcccaaaccatctgcgatcacttgaggtccattaaattcgagggactcatctactgcctggccacgtcgccatttaaggaaatcctcgtaaatgccggatttcgtttggcccaagagaatggttcgggaatcatcacgaggctgaaggatctgcacgaggccatcttctctggcgaatcggtggatgcggtcatcatcgacgttgacttcaacctgtcggcggccaagttgatgcgtgcccatttccagctacagaatccgaagtgccttttcctcgccggagctgccgatgctttgattccatttggcaagggtgaaatcataggacctggagcctttatcgacgtggtgacccaggccgttggccgtcagcccataaccttgggcaaaccgggcgaggatctgcgcaagcttctactggaacgccatcgggaaattccgcccagccgcgtgctcttcgtgggcgatagcctggccagcgatattggattcgctcgcgccagtggctaccagacgctcctcgtccttaccggcggcacaaagctggaggatgtccagcgactgccgattgaccattcccagatgcccgactatctggccgattgcctgggccagatagcaatcaataataatccggcatcgagtaactctgactcggcgcattcggtgtga

SEQ ID NO: 21855 - protein, 306 aa, DROSOPHILA
MASLFHLYLHYIWSYVGLVPPGVVWYPLRDFIPGSAEALAHLAHLGKDVTFVTNNSISSVKEHIEKFEKQGHLKIDEHQIVHPAQTICDHLRSIKFEGLIYCLATSPFKEILVNAGFRLAQENGSGIITRLKDLHEAIFSGESVDAVIIDVDFNLSAAKLMRAHFQLQNPKCLFLAGAADALIPFGKGEIIGPGAFIDVVTQAVGRQPITLGKPGEDLRKLLLERHREIPPSRVLFVGDSLASDIGFARASGYQTLLVLTGGTKLEDVQRLPIDHSQMPDYLADCLGQIAINNNPASSNSDSAHSV

SEQ ID NO: 21856 - DNA, 7018 bp, DROSOPHILA
cacattaatggagttaagtccatttgatttatttgttatttctcatattttttttttttatccggcacacaacacaatttgttttgtttctggcttaatcgctatcgtaatcgtagctgttatgattagttttagttcgtatcgtataaatatgtttatcaaaacaacaattcactataggtgttacgcactggtaagtagcatttagagttctacaaaatattgcgaaatgtgcaatgctctcgcttctcgcttggccaataatcaacaataaaaacgatggatttttggggtgttgggagtaggatgaaacgcacatacatatgtctgagttcgcttctcggtttgtgggcaacattgcaaggtacattggattgtttcttagtgtctgaatggatgggctaccagctcatttaagctcgcacccacttgtggtgtatataattcgtgatcgttttgctcatgatcgatccaacatggccaacaggagttgtcccttttttttgaaatcataaatactcctcgttaatgcactttggacatgtggtgtgctagtgtagtgtagtttggtggtgtatataatttaaaaatattcaaatacatatacctagaattgtagtatatctctgtgtgctgctaaagcgacttggccttactgttgatccaatcgggtgatgattcgggatactcattgtacaaaatacaacgatccgtttgagaaatcaagtaacaatataaaatcctattcgtgtatgtatataaaaatgcaattgcttgactcgaggctccgatgcccccatattcgttgagcatttccaatgcaaacacagtacaaaaatcatcgtaagtacgaagcactgcatccatgcgatccctagatcgacaatccctagatattcgcgtgtcggtatatacaaatgtctagctaactacgtgtttctgtgggtgggcggaaaccaaggaatgatctgacgaacatgcagcttccattcgccgcttcctacacgaacgaggtggcttcgtcgcgattccggatcaccgtttcgttgttccgctgacgcagttcaccttccgacttctgttggccattgagttccgtctgcaccagtttcatggcgtgctgtttctcgtactcgataatgtgctcccgcagcaggaagttctcccgcttgatgcgcttcagcaggcgacccgagacatccggtacggcccagcgcaggatgccctgcagcatggtgataatgttctgtggcgacaagattaaggttagctagaaattttatgtgaattgcactgaccattctcacctggtagatgacgatgaaggccagccgacccgtcagtatcttccaatatatcatgggacgtttatagggatgcggatcttccggcgagtttcggaactcagtgtagcgacacaccgtctcgttcacatgctgactgccaccgagcagtggctgcacctgaaagtccttggtgttgaacacggccagcgtgaagttcagatagttgttcagctcgggatcacccatggaggcggcatacacgatttttggtatgaggttcgtgctaaatgcgattatcattgcctacaaaacgaatttggatgcggaattaaaaagcaattggtatagagatatcttccacagactcacactcgaggccacggcaatccgcgtgacgacggtcatgatgctgtgccaaacgccaatgtcgcgcgctcgcattcccactggccgtcgcaggaagcgcagcattttgatggcgtccaggcgcacctcaatcacattgttcagcagggccagcagcggagccaatgggaaggccagactaaacagtgtgatgaagccaaattgcacaactgggcaggaaaattgttaataaaataaataggaaactttcgagctataacttataggaattcgtacccatttcgaggtattccacgtagagcgagttgttctcggcaggcagtagattgtagtcctcggtgaactggttgtacggcaccagacgctggtcctgatggctcttgtaccagccgtggcggtagctcagctccttgaaggtgcgcatcagataggggataagcatctccacgatggcattgaccgcctgcttgccagccataatgattaccaactgcatgcagagctccataaggcagccgccaggattgcactcctcctggcgaaagcccagcacgcgattgtacttcgccggatagccgacgaacttgcccttgaggaaggcaatgtagaagagcgaggagtaataattgacgaactggaacacatagtttttgatagttaggctctcatcgtattccgtctgggtgcgacagtactcgtagttggttagctttacagccaaattcgagtagaccatgtccagcagcgagatcactataaggtcaatgatgcccgccgtcatgggcaatatcataaccttaaaggtcatggaattctcgctgcccaaaatgctgtgcgatgctcgctgtgccattctatagatgattatgcccgctatggcaatgactgatatgcaaatctgtaagagaatatacattttaatgcggctgcaatggcaacagatccgtcgtgggatactcacaaacaagaccataatgctatagctggtgaagtttggcaggaacttgaaactccagaagggcacatccggatccaagatggtccgcttgccagtgtggtcctgctcatatgcttttccggccagcttcttggtgcgcgatattctggccaagtattgcggacgcgggtgctccacgtggtgggtaaaaccagtcagtccccagcggtgcaccaggcccgccgagtagcgtttccagaactccaggtaaaccactgcccaaatggccatcgaaaaggcaaacaccactgtcatattgttgtctatcagatagttgaacttggaggaggtacacgtctcgttcagtcgccaatagtcgcagctgcggtcgcactgtggacacatgatcgttccattgtcgtcgcaaatgtcccggctaatcggatcgctgttccacgtgatgaagccgtacagaaaacagagcacgccgaacacgctaatgggtatcagcatttgcgtgtagaatcccagccaggcaaagtagagtgccacctttgctccaaagtagtctttaatttggtccagtggttgcaggctgcaataaaatggtttcaatgtttctcttagttgctttcatcaaggtaatgacagtgttaatcttatgatattataattactcctgcttctatagctccagagatctaccaggaatgctacattcgttctagtaataagatcttctaacaaaacatctgcttctcggaattagattgcatgtctagatcgagcttgcttctaagagatcagatttcgctcctcgagtagtctttccaagaaatccaactattgtttaaacagaaagtttttcatttgcttacttcttccacttggatatgttggcccactcctttagcagccgatcgcgatcgtctttctgcaataaaatatgaataatcttatgagttgaaaatttcaattaaaacggatcttgaacccacatcatgcaaggtgtaggcgcaggtatatacgccatcctggacgagcttctcgatgcccagattgtcggccgtctcctcgccctccacgaaacgctggcgctggagaatgaaattgatgatggagtagcgggtgctggcgtcgagaaagttcgggtgctccgtatcgtacagttccaggtagttgcgggagaactccagatggatgcgcggttcgcgttccggaaacagggccgtattcaattggacggagctgaagagacttttgcacatgcgactgaagcaggtcttgaactcgtgcgccgattcggcgaagatttgatcctggccgggaatcggtttgagcggcaccttaatcttgagtatttccgcatagcgatacagcacctccgccggcgcatggatcttgatgaaatggacgcgctgcaccttgttgtgctccagctgcaagccctctcgctgcagattcgcctcaaagatctcgcatttgcgccgatgctcctccagctgcgtctctccgttgtaagccagcacaaagtccacgctccgtttgccatcgtcgaagcgtctgtatgtctgcagagattccgagagatccggtaagaagcacgtgatgaacagcggaaagagagcaaccgtagatggagagcattagtaaaaatcagtgtgagtcactcgagagcgatcttaaaaatatacatttgcttatcaactagacggaaacaaagcgtgtgggtgcgtgtttgcctaatggccatttccccctggtcaccaccctatcaccgtggcggacgcctcccgccgatctcccgagcgcaatccgcgcaggaggcagcagttcagcatgatgacagcccggggaaccaaaccaaatcgaatcgaaccgaaacacaaccgacgtggtcgagacactacacgcaaatattggattctggccgctcggctggctctactgcagatggcccagctgtttgctgcaatcagtagctgatccaaagtaacaaaacgcccgacttagatactaaagatatcagtatacaaaattcgcattaagtgttcatacccaatcccgcaagcaaactataggaaatagagaaatataaacaaacaaaggagagcgtgaaagaaggcggcaagaacttgatcaagtgcagaatatgtaaatgtgtgtgtgtgtgtgcatcattacagcagcggggcaattgtatgtgtgactggtgtgggtacagtggtcgctccttaacgcgaaatcctcttcgattccctactatgaatatgaaagttacagagcctctaattcagtcagtgactcatagaatctgataatgatcttaattcaaagagtctatttttagaagatcttctatagatttttacaaaatatagctaagtacttgttagattggcatttaaaaacattgttaatatattaagtaatgggaattgtttcgaatttcgatgagtaatcaagggagtgcgtaggagcaaccactgcaccagtgaccatcgaaactcgtgtgtgaaagctggaatgagcgatccggcagatggttgaaagtgactggcgattggcggatgagatgactgactgactcggcatccacgcaactgcaagacaaacatggtggtgagatcgatggacgtgcgagggataaggacatcggcggcagtgcaaaagcgtgggctttcaaccggagccatgtgcttaatcgttgtggaaacgtatttggttttgaaagttgatttggaatcgtatgctactatcgttgtttacccttgatttccactgggagtatgttattggcaatttcttatctttattagaaatgttgctactagttcttaacagacgtctagagacctcatcgtcaccacctccttgtcctccatctccggtcacaccgatcccggtgggcaggtggtttcgtccgttttgcagggcaatcatttgggcggcgatagcggcatccgtgtgatcaccaccaccaccaccgccgccattgaggtgctccagtgctgtggactgacggtatccaggctgccaggcaagcgctgcgtgctcggcggctgctccgccgcccagacgcagccttcctccaccgcttcctccgcctccctcatcgcccgccagatcgaccgccgagtggtagatggtgttgcgcgactgcgagatcgacttgcgatgcgccgccgcagcagccgccgcctccgattccgccagcgatatggtgtcgaagtacagactctcccgctcgtccatttcagattcgggatagtcgtagtcgttggtgcggactgcaacgaagtttgagattagtcggaagtactggcactcgcaatacaagtagatgagattcagatgagatgagttgagttaagttgagttgagaggtgaggcggtggtgctgatgagttagttgttacattgccacatttcaattacacaaaatagtgcacaattgcatttaatttataagctttttaatcaagaatagtaacaacaataatgttttgcaaaaatacggtatgaaatatgatctcctgatgttattttagtttaaatagctgatagttctgatttagcaatctaaaagatcattctataaaattactttgaactggtaaaaaacgaaagtgcttgacccaatcccctctagaacgaacatccaattaggtaacatgacataatagcaactttaataaattaataattagttagaaaagagcgacatatttagcttgtagcgtcatcaaaatatgaggagcaaataatatttcaatgaataagactacatttttacaagatcacttacaagtgccaacaaaataagttaaataaattcaataaatagagtatttcctcaatgttattaattgagaataatcaaaatatccgacccgctaatattaattactgataagccccgaaaatcccgatagtgagtctgtggccatgataatggtgatgatggaatttgatggcctttcaggcgtacccaatttggaagccaacttatcgggctccagctgtcgctgataccgccgccgcctgactcatttaaatgcggtcaattacataagtggcccacaagtgcgtttccatgtccatggcagagtgcgtgtgagaacttcgatgaatgtgaatggatcgagggttggatacacatggatacacagatggttggggtggccactgctgctgatgatgatgatcagtttccggcgcaggaaatccccaacccaattctaattccaaactaaaaaagggacaaacggaacgaaatcaagctcgaaacaagaactaaacaatgacaaacgctccaaagatcaatattatgcgaacgaaatgaaacaagttgaacgatccgacatatatattaagtgtgtacataaatagcagaacaaccaaataaatttgcatgacaacgggtgcg

SEQ ID NO: 21857 - DNA, 3177 bp, DROSOPHILA
atgtggcaattccgcaccaacgactacgactatcccgaatctgaaatggacgagcgggagagtctgtacttcgacaccatatcgctggcggaatcggaggcggcggctgctgcggcggcgcatcgcaagtcgatctcgcagtcgcgcaacaccatctaccactcggcggtcgatctggcgggcgatgagggaggcggaggaagcggtggaggaaggctgcgtctgggcggcggagcagccgccgagcacgcagcgcttgcctggcagcctggataccgtcagtccacagcactggagcacctcaatggcggcggtggtggtggtggtgatcacacggatgccgctatcgccgcccaaatgattgccctgcaaaacggacgaaaccacctgcccaccgggatcggtgtgaccggagatggaggacaaggaggtggtgacgatgaggtctctagactgtctcgaccacgtcggttgtgtttcggttcgattcgatttggtttggttccccgggctgtcatcatgctgaactgctgcctcctgcgcggattgcgctcgggagatcggcgggaggcgtccgccacgacatacagacgcttcgacgatggcaaacggagcgtggactttgtgctggcttacaacggagagacgcagctggaggagcatcggcgcaaatgcgagatctttgaggcgaatctgcagcgagagggcttgcagctggagcacaacaaggtgcagcgcgtccatttcatcaagatccatgcgccggcggaggtgctgtatcgctatgcggaaatactcaagattaaggtgccgctcaaaccgattcccggccaggatcaaatcttcgccgaatcggcgcacgagttcaagacctgcttcagtcgcatgtgcaaaagtctcttcagctccgtccaattgaatacggccctgtttccggaacgcgaaccgcgcatccatctggagttctcccgcaactacctggaactgtacgatacggagcacccgaactttctcgacgccagcacccgctactccatcatcaatttcattctccagcgccagcgtttcgtggagggcgaggagacggccgacaatctgggcatcgagaagctcgtccaggatggcgtatatacctgcgcctacaccttgcatgatgtggaaagacgatcgcgatcggctgctaaaggagtgggccaacatatccaagtggaagaacaactaagagaaacattgaaaccattttattgcagcctgcaaccactggaccaaattaaagactactttggagcaaaggtggcactctactttgcctggctgggattctacacgcaaatgctgatacccattagcgtgttcggcgtgctctgttttctgtacggcttcatcacgtggaacagcgatccgattagccgggacatttgcgacgacaatggaacgatcatgtgtccacagtgcgaccgcagctgcgactattggcgactgaacgagacgtgtacctcctccaagttcaactatctgatagacaacaatatgacagtggtgtttgccttttcgatggccatttgggcagtggtttacctggagttctggaaacgctactcggcgggcctggtgcaccgctggggactgactggttttacccaccacgtggagcacccgcgtccgcaatacttggccagaatatcgcgcaccaagaagctggccggaaaagcatatgagcaggaccacactggcaagcggaccatcttggatccggatgtgcccttctggagtttcaagttcctgccaaacttcaccagctatagcattatggtcttgtttatttgcatatcagtcattgccatagcgggcataatcatctatagaatggcacagcgagcatcgcacagcattttgggcagcgagaattccatgacctttaaggttatgatattgcccatgacggcgggcatcattgaccttatagtgatctcgctgctggacatggtctactcgaatttggctgtaaagctaaccaactacgagtactgtcgcacccagacggaatacgatgagagcctaactatcaaaaactatgtgttccagttcgtcaattattactcctcgctcttctacattgccttcctcaagggcaagttcgtcggctatccggcgaagtacaatcgcgtgctgggctttcgccaggaggagtgcaatcctggcggctgccttatggagctctgcatgcagttggtaatcattatggctggcaagcaggcggtcaatgccatcgtggagatgcttatcccctatctgatgcgcaccttcaaggagctgagctaccgccacggctggtacaagagccatcaggaccagcgtctggtgccgtacaaccagttcaccgaggactacaatctactgcctgccgagaacaactcgctctacgtggaatacctcgaaatggttgtgcaatttggcttcatcacactgtttagtctggccttcccattggctccgctgctggccctgctgaacaatgtgattgaggtgcgcctggacgccatcaaaatgctgcgcttcctgcgacggccagtgggaatgcgagcgcgcgacattggcgtttggcacagcatcatgaccgtcgtcacgcggattgccgtggcctcgagtgcaatgataatcgcatttagcacgaacctcataccaaaaatcgtgtatgccgcctccatgggtgatcccgagctgaacaactatctgaacttcacgctggccgtgttcaacaccaaggactttcaggtgcagccactgctcggtggcagtcagcatgtgaacgagacggtgtgtcgctacactgagttccgaaactcgccggaagatccgcatccctataaacgtcccatgatatattggaagatactgacgggtcggctggccttcatcgtcatctaccagaacattatcaccatgctgcagggcatcctgcgctgggccgtaccggatgtctcgggtcgcctgctgaagcgcatcaagcgggagaacttcctgctgcgggagcacattatcgagtacgagaaacagcacgccatgaaactggtgcagacggaactcaatggccaacagaagtcggaaggtgaactgcgtcagcggaacaacgaaacggtgatccggaatcgcgacgaagccacctcgttcgtgtag

SEQ ID NO: 21858 - protein, 1058 aa, DROSOPHILA
MWQFRTNDYDYPESEMDERESLYFDTISLAESEAAAAAAAHRKSISQSRNTIYHSAVDLAGDEGGGGSGGGRLRLGGGAAAEHAALAWQPGYRQSTALEHLNGGGGGGGDHTDAAIAAQMIALQNGRNHLPTGIGVTGDGGQGGGDDEVSRLSRPRRLCFGSIRFGLVPRAVIMLNCCLLRGLRSGDRREASATTYRRFDDGKRSVDFVLAYNGETQLEEHRRKCEIFEANLQREGLQLEHNKVQRVHFIKIHAPAEVLYRYAEILKIKVPLKPIPGQDQIFAESAHEFKTCFSRMCKSLFSSVQLNTALFPEREPRIHLEFSRNYLELYDTEHPNFLDASTRYSIINFILQRQRFVEGEETADNLGIEKLVQDGVYTCAYTLHDVERRSRSAAKGVGQHIQVEEQLRETLKPFYCSLQPLDQIKDYFGAKVALYFAWLGFYTQMLIPISVFGVLCFLYGFITWNSDPISRDICDDNGTIMCPQCDRSCDYWRLNETCTSSKFNYLIDNNMTVVFAFSMAIWAVVYLEFWKRYSAGLVHRWGLTGFTHHVEHPRPQYLARISRTKKLAGKAYEQDHTGKRTILDPDVPFWSFKFLPNFTSYSIMVLFICISVIAIAGIIIYRMAQRASHSILGSENSMTFKVMILPMTAGIIDLIVISLLDMVYSNLAVKLTNYEYCRTQTEYDESLTIKNYVFQFVNYYSSLFYIAFLKGKFVGYPAKYNRVLGFRQEECNPGGCLMELCMQLVIIMAGKQAVNAIVEMLIPYLMRTFKELSYRHGWYKSHQDQRLVPYNQFTEDYNLLPAENNSLYVEYLEMVVQFGFITLFSLAFPLAPLLALLNNVIEVRLDAIKMLRFLRRPVGMRARDIGVWHSIMTVVTRIAVASSAMIIAFSTNLIPKIVYAASMGDPELNNYLNFTLAVFNTKDFQVQPLLGGSQHVNETVCRYTEFRNSPEDPHPYKRPMIYWKILTGRLAFIVIYQNIITMLQGILRWAVPDVSGRLLKRIKRENFLLREHIIEYEKQHAMKLVQTELNGQQKSEGELRQRNNETVIRNRDEATSFV

SEQ ID NO: 21859 - DNA, 2430 bp, DROSOPHILA
atgtttatttcatatccataaagttggggaaaagccacctcaacctttctttagttggagttttcttgtaaaaaaaagttatagtattttaacaatttccttaaaaacttaacaatgtcattaagtacgttaaaattatattataataatgagctataaagtcttatagttataggtctggctttccacaaacagcttacaggttttaagtacattgaataacttaaattggtgttttgcaaataattaaatgattttcaatggtaatttcatttttattagtaaacatatattattttgcatttttttttaacatttgtaatctcctaaaaatgttgatgcactttggtgcagctacagttaggatcataagaaatccccatttcgaagtttatgcttcatctgtggaggcgttaagtgatgaaggggaaggggtgggtatctatttggaatgggtagagatgagagtggagctgcgaagagttcgtggaagagtgttgaaagcgaagacaaatagtacacatttaattatgacaaggtgactcggctacgcctctgctcctccacctctgatccccactgcccaccacctggccatccattttccactttgccgggaaatttaactatgaaaattcagacgaaatttgattcggttgcttggccccctgctgacttctgctgccactgacactaatgcctttaatgatccaagttgtcgctcaagttgaaaaccgccattagacttgactccccattgtctttgggaccagttgtcagcactacctatcatgatcagtgaaatacctaggaaacattacatgatttaatcggagaacatgagtttcgaggagtggaaaatgttgattattttataattgtgatttaacatatgccttaaaattaaatagtgggtatgcactgtatgctttttgcttgcagatatttccgaaatatatgtgaatatgtattacaagatgtttatagaatcatcatacattcagttgactacatctatgctgtttgcgttctcgcagatcgtctcgtaatcctgactaagatcccggtgtatgcccaatagcttccggtggaccttgacgaacttgcccacgtatatcgttagcttggcggttagattactcctcaactcttgcacggtgcactgctggtagatgttgccagcggcaattgtgcacggtagtccatcattgcgaccttctagcattttcagcatgccctgcagctttttgatgcacttcttcagagttttcttctgcttggtcaactcgcggtgccgagcatgctgctcctcaacgtagttgatcacctcgttgggaatgttcgggatcgagctctcctccattagcatttcaatttaatagaaaaaaattttgggagtgaatttttaatagttgctcaaatatgataggaaaaacaaaaaaatttattttgaaaattacatataaaaatatgtcatatatactcaagtagttcttgaaagtggttctgtacgtaaaatacccatcataagattgtcaaatctatttgccttgttgggacacctttgaatgtgacctaatgtattcatattttccatcatctctttatgccgcttcacacctccgagttagccacgattatgatttcatctggccaaaacaaagatggcccatgagatcttctgcggatacaatggcaatgctaatcacattaataaattatccgcacctccggttggaaactcgcatctattgattctttgatcgttgtagatgagaatattgttattggctgattcacgactggacatttgcagtggctaaacattaatttttcacgctaccctcccttgatttattcaaattatttttaatggccttttgttgttgactctgtcactgtgctaaatggcagtacaaattccacaagtctattggaatttttactatacagcgactattgtgaattagttggaattggctgacatcagaggagtgggggtggggggtaccacttgtacaaatggttttttaatgcatctatgaatttgttttggttgccaaatcttttgagaaaattccccgaattaccgctgagcagttcagcttagatttatttctaacattttcaatgaaatatagtcttaaatcatttcatagcaacatatcatttctaccacttgattttatttccttaaatgataacaatgtgtatgtgtaagctaaaagtcggcgagtttcaagagttccttgtactttcccagttcctttcaatggaattgaacttcttttatgaaacaagttctcctgccctgcgatttcacataaacggccatacaaaagaccacacgcgttttggatgccatttatgagcatttaatcctttcgggcagcccaacaatagccaacaccacaccaaaaacaactgaaa

SEQ ID NO: 21860 - DNA, 430 bp, DROSOPHILA
cctatcatatttgagcaactattaaaaattcactcccaaaatttttttctattaaattgaaatgctaatggaggagagctcgatcccgaacattcccaacgaggtgatcaactacgttgaggagcagcatgctcggcaccgcgagttgaccaagcagaagaaaactctgaagaagtgcatcaaaaagctgcagggcatgctgaaaatgctagaaggtcgcaatgatggactaccgtgcacaattgccgctggcaacatctaccagcagtgcaccgtgcaagagttgaggagtaatctaaccgccaagctaacgatatacgtgggcaagttcgtcaaggtccaccggaagctattgggcatacaccgggatcttagtcaggattacgagacgatctgcgagaacgcaaacagcatagatgtagtcaactga

SEQ ID NO: 21861 - protein, 120 aa, DROSOPHILA
MEESSIPNIPNEVINYVEEQHARHRELTKQKKTLKKCIKKLQGMLKMLEGRNDGLPCTIAAGNIYQQCTVQELRSNLTAKLTIYVGKFVKVHRKLLGIHRDLSQDYETICENANSIDVVN

SEQ ID NO: 21862 - DNA, 6381 bp, DROSOPHILA
tattttttttggctggcggcggtcacacagcattaaacgtggcggcgatttatcatataagttaggttataatatcgtatgcatcaaaatcatacaattatttataagctagttttttaaggaaaaaacacttaaatttagtgaatttgcagtgcgaaatctttaaaaaaccacagacgaacacttggcacaaacggtaagaacgaaaagcgaccgaaaatcgcatttacataacaattacagtgctttaacaaaatgcctgcctagcctttcctttccaaaaaaaacgcctgaatacttgacgcagctgccattgctcggtgtgcgcgtgtgtttgtgtgtggggtaaaattggctcgattcgttcgaatcgtttcttcgccttttcggatttctcgacaaacagaggtttgtgcaattttcagcgatttttcgtgccactttcggcactctatttccacccatcaaagtggaaaatttcatatttttatacatacatacgaaaaaatgctatgtataacaccacaccaacgatcacgcacaccattgcacagcgctcggcggccattcgcgcacacacacgctctcacgcgcacacacgtacggccaactcatgcactcacacacgccagcagattgcggtgcaaaatacaaaaatcgtgcgaaattcgtaaaattgcgtattagaaatcttggttaatttcgctcctatttctccggcccgaaagcccaagtgtcaaaagtgtacccggcgtgaaagtgcattcgtgaattagtgagtgccccatcgattaaaccgcctggctggccaaacaaaacgaaaagcgtaaaaatacagtgaaatgcgtttgttcccttttctaagaactgagacccaagacatttcttgagacttctttgttgtatcatttttcataaggcacgtcttccattttgtttttttttcttcgttgcctttgccgtggtgaatttcccacacactgccagtgcgattcattcagttcagtcgtgagtactcagccagcaacaacaataaaacattaatcgtttaaagctggaggaaaactcgaaaaagaattgtttgttttttctttcgatggaattaacatttattttgagggcattggtttttggtacgtttgcttttcgctttccattcgcgttcacgtcacacatggcgttgccacatgttttttcacttgttaatgggcaaaatgtctgcgaagtgctgccagtaaagaaaacgggattttcttgataacaaagtgaatttaaacccgttgttcattggcgtttgcacaaaaatttaaatatactcctgtagatgtttacttggcccacatctggctgtaatctgtaataccctggcaaatggcgcgcaaatgtggtgaaccggcgacagctctcttttcaccttggaaatacataagttcgttgttctcattgataggcggcatgtgtgctggtgtgtgagtgaggctggggatttgttacaacaacaacaacaacaaccattccgctcgtgacacagcgaaaagaaaacaatactttcacgtagccgttcaaaaacgagtgaaaggggatgagagtagtgttggggtgtcgaaggaggagcaaacttgtgaacgtgtacaaaaagcagttagacgacaaacacacatacacgtgtacggcggaatctcttcagctgcgtgtgtttgtgtgtatgtgtaccggccggttgcttctgccgcttttttctcttttttttttttgttcctacctgtgcctttcataataactatgcgtgaattttttgtcatctgaccatttctacccattcgcaccaaagatctttacacagcaagaaatattgtctccgaaggaaatgtaaatttaaaaaaatttcaaccatagccctggcctttaattttaataacgtcagtttgcaaataaccaaattaactattccaccttgttttttcctgtgtagcaattcgattaaccggatttcttatattctatgtgtatctttccatgtgcctgcaacaaaaacaaaccgacgacatcgatattgttacgatagaaagttacgtgtgaacgtcgtggcttttgtttaattgttttgaaggaaaaaagaactttggcaacgttgaaaccaacctaagatattgcccaaaaagtaagatattgcccaaaagtaattgcggatttttcatatagtcggcgttgacaaattttttcaacggcttgtaactctgtaattgcattctttctttggtcagttatcagctgttacttttagcttccattagaaaaaaaagtgcgcgaaattttgtttttatttgtttgtttggcgtcaattttaatatggagcccacaaaggagcattttcgtcatatcttactttattatttccgtaaaggaaaaaacgcggagaaggttgctagaaagttacgagagatacgatggtatggtgatgaagccttaaaaggaagacagtgtcaaaattggtttcgcaaattccgttctggagatttttcacttagagatgagccacgttcaggccaaatgaagttgatgatgaccaaatcaaagcattattatttatcgaattagatcgtcatgtaacttgagcgtgagataggagagaagttaaatataccaaaaatcaaccgttcattataaaaagtcttggactggtgaaaaagcttgatatttgggtaccacatgtattgaaagaaattcatttaacacaccgaatcaacgcttgtgataagcaccttaaacgcaatgaattcgatccgtttcacttcaatggctgatatccaccaaaagaaggttatgctgtctgtttggtggtattggaagggtgtcgtatatttttagctgcttccaaggaaccaaacgattaattcggatgttcgccagaaagatggcaaaagattatcgaacaatatatttgattaaagttcattcgaagttttattaaaaatgcatttactttcatttacaaaatccgcaattactttttggacaacccatacataaaatacatacaaacataaatacataaaaaaaaacacaaaaaaaaaataccagcagcagtgtaaaaattgtatattctcccccaaaacaggcaaccaaccgaacacaagttaatttctttgcaccccgtgttaataaaaaagcggcaagattacgtcaattattgagaacctacccggcgccatagctcacaaccacaaccaaaacaacatcatggaggaagacgagaggggcaaactttttgtgggcggtctatcctgggagacgacgcaggagaacctgtcgcgctacttctgccgcttcggggacatcattgactgtgtggtgatgaagaacaacgagagcggcaggtcgcgcggctttggcttcgttaccttcgccgatcccaccaacgtcaaccacgtgctgcagaacggaccgcacacgctcgacggtcgcaccatcgaccccaagccgtgcaatccgcgcactctgcagaaaccgaagaagggcggcggctacaaggtcttcctgggtggcctgccctcgaacgtcaccgagaccgatctgcggaccttctttaaccgctacggcaaggtcaccgaggtggttatcatgtacgaccaggagaagaagaagtcccgcggcttcggctttctctccttcgaggaggagtcctccgttgagcacgtgaccaacgagcggtacatcaatctgaatggcaagcaggtatgtgatcgctggaaagttgtgctatacttacaaaacataattacctatttctgcgaagcatctagtcttgcaaaactataaattgtgaatatggaatattcataatttttttcgatttactaaactttgtttcatataatacaagagtgctatttgtaacaaaacatattggaaataatttttacttaaaaacgctcaaaagaatacactaacaattaattgtacaaagaatataagttaacatttttggcaacagcactaataatcattattatccccaggtcgaaatcaagaaggccgagcctcgtgatggatctggcggccaaaactccaacaacagtaccgtgggaggcgcctatggcaagcttggtaacgagtgcagccactggggaccgcaccatgctcccatcaacatgatgcagggccagaatggccagatgggtggaccgccgctgaatatgcccattggagcgccgaatatgatgcctggctatcagggttggggcacctcgccgcagcagcaacaatacggctacggcaacagtggcccaggatcgtaccagggatggggagctccaccaggaccccagggaccaccaccgcagtggtcgaactacgctggacctcagcagacgcagggctacggcggatacgacatgtataactcgacgtcgaccggagctccttcgggaccatcgggcggcggcagctggaactcgtggaacatgccacctaactctgccggacccactggggcaccaggagccggagcgggcaccgccactgacatgtactcgcgtgctcaagcctgggcgacgggcggtccctcgaccactggaccagtgggcggcatgccccggaccggacccggtaattcggcctccaagtctggctctgagtacgactacggcggctatggatccgggtacgactacgactacagcaactatgtgaagcaggagggcgcctcgaactacggagcagggccgcgatcagcgtacggcaacgacagctccacgcagccaccctatgcaacctcgcaggctgtctaaagagagaaggatcgtgtggaggagaagtaggagtagcggagcagagaggagcggagtagcatgtcgtcctcggcgaatgatgaagaagacagaaaagatggtggtaattgtaagctaaagcgtcgtctgttcgtttttatttcagatcagatcagttgttgaaattaatatttaaaactcttgtacaactattatttaaagcgaaaaaaaatttaacatgagaataactagcgacaagtcagattcatagatatacatgtatgttctatagcagcgagtatgtaattcataggcgaaacatcagcactctcacccatttagacaagagaacattatttctttcatgcgcctcataaacaccacactcaacaagcattctcctgtaccccacactcaccaacaaaccaaccaaccagccaggatcaactaacaagatcttcccaaccaactaaaacccgtagacacttatgatacatggcattaacaagaaacaaaatagaaatgtgaagatataaacgtaatgatttacaaatataaagtttagctaattagacacaagaaggtcaagaatagagcgcgaaataccaacacaaagaacataagaacttataattttatttaaagagtaaacaagtaaagatccccattaattactaaaattagtaaatacaaattcgaaattgtacattttaaagcaaaagcacgtcgttagccgatcaactttcgccaccacccgctttctgaatcaggcgacaaggtttagtaagggtttgaaaaggaatcgagtcgaatcgaatcggtcgattttgagaactttgcttgccttagcttttatgactcattgaccggccgcgcggttcacagatatgggaggttagtagtagttagttttgttttcagacaatggttgaacccaatcggcaaatgttttacttggttttatcggcaataggtcgttggatgggagtggtgtggtggcgaaatagggcggtactgacttgggaaagatacgttacaaaattaaaaatttaccatttaaagtaaacaaaacaaaaactagctaaaagttaaactacatatataaagaaacctaattaataagcgtacgtggtcgtttacatctaagcgaaagttgaacttgaaactagaattatatagtgcgttggatttattatttagttaaagcgaaatgaaagagccaagcagcagcagcatgataatgattgattataatggatatggaaaccaacaaaacacactcttaaccaatatacataaaaactataaacatacttataaacaatatatatatatatatatttaaagcgagtatatatatataaaaggaaacaaaaaaggaaaaaagagtaaaaaaaagagcaaaaggaaacgtaaatttaaagctacagttaatgaaaataatgagtacagagttaaaaaaggggaggcaggaagagagaataggacaagttaaacaagttacaaaatacgatgcttagagttgcgttgcacattttttttaaattttcatcgtttgccaagcagacaacaacatcagcaaaaaaaaccaacaaccagctagaagtgtgca

SEQ ID NO: 21863 - DNA, 2208 bp, DROSOPHILA
gttcagtcgtgagtactcagccagcaacaacaataaaacattaatcgtttaaagctggaggaaaactcgaaaaagaattgtttgttttttctttcgatggaattaacatttattttgagggcattggtttttgaaagttacgtgtgaacgtcgtggcttttgtttaattgttttgaaggaaaaaagaactttggcaacgttgaaaccaacctaagatattgcccaaaaagcaaccaaccgaacacaagttaatttctttgcaccccgtgttaataaaaaagcggcaagattacgtcaattattgagaacctacccggcgccatagctcacaaccacaaccaaaacaacatcatggaggaagacgagaggggcaaactttttgtgggcggtctatcctgggagacgacgcaggagaacctgtcgcgctacttctgccgcttcggggacatcattgactgtgtggtgatgaagaacaacgagagcggcaggtcgcgcggctttggcttcgttaccttcgccgatcccaccaacgtcaaccacgtgctgcagaacggaccgcacacgctcgacggtcgcaccatcgaccccaagccgtgcaatccgcgcactctgcagaaaccgaagaagggcggcggctacaaggtcttcctgggtggcctgccctcgaacgtcaccgagaccgatctgcggaccttctttaaccgctacggcaaggtcaccgaggtggttatcatgtacgaccaggagaagaagaagtcccgcggcttcggctttctctccttcgaggaggagtcctccgttgagcacgtgaccaacgagcggtacatcaatctgaatggcaagcaggtcgaaatcaagaaggccgagcctcgtgatggatctggcggccaaaactccaacaacagtaccgtgggaggcgcctatggcaagcttggtaacgagtgcagccactggggaccgcaccatgctcccatcaacatgatgcagggccagaatggccagatgggtggaccgccgctgaatatgcccattggagcgccgaatatgatgcctggctatcagggttggggcacctcgccgcagcagcaacaatacggctacggcaacagtggcccaggatcgtaccagggatggggagctccaccaggaccccagggaccaccaccgcagtggtcgaactacgctggacctcagcagacgcagggctacggcggatacgacatgtataactcgacgtcgaccggagctccttcgggaccatcgggcggcggcagctggaactcgtggaacatgccacctaactctgccggacccactggggcaccaggagccggagcgggcaccgccactgacatgtactcgcgtgctcaagcctgggcgacgggcggtccctcgaccactggaccagtgggcggcatgccccggaccggacccggtaattcggcctccaagtctggctctgagtacgactacggcggctatggatccgggtacgactacgactacagcaactatgtgaagcaggagggcgcctcgaactacggagcagggccgcgatcagcgtacggcaacgacagctccacgcagccaccctatgcaacctcgcaggctgtctaaagagagaaggatcgtgtggaggagaagtaggagtagcggagcagagaggagcggagtagcatgtcgtcctcggcgaatgatgaagaagacagaaaagatggtggtaattgtaagctaaagcgtcgtctgttcgtttttatttcagatcagatcagttgttgaaattaatatttaaaactcttgtacaactattatttaaagcgaaaaaaaatttaacatgagaataactagcgacaagtcagattcatagatatacatgtatgttctatagcagcgagtatgtaattcataggcgaaacatcagcactctcacccatttagacaagagaacattatttctttcatgcgcctcataaacaccacactcaacaagcattctcctgtaccccacactcaccaacaaaccaaccaaccagccaggatcaactaacaagatcttcccaaccaactaaaacccgtagacacttatgatacatggcattaacaagaaacaaaatagaaatgtgaagatataaacgtaatgatttacaaatataaagtttagctaattagacacaagaaggtcaagaatagagcgcgaaataccaacac

SEQ ID NO: 21864 - protein, 421 aa, DROSOPHILA
MEEDERGKLFVGGLSWETTQENLSRYFCRFGDIIDCVVMKNNESGRSRGFGFVTFADPTNVNHVLQNGPHTLDGRTIDPKPCNPRTLQKPKKGGGYKVFLGGLPSNVTETDLRTFFNRYGKVTEVVIMYDQEKKKSRGFGFLSFEEESSVEHVTNERYINLNGKQVEIKKAEPRDGSGGQNSNNSTVGGAYGKLGNECSHWGPHHAPINMMQGQNGQMGGPPLNMPIGAPNMMPGYQGWGTSPQQQQYGYGNSGPGSYQGWGAPPGPQGPPPQWSNYAGPQQTQGYGGYDMYNSTSTGAPSGPSGGGSWNSWNMPPNSAGPTGAPGAGAGTATDMYSRAQAWATGGPSTTGPVGGMPRTGPGNSASKSGSEYDYGGYGSGYDYDYSNYVKQEGASNYGAGPRSAYGNDSSTQPPYATSQAV

SEQ ID NO: 21865 - DNA, 3340 bp, DROSOPHILA
aatgtactctaaagttcgacttaagataatactcaaaagatttttctttataatatcaaaatataatatcaagagttataaaactattttttgtttttatttatttcattcgtaaaagtgattgcaataagcattacactatcagcttcgctcactattagcagctaatctttgaattagattcgtcttaaatttagtcgaagctcatgaccttggaagcaatttgcaatatcagatacatttgcgcctaagtatccacattgtgtttatgctatttaaaaggcgcgccatgacaacaagagtgaaagtaaattaaatcaatttagttaaatgaaagccagccggcatgtatttgctagtgagggaggtaaatatgtacatatatatataggcatacatatgtactatttataagtggaaaacaaaaatcagctgcttgcagttcgagcccccaactagggagactagtttccatgcccgtccacgtcgcctggttgctattattcagtcaagagcgagtcgagtcgtcgagcggatctggacaccagtcagccagaaatacattttcgcgaatagaaaagtgtaggaaaaatcagtgaaaatatgtcaattttctccaaatcactgctctttcgtgggggtaagactgtatagcgtatatatgaagctcttgtcatgccatatggttatttctaaatgacttttcaaataacaaatatttataattatattttctttaatttgaaaaaaaaataacgctttatagataagaaaataggaaatatatctactctatgtgtatgaaacatgtgcatttctatttctgaacaccttgaaatttttaaatatttacataatttaaagtaacaagtaacgtgaaaaaatttgacaaattctctttaaatacatataaatatgtgtcttaattatactacaaaatcttttaaatagccaaataaattgctagaataagactatatattttcgtactcattcgcagtgggaggacgccactatagcgcagcggctcaggctcagctgagggagatcctgggcacccagctggccgggattaaggatgcaggcacctttaaagcagagcgaatcatcacatcttcgcagagcactcagataaccgtgcaaggtagcgataaaaagatactcaacttttgcgccaacaactacttaggactggcggtaagtgaacttgttgcgatcccagtgatgtccacctacaagctttctctaacaccaccagaacaatccggagatcgtggagcacagccagaagctgttggagcagtatggcgctggtctgagctcagtgcggttcatttgcggcacgcaggatatacacaagcagctggaaaagaagatagcccagttccatgggcgcgaggataccattctgtacgcctcctgtttcgacgccaatgccggtatctttgaggccatcctcacaccggaggatgcggtcttctccgatgaactaaatcacgcatccatcattgacggcatccgtctgtgcaaggcgaagaaacagcgctataggcaccgggacctgggcgacttggaggagcagctaaaggccagcgatgctcgcctcaagctgatcgccaccgatggtgttttttccatggatggcaacatcgcaccactggcccgaatcgttgaactggctaggaaatacaatgccctggtgtttgtggacgagtgtcatgctacgggcttttttggcgccactggacgtggcaccgaggagtatgacaatgtcatgggtgaggtggacatcataaactccacactgggcaaggctttgggtggtgcttccggtggatacaccactggacccgccgagctaatctcgttcctgcgccagaaatcccggccgtatctcttctccaacactctgccgccagctgttgtggccgttggtctgaaggtaatggacatgctcctccaatccagcgagctcacccagcgcgtccagagcaacacgcaacgctttaggcaggccatgacaaaggctggattcaccatagccggcgagaaccatcccatctgccccgttatgctaggtgacgctcgtcttgcctcccagtttgccgatgagatgctaagttagttgaaatcttaatcatccctttatctacatatatatttaactaatattaaatttcagcccgtggcatctatgtcatcggatttagctatccggtggttcctcagggaaaggcacgcatccgtgttcaaatctccgctgcccacacggaagccgaaatcgatcgggcaattaatgcattcattgaagtcggtcgctctctgaaagtaatcaagtgaaaaatggaaatcaaatggagtccagtattttgaatattgcatttatattaaacgaaactgcatttatctacaaacgttgtagtagtacttattcatcatgagttttccaatccccaaaaacaaattaactcagaggtgtttttgtgtttacggagttgctttatttggtttataatattaactaaaaatcatttactaagtaaataatagacagttgcagctggatttaactcaagcttggattgcacttaatcgaacacaaaacgtacgtatgtttgcatttaaatcaataacaataattcgagtcgagtaacaaataaacataaaaataattaaggaagcgtgttggggtcgactggccaagtcactcaaggcatatggcattaactaaagtggaattaataaaaaatctttataattctagggccagtgcatgagatgacttaaaacaaaaggaaacttttacaaagcgtgaaatgtgagtagattgggctaaaagtaccgaggtgtacatattgcgatgactatgaaatactttggttagtgttgtgtttgcacgacaatggttagatgcaattcaattcgattaaaatcgtttgtgattatttgttgaccaggccgcgagctttgggatacgccgaagctggcttctttgccggcagacggcccgtgggcggacggcggttcgagtccagatttgaggcggcacttggcagcccccggcttgacttaatgttgcgaacattgggtatggagctgcccacagcgacgccagcacctggtccagctcctccattggcattcgcgttgataatgttctctagacggctgcgcagtgagtttgtgtgcgagtccacgatgtctatatcatctccgcccgtttgcatggcttgagcgagcaccgcctgcagcgaggcggacaccttaggcgtacggtactcctgggtggtgcgacacggcatctccagctcgtagttcacgatgttctcgctcttgaagc

SEQ ID NO: 21866 - DNA, 1217 bp, DROSOPHILA
tgggaggacgccactatagcgcagcggctcaggctcagctgagggagatcctgggcacccagctggccgggattaaggatgcaggcacctttaaagcagagcgaatcatcacatcttcgcagagcactcagataaccgtgcaaggtagcgataaaaagatactcaacttttgcgccaacaactacttaggactggcgaacaatccggagatcgtggagcacagccagaagctgttggagcagtatggcgctggtctgagctcagtgcggttcatttgcggcacgcaggatatacacaagcagctggaaaagaagatagcccagttccatgggcgcgaggataccattctgtacgcctcctgtttcgacgccaatgccggtatctttgaggccatcctcacaccggaggatgcggtcttctccgatgaactaaatcacgcatccatcattgacggcatccgtctgtgcaaggcgaagaaacagcgctataggcaccgggacctgggcgacttggaggagcagctaaaggccagcgatgctcgcctcaagctgatcgccaccgatggtgttttttccatggatggcaacatcgcaccactggcccgaatcgttgaactggctaggaaatacaatgccctggtgtttgtggacgagtgtcatgctacgggcttttttggcgccactggacgtggcaccgaggagtatgacaatgtcatgggtgaggtggacatcataaactccacactgggcaaggctttgggtggtgcttccggtggatacaccactggacccgccgagctaatctcgttcctgcgccagaaatcccggccgtatctcttctccaacactctgccgccagctgttgtggccgttggtctgaaggtaatggacatgctcctccaatccagcgagctcacccagcgcgtccagagcaacacgcaacgctttaggcaggccatgacaaaggctggattcaccatagccggcgagaaccatcccatctgccccgttatgctaggtgacgctcgtcttgcctcccagtttgccgatgagatgctaacccgtggcatctatgtcatcggatttagctatccggtggttcctcagggaaaggcacgcatccgtgttcaaatctccgctgcccacacggaagccgaaatcgatcgggcaattaatgcattcattgaagtcggtcgctctctgaaagtaatcaagtga

SEQ ID NO: 21867 - protein, 404 aa, DROSOPHILA
GGRHYSAAAQAQLREILGTQLAGIKDAGTFKAERIITSSQSTQITVQGSDKKILNFCANNYLGLANNPEIVEHSQKLLEQYGAGLSSVRFICGTQDIHKQLEKKIAQFHGREDTILYASCFDANAGIFEAILTPEDAVFSDELNHASIIDGIRLCKAKKQRYRHRDLGDLEEQLKASDARLKLIATDGVFSMDGNIAPLARIVELARKYNALVFVDECHATGFFGATGRGTEEYDNVMGEVDIINSTLGKALGGASGGYTTGPAELISFLRQKSRPYLFSNTLPPAVVAVGLKVMDMLLQSSELTQRVQSNTQRFRQAMTKAGFTIAGENHPICPVMLGDARLASQFADEMLTRGIYVIGFSYPVVPQGKARIRVQISAAHTEAEIDRAINAFIEVGRSLKVIK

SEQ ID NO: 21868 - DNA, 6438 bp, DROSOPHILA
atatacatatatattcaatatatgcaattcatttagaacggctatcccaatttgttagccagtgtaaattggccaaaatacttatagaatcgacttttacgcatcagccgttcgctgtttttttccagtcaaaaacaagtcgtattgaacacctcatttccatgtatcatatatgtaattataaattattaagcaaacatttgtacaattattcacgataatggccattttcaaagttgtcaaggctattctacccattatcttcaatttgcggggaatgaattcgatcaaagagagctgcagaaatccaaaaagccaattttaagttctgctccccaaagctccacattgcactttctttaaagttgggaaaagctttcgcaactaaacattaaacaatatacatttggaataccaaaataccctatagatacgcacattttgtaaaataaacgaatagattgatcttgttttttttttaagaattaggaataagatatttttgtatctaatctaaaagatggtcatttctgaaatttcctatcctttagatgagtattgctgcatcaagaacaaagtatcttgtcatcttaagagcaatagcccctgatataaacactcattgctgctgccgcggaaaagtgtaaaagttcaatataaatggagaaagtgcgtcgtatataaatcgtacatatagaaccgatctcctacgcatccgtcatatgatttttctctgttccggaattgtctgtagtctcattagatcacttggtagtaaaaacatgccattttgaacttgacatttccacgttcacgtatctcatacttatatgcagaatgcagtatgctaggaggcatagtttgcatgtagagaaaaccaatgccaaaatattaaaatcaacgtcaaaaatatttaatttaatttgcacacacgctctttacgttctctattacataccgatatacaaacattttgctataaaatattagatgaatatcatacgaaatgtgatagaacttggttaaaaatgtttatttgccaaaacaagttggaactctatggatgccattgatatatccattaagtttgggttaatcccatattatgtatgtacaaatcggtttcaaaactgacaaataagcgtattttgatcgaaacgaatggctaaaattgaaatacaatacttctagttaagtatgccacaacacgaattaaaaatgcccattagttcactaacacatttccagtctactacttaagattatgtacgagttcacgcgaatacacaagtatttaaccattgacatgtagcccatgatcccaggattgcagcatcatctactgcagcaccacaccctgggcatgttgcagacccgtgcacaagtacagcatgatgatgctgagcgcctggacacgctcatccgatctgtccgatttccagggcgaggattcggtggccttctccgcatcgttcatcagcgtatagccctcggtctccgcatccagggctactttcagtttcgttaactaaacattgataggatcattatacatatatatatatatacatatatctatccagaagccatgcagacttaccaactcgtttatcttggccacacgctcatcgggcggcagggcagcgtataggagtttgctggtgctcttggccagattcatcagatcctcgttgcgggtgtgacgaatgatgggctccgtgatgacgatcacctgctcgaagctgagctccggacagtccaagggcagggcctccaggtgctgggtgacgctctcgaaaggattctgctgcagagcaggagtcgcctcttccacaatcgacgattttctgtcagtattcaaatatggtataaaaaaggcacccatattaattggttctgcatgcgaacttaccgcgatggcgtgtgctgtggactgggaggcaggctcttggagttcacctgctgaccactgccagttagcgaggatacgatgccgggaatgtccaagttgctcgcctgccgcttgatgccctgggccagcatcccggtgaggctggatcgatggacatccaagccagaggccgttggcgattgaatttgcccctgatctccgccagatgcagcagacgtctcatcaaacggagtcgcacccgtgctggaatcaacgatctgtggattgtcggcctgtgtgatggtgaactccggtcggctggccattgaaggagtggaggaggttgccggtatggagccggtacagtcaaccggaccgcagacggtggccatctggcacttgactatgcactttttgtggcagcacatggagcactcctggcactgcatggcgtccttcaaccaaattttcttgccgcagaagtcgcactgtgttgcccgatggaagtgggtcctcacaaagtcgtgtgcccttggagcggcagtggtgccactagaggattcgccagatgtggagctgtctgccatagagctcgtcagcttgaggaactgcgactgatcttctgaagctactcggtcgccagctaagggatttctgttgggagcataagaattagtttagtcttttaatccgtaacttgaagcttacctggccggagactgggacttggatgtgcttttgatgggaacatcacccaccgtcaaattgggattgcccatccaggagaagccaaacagaatgtcgccaaagcagaggttcggattgaagccggactgattggacagcggatgcgtctttctggggatcagtaaatatatatcaaaacaattgtgcattctggagtttccactggtggttactggccaacttacacagcctgcagtgatgccggattgagactgatctgcttgaggcactggttcaaactggtttcggagcactcgacgagaatctgaccgatctggacattgttataacccagaagcacactctcgccggcggatttgccaaagacgcagacgttgaggaagcgactggaattgtccaactggaagctgcacacgtcttccatgtggataagtggactaaatggacagtcgatggtggagtgctgatagaagtagttgaccggctcctccacctcctccttgcctttgtccttatccttgtccttatccttgtccttatctttgtccttgtctttatctttatctttgtccttatccttatccttgtcccgatccttatccccactctctcgactcattgtcttcttgatagccttggcaatgaggttggacttcttgggggaattggttggtgttccgctcaaactgggcttcaccaccaggtgcttgggtgtcggatcagcggttgcagcctcatccgtttccaacttcggttggcagggatacgaacttggcaaatcgccgatatcctcgtacttttcgaagtcctccagtatggcatcgttgcgaataattccaggaataatgcgctcaatgcgcagactaaagacagtggcctgcagcgtcttgaccaccttggcgatctgctgaatggtggtcaccggcctgccttcgatggccaccagaacgtcgccggccagcaggttggacttgcaggccggtgtattcgggagcacggactcgattcgcaccacctggctgccgctctgcttgaagacgattccaatctgctggttcttcgccttgtgaatgaacacgtccaacgagatgagcacattccggctatcccgctgactggcctcgataaacggcaccggcgccagcgtgatggtgcagtacgtctcactggcgcccggatagcccatcaaccgggacagctccgccagcttgacggtgagcaggccattcggttgaatgtcacagtcgctcgcgtcctcctccgccgtccagtggaagaagggcttgtagcgcagcttgtagttgggcaacgtgtgtttccggcgaaccgcctttcggatctggtttgagatcaggttggttatgttcgactgcatctggcggccctggtacttcgactcgatgtccaggatcagctccggatcgcccaggaaactaattgaccagtgcgtgtagggctttctcgtgaactgcaggcgcgccattcccgaaagctgtttgactgcaataaaagatgtaaatttaaatagtagggataagtaaaatatatatgtacatatatataagaacatcattaaatatttaaatatttttaaatacagaaaaaacccatgaatttgtttcatttccaatggctttttcagattcgtgcaaggctggtggtaggaacaattaaaacccattccctgtcgccaactcactcacccctaagcgttatcgatcccttcttgcccagcaccatgtccgcgtcaatggaagttgtgaaattgccaacgtagttgatgtccagcagaaggtcgagattctcgatgcgctgctcatccttgtccaattccacgttgtgcaccgatagcgacttgacgtccggaaactggtcgcccaactcgagctctttaatctaaaataaaatagatgatttgttagtacaccaattaactttgaaactaataaaagagtataatatcactctaacccttttattttaatcaaaacaaaaaaaaatctacttctcaccgttagcttgtccagcagttttccggtggtagtcttggaaatcagttcgtccagctcgatggacagcttgcgatagaaccatttccgcacccgattggagttcttgaactcgtggaagagaaactgcatgacaaagttgagggagaccagggcggaggcccgtcggaggctctcctgatggttctcgcatccattcccagcgccaccacccagtccggaattggatagcctcttcaggttcctggccgtctgcttgatgttctgcgattgtggtgaaaccaagttggaaattgtcaattgaacaagggaatttactccagctacttaccaatggcagggtgtatttggcattcgcctgcttctgctcctcgctttcgtcgggcagattcgagaacttgatgaagatgagatactgcagcaggatcatcaccactccgccgatcaacagaaagatcaggcagagcagcagaatgtttgaaatgggtatctccatgctggcgatgccttaaattcccaatctcactcgaaaatactgtctattcctccggatcgtatttgctggaggagctgcgaggctacgatgggaccagctgcggagtccaaagctccactggtcacagtatatctgatgtcagtcttttcaattacgttctggatgtgctcgcattgtatcaccctcggccagtagttcgttcgccgttcacacggagtttggatgcatccgaatcggagctcttgacccatccatttggctgataccctagccgatttcgccaatttgaggctgttcccagctatcggtagctgtaatcttacaattgttacaactgatgaataggcgacataaaatcaatatgtatatccgcagcactggcagcgcctttttttttttgtgccgtggccacttcgcagtgcgcctgcgcccggatcagctggcaaccttcctgggggttgattcgcagccaatgcaatccggagaccagtcatcagccggaccacttggaacagctgttcggaacggtgcacccgggtgcaccctaggaattcctgatggcaggaagtttcaattgctttgagctagataatttcgagaggcggtgcaggctcttcaaatccttaaggatgctgggatcctttggtgggctttccatgggctcattcatttgttccatttataaactaaaatagttgggcatatattgaaaaggtataaaaatctactcaatgcgcaagtaaaaaacacaagatgtgcaatttttgtgttatttttttgacatttattttcttcttgttttttttttgtttttattatggtattcctttacattatgtaaaataagaaagtattaatagttttattaacaaatttgttgaaggcaggtatttatgttattatatgtttatgtatgtatatcttgtatataaattacgagtcatctttataattacataattattaaatgtagtttaattatctctagcgtatcttagtaattaatttaactgctttattcacttagtatattaaattaagatatttatatttatatttatggtttctctcatatatttatgtatatgtattatcattacaatttagccgtaacagttacattcttctaattttaaactaatttcattattattaattttgtttcctttcctattcgcgtatcatcccctctcacatcctatattttatatttcttgttgctttgtaaaaaaaagtcagatctacttacatatatgtatttcctttttatttttgcttgtttccgttcttattttttgttaagttttcttctttattgtttttttttttttttt

SEQ ID NO: 21869 - DNA, 3787 bp, DROSOPHILA
ttgtaacaattgtaagattacagctaccgatagctgggaacagcctcaaattggcgaaatcggctagggtatcagccaaatggatgggtcaagagctccgattcggatgcatccaaactccgtgtgaacggcgaacgaactactggccgagggtgatacaatgcgagcacatccagaacgtaattgaaaagactgacatcagatatactgtgaccagtggagctttggactccgcagctggtcccatcgtagcctcgcagctcctccagcaaatacgatccggaggaatagacagtattttcgagtgagattgggaatttaaggcatcgccagcatggagatacccatttcaaacattctgctgctctgcctgatctttctgttgatcggcggagtggtgatgatcctgctgcagtatctcatcttcatcaagttctcgaatctgcccgacgaaagcgaggagcagaagcaggcgaatgccaaatacaccctgccattgaacatcaagcagacggccaggaacctgaagaggctatccaattccggactgggtggtggcgctgggaatggatgcgagaaccatcaggagagcctccgacgggcctccgccctggtctccctcaactttgtcatgcagtttctcttccacgagttcaagaactccaatcgggtgcggaaatggttctatcgcaagctgtccatcgagctggacgaactgatttccaagactaccaccggaaaactgctggacaagctaacgattaaagagctcgagttgggcgaccagtttccggacgtcaagtcgctatcggtgcacaacgtggaattggacaaggatgagcagcgcatcgagaatctcgaccttctgctggacatcaactacgttggcaatttcacaacttccattgacgcggacatggtgctgggcaagaagggatcgataacgcttagggtcaaacagctttcgggaatggcgcgcctgcagttcacgagaaagccctacacgcactggtcaattagtttcctgggcgatccggagctgatcctggacatcgagtcgaagtaccagggccgccagatgcagtcgaacataaccaacctgatctcaaaccagatccgaaaggcggttcgccggaaacacacgttgcccaactacaagctgcgctacaagcccttcttccactggacggcggaggaggacgcgagcgactgtgacattcaaccgaatggcctgctcaccgtcaagctggcggagctgtcccggttgatgggctatccgggcgccagtgagacgtactgcaccatcacgctggcgccggtgccgtttatcgaggccagtcagcgggatagccggaatgtgctcatctcgttggacgtgttcattcacaaggcgaagaaccagcagattggaatcgtcttcaagcagagcggcagccaggtggtgcgaatcgagtccgtgctcccgaatacaccggcctgcaagtccaacctgctggccggcgacgttctggtggccatcgaaggcaggccggtgaccaccattcagcagatcgccaaggtggtcaagacgctgcaggccactgtctttagtctgcgcattgagcgcattattcctggaattattcgcaacgatgccatactggaggacttcgaaaagtacgaggatatcggcgatttgccaagttcgtatccctgccaaccgaagttggaaacggatgaggctgcaaccgctgatccgacacccaagcacctggtggtgaagcccagtttgagcggaacaccaaccaattcccccaagaagtccaacctcattgccaaggctatcaagaagacaatgagtcgagagagtggggataaggatcgggacaaggataaggataaggacaaagataaagataaagacaaggacaaagataaggacaaggataaggacaaggataaggacaaaggcaaggaggaggtggaggagccggtcaactacttctatcagcactccaccatcgactgtccatttagtccacttatccacatggaagacgtgtgcagcttccagttggacaattccagtcgcttcctcaacgtctgcgtctttggcaaatccgccggcgagagtgtgcttctgggttataacaatgtccagatcggtcagattctcgtcgagtgctccgaaaccagtttgaaccagtgcctcaagcagatcagtctcaatccggcatcactgcaggctgtaaagacgcatccgctgtccaatcagtccggcttcaatccgaacctctgctttggcgacattctgtttggcttctcctggatgggcaatcccaatttgacggtgggtgatgttcccatcaaaagcacatccaagtcccagtctccggccagaaatcccttagctggcgaccgagtagcttcagaagatcagtcgcagttcctcaagctgacgagctctatggcagacagctccacatctggcgaatcctctagtggcaccactgccgctccaagggcacacgactttgtgaggacccacttccatcgggcaacacagtgcgacttctgcggcaagaaaatttggttgaaggacgccatgcagtgccaggagtgctccatgtgctgccacaaaaagtgcatagtcaagtgccagatggccaccgtctgcggtccggttgactgtaccggctccataccggcaacctcctccactccttcaatggccagccgaccggagttcaccatcacacaggccgacaatccacagatcgttgattccagcacgggtgcgactccgtttgatgagacgtctgctgcatctggcggagatcaggggcaaattcaatcgccaacggcctctggcttggatgtccatcgatccagcctcaccgggatgctggcccagggcatcaagcggcaggcgagcaacttggacattcccggcatcgtatcctcgctaactggcagtggtcagcaggtgaactccaagagcctgcctcccagtccacagcacacgccatcgcgaaaatcgtcgattgtggaagaggcgactcctgctctgcagcagaatcctttcgagagcgtcacccagcacctggaggccctgcccttggactgtccggagctcagcttcgagcaggtgatcgtcatcacggagcccatcattcgtcacacccgcaacgaggatctgatgaatctggccaagagcaccagcaaactcctatacgctgccctgccgcccgatgagcgtgtggccaagataaacgagttgttaacgaaactgaaagtagccctggatgcggagaccgagggctatacgctgatgaacgatgcggagaaggccaccgaatcctcgccctggaaatcggacagatcggatgagcgtgtccaggcgctcagcatcatcatgctgtacttgtgcacgggtctgcaacatgcccagggtgtggtgctgcagtagatgatgctgcaatcctgggatcatgggctacatgtcaatggttaaatacttgtgtattcgcgtgaactcgtacataatcttaagtagtagactggaaatgtgttagtgaactaatgggcatttttaattcgtgttgtggcatacttaactagaagtattgtatttcaattttagccattcgtttcgatcaaaatacgcttatttgtcagttttgaaaccgatttgtacatacataatatgggattaacccaaacttaatggatatatcaatggcatccatagagttccaacttgttttggcaaataaacatttttaaccaagttctatcacatttcgta

SEQ ID NO: 21870 - protein, 1037 aa, DROSOPHILA
MEIPISNILLLCLIFLLIGGVVMILLQYLIFIKFSNLPDESEEQKQANAKYTLPLNIKQTARNLKRLSNSGLGGGAGNGCENHQESLRRASALVSLNFVMQFLFHEFKNSNRVRKWFYRKLSIELDELISKTTTGKLLDKLTIKELELGDQFPDVKSLSVHNVELDKDEQRIENLDLLLDINYVGNFTTSIDADMVLGKKGSITLRVKQLSGMARLQFTRKPYTHWSISFLGDPELILDIESKYQGRQMQSNITNLISNQIRKAVRRKHTLPNYKLRYKPFFHWTAEEDASDCDIQPNGLLTVKLAELSRLMGYPGASETYCTITLAPVPFIEASQRDSRNVLISLDVFIHKAKNQQIGIVFKQSGSQVVRIESVLPNTPACKSNLLAGDVLVAIEGRPVTTIQQIAKVVKTLQATVFSLRIERIIPGIIRNDAILEDFEKYEDIGDLPSSYPCQPKLETDEAATADPTPKHLVVKPSLSGTPTNSPKKSNLIAKAIKKTMSRESGDKDRDKDKDKDKDKDKDKDKDKDKDKDKDKDKGKEEVEEPVNYFYQHSTIDCPFSPLIHMEDVCSFQLDNSSRFLNVCVFGKSAGESVLLGYNNVQIGQILVECSETSLNQCLKQISLNPASLQAVKTHPLSNQSGFNPNLCFGDILFGFSWMGNPNLTVGDVPIKSTSKSQSPARNPLAGDRVASEDQSQFLKLTSSMADSSTSGESSSGTTAAPRAHDFVRTHFHRATQCDFCGKKIWLKDAMQCQECSMCCHKKCIVKCQMATVCGPVDCTGSIPATSSTPSMASRPEFTITQADNPQIVDSSTGATPFDETSAASGGDQGQIQSPTASGLDVHRSSLTGMLAQGIKRQASNLDIPGIVSSLTGSGQQVNSKSLPPSPQHTPSRKSSIVEEATPALQQNPFESVTQHLEALPLDCPELSFEQVIVITEPIIRHTRNEDLMNLAKSTSKLLYAALPPDERVAKINELLTKLKVALDAETEGYTLMNDAEKATESSPWKSDRSDERVQALSIIMLYLCTGLQHAQGVVLQ

SEQ ID NO: 21871 - DNA, 5356 bp, DROSOPHILA
ggcctccaaggcttcagattacacaatgcttagccactttggtgctggtactcgcactcgcactcgtaaatcccaatgaatccaacgtcgcctcttggcgtgccaaagtggcatttgatttatttagcatatttatttgtttattttatcgcagtctttctctttttacaacaaaatggaaaacattgtttatggacgccagataatcgcgctcgctccgaaaaagagactgtgcgccggcgcgcagcatttgggcgggactctttgaatatttatggcacgttgtctaactggagggcagtagcagtcgcagtggctgtatatataatagtagcatcatgttggagctggccatttttttatgccgggcacgtggtgggcgagcgatcgtccagccagattgcccaatggcttaattaagccggtcgcgaactctgccggcatgcggaacttgtaccggcttaaactatcaatcatggatttgcatcgcctgggatgggaggaggaagctgggaaggtagcgattgggaggtttaggaactgaggcgtgccaaagctcaaggacacgcagcccgttcaaatccgcttagtgtaataacgtgtttcgccgtttccttttgccaagaggtcgtctttatcgcctgagcctgcgggcctgtgaatgtgtcaacagttaaatcgatatgtttttcccctgttgatatagttaactcgcatttctgcttctactgcctactgctcttttccccattgctgccttgattatgtggcgcacaaaagttgactggcctggcccgcatcctggcctcaaatgtccttgggctgaacaattaaaattaaaagaaaaaaagaatgagataaactacataaaaggctgaccgctctctcggtaattgagaaaacccagtgagaagtgtgttaactgacagtttgttttttttgcattccacagccagccaagattggccagatctggacgggattcggacgtgccgcagccatgataggacgtttgtttcgcgcccacggcgagttctgcgcctcgcatccctgggaggtcatcgtggccctgctgaccattacggcatgcatgctcacggtggacaagaacaataccctggatgcgagcagcggattgggcacagccaccgcctcagctgccgccgccggaggatccggatctggagctggatctggagcaagtggaacaataccaccatcgtctatgggtggctcggccacctccagccggcacaggccctgtcacggttggagccaatcctgtgatggcctagaggccgaatacaatgcagccgacgtaatcctgatgaccatcgtccgctgcactgccgtactgtactgctactaccagttctgcagcctccaccgcctgggatccaaatatgtgctgggtgagtactgtgtgaattacatcactcggggggcccacgattcgttttggggggcacgtgtgttgaccaaagtggttagaacaccatcggcattgtttgttccctccccgaactattttgatggacccccctccccaaaaaaaaaatagctgggaaaaacgcaaaccaaccaaacaagactggaatgtttggccaagattttagaggtgggacagccagcaggtagcaacctgaaggtggccaaacggagctccctggcatttctcacgtgcgctctaaacgattcgacctccgtccactgatgtgactcccacttatctcgtcgtctctttcaggcattgccggcctcttcacggtcttctccagcttcatcttcacgacggccatcatcaagttcctgggcagcgacatctccgaactgaagtgagtaaaaatttgaaatattggtcattagtttttaaatccctgacgtaaaatcagtagcttataaaagtaagctaaatatgctaattaaatgtacaattaaacacactttcaaccaactctcagggacgccctgttcttcctgctgctggtcattgatctgtccaactctggccgcctggcgcagctggcgctatcgggcagtaaccaagcggaggtgacgcagaacattgcaaggggactggagctcctgggaccagccatctccctggacacaattgtggaggtgctgctggtgggcgttggcacactgtcgggtgtacagcgtctggaggtactgtgcatgtttgccgtgctctcggtgctggttaactatgtggtctttatgaccttttatcccgcctgcctttcgctaatcttcgatctatcacgctccggcgttgatatgtctgtggtgcgtgaaaaagcgaagggctcgctgctcctcaagtcgctaacagaggaggagcagaaggccaatccagtgctgcagcgtgttaagcttatcatgaccacaggcctgatggcggtgcacatttatagccgggtggctttctccggcagcgactacgatgccgtggacaagacgctgacgcccacgctaagcctgaatgtgagcaataatcgcacggaatcgggtgaaatcgccgacattatcatcaagtgagtttgaaggtcttgagtacccatttgattggccaaacataacataaatatatttttccagatggctgaccatgagtgccgatcacatagtaatctcaattgttctcatcgccttggtagttaaatttatttgctttgacaatcgtgatcctctgccggatcagttgcgtcaatcaggtccagttgccatcgccgccaaggcttcacaaaccacaccaattgatgaagagcacgttgaacaggaaaaggatacagaaaattcagctgcagtccgcacactattatttaccattgaagatcagagttcagcaaatgcttcaactcagacggatctgctgccactgcgccaccgactggtgggtcccataaagcctccacgcccagttcaggaatgccttgacatccttaactccactgaagagggcagtggaccagcggccttgagtgacgaggagattgtgtctattgtccatgccggtggcactcactgcccactccacaaaatagaatctgtactagatgatcccgagaggggagtgcgaatccgccgacagatcattggcagtcgtgccaagatgccggttggtcgactggatgtcttgccttatgaacactttgactaccgcaaagtgctgaacgcctgctgtgagaacgttctgggctacgttcccattcccgttggctacgcaggacccctgctgttagacggagagacctactacgtgcccatggcaaccaccgagggtgctttggttgcatccacgaatcgtggctgcaaagcgctctccgttcgtggtgttagatctgtcgtggaggacgtgggcatgacccgtgctccgtgtgtaagattccccagcgttgcccgcgcggccgaagcaaaatcttggatcgaaaacgacgaaaactaccgggtggtgaaaactgaattcgattctacatcgcgctttggccgtctcaaggactgccacattgccatggatggaccacagctgtatattcgttttgtggccattaccggcgacgccatgggcatgaacatggtgtccaagggcgctgagatggccctgcgccgaattcagcttcagtttcccgacatgcagatcatctcgctgagtggaaacttctgctgcgacaagaaaccggcggccatcaactggattaagggacgtggcaagcgggtggtcaccgagtgtaccatttcggcagccacactgcgttccgtgctgaagacagatgccaagacactggtcgaatgtaacaagctgaagaatatgggaggcagcgcgatggccggtagcattggtggcaacaatgctcatgccgccaatatggtgactgccgtctttttggccacggggcaggatcccgcccagaatgtcacctcgagtaattgctccactgccatggagtgctgggcggagaacagcgaggatctttacatgacctgcacaatgccttcgctggaggtgggaactgtgggcggcggaaccgggttgcccggccagagcgcatgcctggaaatgctcggagtccgcggagctcacgccacgcggccaggagacaacgccaagaagctggcacagatcgtctgcgccacggttatggccggcgaattgagcctgatggcggcgttggtcaatagcgatctagtcaagagtcatatgcggcacaatcggtaagttttacatctactacatgttattgatgacggtgaaattctaacttgtgatccttttcttgcagatcctccatcgcagtgaacagcgccaacaatcctctcaacgtgaccgtgtccagctgcagcaccatcagctaagattgggcgctgcaggggcgccgacttctacccttttgtacatagagtctctttgaacgtgcaggccaggcgttgcaactcatttctttaggtgttaccttgtagttgaatgtttcacaaattgcttgatagatatcctgattggcctggccagggtaccgtacagccagcgtcctccacatcggcaaatcgctccaagccaatgctgagggcataggatgggttgatattcgatatccactcctgctgctacttccacttagattgtacttttcgtcgtaacgctatttttttctaccaatacataactgaatactgagtgatgatccgctggaatccacaccagatgccagtcagtggagctatgaccaggactagtgcaagcgctgaacttgtaaaaattatttcctaagcgaaaagtagtacatagggtttgtatagtgattaaattaaaacttttaattagagcgtgtacgatcgatatcgatatcttaatttcggttttcatttttaacaaaaaattataaacacaaagcgtaatggataaatgtcttttgtcgacgctgctcacgggtttacaaatcagcacttcatttattttatttttaataataataattattaataaattattataattaatttataataattcacggcgcgctttattaattagtgtttgttgtgagtgttttatttctccatgtatgaatcgtataaaaagaacaagagcgagcggcggttaattctgatcggttgactccttggcctcggcctcagcatcctcgtcgccctcctcaacgggcggcacagggacatcggcgctgctatcgggctggacgatcaccttcttgggactcgggccgtagctgtctgcctctgctgaaatggcaccagacggtccgggagcagcatcctcatcctcgtcgtcgtgagtcgtcgactccggttgcaagctagccgctgcctcagaggcgacgccgtttttcgcttcctctac

SEQ ID NO: 21872 - DNA, 2763 bp, DROSOPHILA
atgataggacgtttgtttcgcgcccacggcgagttctgcgcctcgcatccctgggaggtcatcgtggccctgctgaccattacggcatgcatgctcacggtggacaagaacaataccctggatgcgagcagcggattgggcacagccaccgcctcagctgccgccgccggaggatccggatctggagctggatctggagcaagtggaacaataccaccatcgtctatgggtggctcggccacctccagccggcacaggccctgtcacggttggagccaatcctgtgatggcctagaggccgaatacaatgcagccgacgtaatcctgatgaccatcgtccgctgcactgccgtactgtactgctactaccagttctgcagcctccaccgcctgggatccaaatatgtgctgggcattgccggcctcttcacggtcttctccagcttcatcttcacgacggccatcatcaagttcctgggcagcgacatctccgaactgaaggacgccctgttcttcctgctgctggtcattgatctgtccaactctggccgcctggcgcagctggcgctatcgggcagtaaccaagcggaggtgacgcagaacattgcaaggggactggagctcctgggaccagccatctccctggacacaattgtggaggtgctgctggtgggcgttggcacactgtcgggtgtacagcgtctggaggtactgtgcatgtttgccgtgctctcggtgctggttaactatgtggtctttatgaccttttatcccgcctgcctttcgctaatcttcgatctatcacgctccggcgttgatatgtctgtggtgcgtgaaaaagcgaagggctcgctgctcctcaagtcgctaacagaggaggagcagaaggccaatccagtgctgcagcgtgttaagcttatcatgaccacaggcctgatggcggtgcacatttatagccgggtggctttctccggcagcgactacgatgccgtggacaagacgctgacgcccacgctaagcctgaatgtgagcaataatcgcacggaatcgggtgaaatcgccgacattatcatcaaatggctgaccatgagtgccgatcacatagtaatctcaattgttctcatcgccttggtagttaaatttatttgctttgacaatcgtgatcctctgccggatcagttgcgtcaatcaggtccagttgccatcgccgccaaggcttcacaaaccacaccaattgatgaagagcacgttgaacaggaaaaggatacagaaaattcagctgcagtccgcacactattatttaccattgaagatcagagttcagcaaatgcttcaactcagacggatctgctgccactgcgccaccgactggtgggtcccataaagcctccacgcccagttcaggaatgccttgacatccttaactccactgaagagggcagtggaccagcggccttgagtgacgaggagattgtgtctattgtccatgccggtggcactcactgcccactccacaaaatagaatctgtactagatgatcccgagaggggagtgcgaatccgccgacagatcattggcagtcgtgccaagatgccggttggtcgactggatgtcttgccttatgaacactttgactaccgcaaagtgctgaacgcctgctgtgagaacgttctgggctacgttcccattcccgttggctacgcaggacccctgctgttagacggagagacctactacgtgcccatggcaaccaccgagggtgctttggttgcatccacgaatcgtggctgcaaagcgctctccgttcgtggtgttagatctgtcgtggaggacgtgggcatgacccgtgctccgtgtgtaagattccccagcgttgcccgcgcggccgaagcaaaatcttggatcgaaaacgacgaaaactaccgggtggtgaaaactgaattcgattctacatcgcgctttggccgtctcaaggactgccacattgccatggatggaccacagctgtatattcgttttgtggccattaccggcgacgccatgggcatgaacatggtgtccaagggcgctgagatggccctgcgccgaattcagcttcagtttcccgacatgcagatcatctcgctgagtggaaacttctgctgcgacaagaaaccggcggccatcaactggattaagggacgtggcaagcgggtggtcaccgagtgtaccatttcggcagccacactgcgttccgtgctgaagacagatgccaagacactggtcgaatgtaacaagctgaagaatatgggaggcagcgcgatggccggtagcattggtggcaacaatgctcatgccgccaatatggtgactgccgtctttttggccacggggcaggatcccgcccagaatgtcacctcgagtaattgctccactgccatggagtgctgggcggagaacagcgaggatctttacatgacctgcacaatgccttcgctggaggtgggaactgtgggcggcggaaccgggttgcccggccagagcgcatgcctggaaatgctcggagtccgcggagctcacgccacgcggccaggagacaacgccaagaagctggcacagatcgtctgcgccacggttatggccggcgaattgagcctgatggcggcgttggtcaatagcgatctagtcaagagtcatatgcggcacaatcgatcctccatcgcagtgaacagcgccaacaatcctctcaacgtgaccgtgtccagctgcagcaccatcagctaa

SEQ ID NO: 21873 - protein, 920 aa, DROSOPHILA
MIGRLFRAHGEFCASHPWEVIVALLTITACMLTVDKNNTLDASSGLGTATASAAAAGGSGSGAGSGASGTIPPSSMGGSATSSRHRPCHGWSQSCDGLEAEYNAADVILMTIVRCTAVLYCYYQFCSLHRLGSKYVLGIAGLFTVFSSFIFTTAIIKFLGSDISELKDALFFLLLVIDLSNSGRLAQLALSGSNQAEVTQNIARGLELLGPAISLDTIVEVLLVGVGTLSGVQRLEVLCMFAVLSVLVNYVVFMTFYPACLSLIFDLSRSGVDMSVVREKAKGSLLLKSLTEEEQKANPVLQRVKLIMTTGLMAVHIYSRVAFSGSDYDAVDKTLTPTLSLNVSNNRTESGEIADIIIKWLTMSADHIVISIVLIALVVKFICFDNRDPLPDQLRQSGPVAIAAKASQTTPIDEEHVEQEKDTENSAAVRTLLFTIEDQSSANASTQTDLLPLRHRLVGPIKPPRPVQECLDILNSTEEGSGPAALSDEEIVSIVHAGGTHCPLHKIESVLDDPERGVRIRRQIIGSRAKMPVGRLDVLPYEHFDYRKVLNACCENVLGYVPIPVGYAGPLLLDGETYYVPMATTEGALVASTNRGCKALSVRGVRSVVEDVGMTRAPCVRFPSVARAAEAKSWIENDENYRVVKTEFDSTSRFGRLKDCHIAMDGPQLYIRFVAITGDAMGMNMVSKGAEMALRRIQLQFPDMQIISLSGNFCCDKKPAAINWIKGRGKRVVTECTISAATLRSVLKTDAKTLVECNKLKNMGGSAMAGSIGGNNAHAANMVTAVFLATGQDPAQNVTSSNCSTAMECWAENSEDLYMTCTMPSLEVGTVGGGTGLPGQSACLEMLGVRGAHATRPGDNAKKLAQIVCATVMAGELSLMAALVNSDLVKSHMRHNRSSIAVNSANNPLNVTVSSCSTIS

SEQ ID NO: 21874 - DNA, 3894 bp, DROSOPHILA
gcgcggctctcctcatactcccgggccacatccgtcaggctcttggcctcggcggactccttgttgttgctgctgctgctgcaaatggatgaggaggcagcggcctcgctggtctctgtggtctgggcagcgttctgaatgacgcttgagaagagcaatggcgccgaggacgacgtagcagcggtggaggaggaggcagcctcctgggctgataccgagctggctgccgtatctgcatccggctcagcggtgacctgttcagcattgggggccaccacacgttcatgcacattctggccgaagacgaacccgctggactgaacatttggcatgttgttcttggctgctgcaaacatgctggagcgctcaatgccattgctacgcagcttggtcagcggatccggccgctcgtcgacatcgtcgtcctccttgtcgccagtggactcggctgccgcagatccggtggccaccacctcctcgtcatcgtcgtcgtccttggactcgcgcagaaacggattattcagcagggcgctgtcttcacctgcacttggggatgtggaactattgttggagccgctgctgtttgccaagactgctgggcgcaggacagcaccgcccaggcgagaagccttcaaggtgaagccacctcggaaacagttagtttcgactgacgcttctggaaacaagggggaaaaaacaagactcgtttgtcagtttgttgcgaactcttcaagggcacaagattcgcgatatttggcaactttaagttatagcaagcattacagcttgttttgctacgcttaccattattttcagacattgcaaactagtctacttgcaattttaaaatataaattgccaaatcttttacagaatagagcgttctgtgtaaagcctgccgtattgttatcgctgtgttatcgctgtcactatcgataagcgccggcgatggcgctctgttgtcaacactgactttttcagtgttgcttacttgccgctgaaaaacaagaaatttacaagtcatcgacagagtgtttgcccaaaaagatcggcaataatagcattttaacaaagaattacattcagcaacggctaatcaacaatcgtattagacatggctcagactctggaggataagtcaatctgggaggacggggaggagtccctgggcgaggaggtgatgcgtatgtccaccgatgaaattgtgagcaggactcgcctgatggacaacgagatcaagatcatgaagagcgaagtgatacgcataacgcacgagattcaggcgcaaaatgagaagatcaaggacaacaccgaaaagatcaaggtagggatgacaatgaaacgccaccctgccaaatagcctcatttgttaagtacttccccattaggtcaacaagacactgccctacctggtgtccaatgtaatagagctgctggatgtggatccacaggaggaggaggacgacggctccgtcaccgttctggacaaccagcgaaagggcaagtgcgccgtcatcaaaacatccactcgacaggcgtatttcctgcccgtcatcggcctggttgatgccgagaaactgaagccaggtgatctggtcggagtcaacaaagactcctatttgatcctggaaaccctgccggcagagtatgatgcccgcgtaaaagccatggaagtggacgagcgacctacagagcagtactccgacattggaggtttggacaagcagatacaggagctcatcgaggcagtggtgctgcccatgacgcacaaggagaagttcaaaaaccttggcattcacccacccaaaggtgggtatctcactcgaacaaatgtcacacaaccatattaatccttgccatttacaggtgtccttttgtacggcccccctggaactggcaaaacattgctggcccgtgcctgcgccgctcagacaaagtccaccttcctcaagctggcaggtccccagttggtgcaaatgttcatcggtgatggtgccaagctggtgcgcgatgccttcgccttggccaaggagaaggcgcctgccattatcttcattgacgagttggacgccattggcaccaagcgtttcgattcggagaaggccggtgaccgtgaggtccagcgaactatgttggagcttcttaatcagctcgatggcttcagttccactgcagatattaaggtgattgcggccaccaatcgcgtagacattctggatcctgctctgctgcgctctggtcgtctggatcgtaagatcgagttcccacatcccaacgaggaagcccgtgcccgtattatgcagattcactcgcgtaaaatgaacgttagcaatgatgtgaatttcgaggaattgtcccgatccacggatgacttcaacggcgcccagtgcaaagccgtctgtgtggaagctggtatgatcgcactgcgtcgctccgccaattcggttacgcacgaagacttcatggacgccatcatggaagtgcaggcgaagaagaaggctaatcttaactactacgcttagactaaaaatttgcagtttaacttcacattgtcagctcccattaaaataaaccatggaaatgtaaaatttttcagtttcgatctgagttgccccttgaagatcgcctttaaaataacatcgcaacggctcttaaaagtaactagaatgggagacgtactgaaatcaatacccaacctttttaaaataaacaaaaatatatatcaaatgtcgagcgattcattggtttatcagtacaacatttacattctgagtacgatattttttaaatatctaaaaaggtcggttttagaattaataaaaaatattacatcgggcgaaattagatgataaatatttacacgcacactaattaacctagagggatgatttaccaagttactaagactaaccagtgggatcgagtgtgttagcgccatccggcgccgcagatgtcgtgccacttcccccttgtgacgctgcatcgacaagggacgtggcagtggttgatgaggtttccgtagaggaggacgcggccacagcatcgtgagatgaaactgcggcggcaggtggtgtgacgcccacaccttcgaccactgcggctacaggtgctgcttccgctccaaccggcgccaagttaactggcgcagcagcaatgtcatctgcagctggctgctgtgccggctgatccggctgctgaaatggacgcctcatgtacatgatgatgcccagcagtagagttagaacggtaatcatgtacaagtcccaattggcagcaatattttcatccatgtagaagatgaacctgtaaggtgactaaaggggaacaacattaaaaagctagtaaacagtttatccatagggttgggtaatcacctccttgattgattcaatcgtggccaacatttgtagcttaaaaagcgcaatggccacaggcactttggcgtctgaattggtttccgcagccaaatcgtataatctctttgccagatgccagtctttcttcattccgagcccttgctcgtgcatgtatcccaagttgaacatggcttgggcattatattgctgctcagaggctttcctgtagggattgatgcggttataagtcgttttcacacttcatagttcatattcaactaacctgtaaagagcagcggcagtctcgaagtccgtcgaagtaccccaaccgtagtaatagtaatcgcccagcttgacttgggccgcagaatagccctgtccggctgctcgtttccagtagtagaaggcacgaatcagatcttcgtgccgatcgttgaacacatgcacctccttgcggtctagtaaaaaggcggcattactttgagccacctcatagcccatttcggccatcaacgagtactgcatgtaggcctcgtcg

SEQ ID NO: 21875 - DNA, 1773 bp, DROSOPHILA
aaaaacaagaaatttacaagtcatcgacagagtgtttgcccaaaaagatcggcaataatagcattttaacaaagaattacattcagcaacggctaatcaacaatcgtattagacatggctcagactctggaggataagtcaatctgggaggacggggaggagtccctgggcgaggaggtgatgcgtatgtccaccgatgaaattgtgagcaggactcgcctgatggacaacgagatcaagatcatgaagagcgaagtgatacgcataacgcacgagattcaggcgcaaaatgagaagatcaaggacaacaccgaaaagatcaaggtcaacaagacactgccctacctggtgtccaatgtaatagagctgctggatgtggatccacaggaggaggaggacgacggctccgtcaccgttctggacaaccagcgaaagggcaagtgcgccgtcatcaaaacatccactcgacaggcgtatttcctgcccgtcatcggcctggttgatgccgagaaactgaagccaggtgatctggtcggagtcaacaaagactcctatttgatcctggaaaccctgccggcagagtatgatgcccgcgtaaaagccatggaagtggacgagcgacctacagagcagtactccgacattggaggtttggacaagcagatacaggagctcatcgaggcagtggtgctgcccatgacgcacaaggagaagttcaaaaaccttggcattcacccacccaaaggtgtccttttgtacggcccccctggaactggcaaaacattgctggcccgtgcctgcgccgctcagacaaagtccaccttcctcaagctggcaggtccccagttggtgcaaatgttcatcggtgatggtgccaagctggtgcgcgatgccttcgccttggccaaggagaaggcgcctgccattatcttcattgacgagttggacgccattggcaccaagcgtttcgattcggagaaggccggtgaccgtgaggtccagcgaactatgttggagcttcttaatcagctcgatggcttcagttccactgcagatattaaggtgattgcggccaccaatcgcgtagacattctggatcctgctctgctgcgctctggtcgtctggatcgtaagatcgagttcccacatcccaacgaggaagcccgtgcccgtattatgcagattcactcgcgtaaaatgaacgttagcaatgatgtgaatttcgaggaattgtcccgatccacggatgacttcaacggcgcccagtgcaaagccgtctgtgtggaagctggtatgatcgcactgcgtcgctccgccaattcggttacgcacgaagacttcatggacgccatcatggaagtgcaggcgaagaagaaggctaatcttaactactacgcttagactaaaaatttgcagtttaacttcacattgtcagctcccattaaaataaaccatggaaatgtaaaatttttcagtttcgatctgagttgccccttgaagatcgcctttaaaataacatcgcaacggctcttaaaagtaactagaatgggagacgtactgaaatcaatacccaacctttttaaaataaacaaaaatatatatcaaatgtcgagcgattcattggtttatcagtacaacatttacattctgagtacgatattttttaaatatctaaaaaggtcggttttagaattaataaaaaatattacatcgggcgaaattagatgataaatatttacacgcacactaattaacctagagggatgatttacc

SEQ ID NO: 21876 - protein, 428 aa, DROSOPHILA
MAQTLEDKSIWEDGEESLGEEVMRMSTDEIVSRTRLMDNEIKIMKSEVIRITHEIQAQNEKIKDNTEKIKVNKTLPYLVSNVIELLDVDPQEEEDDGSVTVLDNQRKGKCAVIKTSTRQAYFLPVIGLVDAEKLKPGDLVGVNKDSYLILETLPAEYDARVKAMEVDERPTEQYSDIGGLDKQIQELIEAVVLPMTHKEKFKNLGIHPPKGVLLYGPPGTGKTLLARACAAQTKSTFLKLAGPQLVQMFIGDGAKLVRDAFALAKEKAPAIIFIDELDAIGTKRFDSEKAGDREVQRTMLELLNQLDGFSSTADIKVIAATNRVDILDPALLRSGRLDRKIEFPHPNEEARARIMQIHSRKMNVSNDVNFEELSRSTDDFNGAQCKAVCVEAGMIALRRSANSVTHEDFMDAIMEVQAKKKANLNYYA

SEQ ID NO: 21877 - DNA, 2706 bp, DROSOPHILA
aagagtggattgctgcttctgggtggattcgtttgacttactggtagctcattttggccacctcgacttggtggtggttggaataccttggttcggtttccttaatttttcacacgtaagattctttttaatcttttttgttgcaatgcttagtgctgcgaacgggccgaggtttgtgtgccagtgctgcaaagcaccgcgtctaaaacagtcttttccaggggcgtctccaaaaatattttcgcgaattaaaaaggagtaataaaatcgagacaggcttataaatatttagtcaggacgatatcaaaacttaattacaacttttttttattattacaagctacatttaataatattacaatttgcctaagcctgacggtaaaacataaaattttaaaaatatttgtacatttctttaaaacgtatatgcaccaaaatgtggaaattatgctcaacaattatttcccgggcaactgcgatagttaacgtctagaatgtcttaccccgaaaaattcccagggcttgctagctacgcccctggattttccggctgttgtttcgttatgcaaaggaacgcgcagagtttaaccagaaggaaatctgaattggaactgttgacgcgcaatcgaaagtgataattacgagcgggaataattagaatacgaggaagatttccgcccgtgtgaatcaccaacttttgtctcgtccaatccaagtcagccactgagcagccggcatggagatgagtgtaagtagaagctgcgacctgcgtgccagacacccagacccaaaagtcacagcccaaaaccaaattgaaaaccgaaaccagttccaacccgcgcttcaaccgagtgagtcgcacagcgaatcactcttcgagctcagccgttagtgctggtgaaagttacagctgttgcgttcgctacgttcgctacctagtaaccgccacctgtgccccgattcctaatcctccagtcgacacctgttatttcaggctgccatgttcgcacgcgtttccttctaccccaccctgctgtacaatgtcctgatggaaaaggcatcggccaggaattggtacgatcgcatcgatgagcatgtgatactgggagcactgccctttcgcagccaggccaatgacgtaagtatccccacggaaccaagcctgaaatccttctaaatccttgtttaaccgctcagctcattgaaaaggagaacatgaaggcggtggtgtcgatgaacgaggactatgagctgaccgccttctccaacaacacggagaagtggcgaaagcttggcattgagttcctgcagctggccaccaccgacatctttgagtcgcccaatcaagaaaagctcttccgcggcgtggaattcataaacaagttcctgcctctaaagcaaagaattggtggcctaagttcctcctaccagccggagaacgtgggttctgtctatgtgcactgcaaggctggtaggacgcgaagtgccactttggtgggatgctacctcatgatggtgggttggttatctatttgcacgtagctcttaaaaaaaagctcacaacttatcctttgcagaagaacggatggactccggatcaggcggttgaccacatgcgtaagtgccgaccgcacattctgctgcacaccaaacaatgggatgccctccggttattctacacaaacaatgtggagacgaaatcatgaccaaacctggacaatagcccaaatttattgtttacagtagattaccatacgtaacaaaggtggtgcctgttacccaactactttagtgctgattttcttgttgaatatacaattttctacaaaacccgctctgtgcagctgtgactttttacaattctttatttaatgcttatcgcgaaactatgaataaataactggtgtttcgtggttcatcaactgattgctcctttgacatttaagccttctcggcatccttgcccttgatggcccagaagcgcttgataccattggccagacccacatcattttggatgaagtagaagaggccgcccagcgtggccaccgagatgatgatcagcgcaatgtgggctaccttgggcaggacgtttccaacgacagatggccgcatgtagtcaactaccatggcctccacgcccctgcgtttggtgaatgaggaaaatataagtaaaggtttaattttcctcaaggatatcttaccaatgggtgtggatgacgacagagatggccatgagggcgtccaatacctgggatggagctatgaaggcagctggaatgacggccagtaggccggcggacacaattcgctccacagtccagagcagggtgtggctggatccagcggaagccatgcggggcgcactcacggagatctcgcgcacgacgggctgcataagcagtcgaggattaccatttagtatgattagccaccactgaatttttcaactctaaacacttaccgctacaatcttggccacggccaggggctggaccaccgccttccgctggacattggccaccagggtggagtagctcttcaggggagtgatgcgagccgacttaacaagatttgcggctaattgggataccaacaaacggtttggttatataatgaaagctgttttgcgtccaataacaaggcgatttgccatccagtgggtccttaccattgcaacggacagcgccacgcagaagcaacgag

SEQ ID NO: 21878 - DNA, 585 bp, DROSOPHILA
atgttcgcacgcgtttccttctaccccaccctgctgtacaatgtcctgatggaaaaggcatcggccaggaattggtacgatcgcatcgatgagcatgtgatactgggagcactgccctttcgcagccaggccaatgacctcattgaaaaggagaacatgaaggcggtggtgtcgatgaacgaggactatgagctgaccgccttctccaacaacacggagaagtggcgaaagcttggcattgagttcctgcagctggccaccaccgacatctttgagtcgcccaatcaagaaaagctcttccgcggcgtggaattcataaacaagttcctgcctctaaagcaaagaattggtggcctaagttcctcctaccagccggagaacgtgggttctgtctatgtgcactgcaaggctggtaggacgcgaagtgccactttggtgggatgctacctcatgatgaagaacggatggactccggatcaggcggttgaccacatgcgtaagtgccgaccgcacattctgctgcacaccaaacaatgggatgccctccggttattctacacaaacaatgtggagacgaaatcatga

SEQ ID NO: 21879 - protein, 194 aa, DROSOPHILA
MFARVSFYPTLLYNVLMEKASARNWYDRIDEHVILGALPFRSQANDLIEKENMKAVVSMNEDYELTAFSNNTEKWRKLGIEFLQLATTDIFESPNQEKLFRGVEFINKFLPLKQRIGGLSSSYQPENVGSVYVHCKAGRTRSATLVGCYLMMKNGWTPDQAVDHMRKCRPHILLHTKQWDALRLFYTNNVETKS

SEQ ID NO: 21880 - DNA, 4339 bp, DROSOPHILA
ctttaacgaagagctagctgcacagcactggctgatagctattaatccactctttatcaaattgagcgttactttttgaacttaaaaatagagattaatattatttacatatatgtatttttttacgacttttcctggataatctagactcaagtttatgctgtatgcagcataactacttcgttgtatgcaatagctaatacaaatatataatatcaactcttttaacaattcctaagaaaaatcgtttctattaaaacgctttttagacttactctataatcttaatgacacgtactcagacaacaaagagctgtaaaagattaacccaaccatacattttgtaatgaaatattattacttgaacctcaagtttaaatttttaattagcactagttgagctattacatacacattgccgtttaatacaattagatatgagatttattaataaagcttaatttataaaaaaaaatgtttccatatctatatatagatttgaataaacacgctttttgcagtctagggttaatggcaatggagtctggagccccagaaacgggcacatcgaacccgaggaagaacgcccccgcaattattcaacggactgcagtttgaaccttttcgtcacttgtgcggaattagcacagcaattttcgccattaccgctgctaatcgggtcatatatggtgcgattatgatcgctgtacagatattcctggaatgtgattcacatgcacggagttcctaagctgcagtccccatatagtacgttcgaactttggagtcccacactagtgcgaatggcgtgtttgctgataagtccggcggagcgtctaggtgaacggtgtttgtgcctccatccacgccttatctgctggcaaaggtcatcttggactccgagcatgatcggcgatcagacagcggcgatttggtgtgccaagtctatatggtagcagctcgatcggaggcctgccagtatcaattgagccggcgacagcaacagttctcgcatctcaaccgaatcttctcgagaaatcccaacacaaatgggttagtgacacgcgctgcctggtagtgtcaacccccattaataatacgactttaaatctttgaacccagcaactgcaaccagcggcagtggactccatctggaggccatcgatcgcatcggctccattccccttgtggaatccagtgtgaagcgggtggagaccatctacgataaggtgaagaacaacaataggctattctcatggtattttgagacggcggaggccaccatttcggccgcctacgaaaccatccagccggcggtcaagctcttcgagccatccattcagcgcctggacaacgtgatgtgcaaaagcctggacattctggagcagcgcataccactggtctatctgccgcccgaaatggtaagtagtcggctagtaactcccccccatgcgctgacaaaagggcataattctctgcttgaagatgtactggaacaccaaggagtacatgtccgatcacctggtgcgtccggttctgaaacgcgccgattctgtcaagcaaatcggtaatgctgtcctcgagagtccacttaccacttatgcagccgagcgcattgatggcgctttcacagtcggcgataagttcgtggacaagtacctggtgcccatccaaacagatcaggatcagaccgatggtgagtcctggtatctcacatctgggttaatcttcaaacgcatgttggggaatctattacatttcattttattttaaactgaagttcttatattttggcacttttactaaactaactatttataattcaaaattgttgtagtgaaaaaattggtttcggccctgaatgataacttttcgccgattcgacaacaattaaaccgaatgtttggccacaaaagttagtatgcaaaattacatatttctccatataactagagataatcaaaatcatatgaaagatagtttagtttgccaaaagttttacataaaaagtaagcgaaagcaagtgatttgaaaagtcagcatccaggcaaatcaccttaaggtgcactcatctcatagtttatttataaatgcccacgttgtcgggaaggttatctctggggaacggcggattcattgaaacctgaagccagagaaagttgcgataagctgagctctggccggaatttgctctctcatgctcaaaaaaaattgtataagacacttattccgagtatccgccttgcaggcccacaggaggatgataacgaggccgtgccggacgagaggggcgccatcaaggcgatccatcatggtcaacgcttctcccgcaaactgaagcgccgccttacccaaagaaccatcgcagaggctcgcgccctcaaaaagcagagcaaggaggcgatccacgtgctcttctatgccgcagaattggtcagtaaaattcagtaacctatttgctttaatttttgagtatcatttggtaaaaaaaaaaaccataagattacagtaaccaattcaaattacttacgaaatgattacgcaatgtctgtttgtattctggtgtacaaccgtaacccaaataacacttttaaacgaaacccattccacagattgccaccgatcccaagcaggccgttcaaaaggccaaggaactgtgggtctatctcagtgcagatgaacccgaaaatcaagcgaggcccgccactctggagcagttgattgtgctactgacccgcgaatcggctaggcgtgtggttcatctagtgaacttcagtgctcatgtggcagccaacatacccaggttggtagatcccgcctccatccttatctttccatgtgaaccccttcgaaccaaaccttacagaaacctggcgcacacgacaacagaggttgcccaccatattatctatatcaaccaccgcatcatcacaatctcacggctggacaaggttaaaaccatctccaaagaggaagctgaatctcttttcaagcgcatgctggcgttctatggtagccttcagggcctgaccaatgcctacctggtaagaaaggatgtgatactagcagtcagacggaagatgattatatatattaaatatattcgacaggagcgcgtggccagctttctatccggacgcatggaggccgagaaggtgacgggcagcgatggcggcaattccaaccaccggtcatcgcggaggaggcaggatccgaaccattattcagccacccacaataacatcaacggcgtctactagcattgaattctttattgctatcgtatttttatttctgtttctccgtgcatatacggaaaatacactaaacgatattgtacatctatttttaacataatgcatttgtcaataatataagcctaacttcacgcttaacaatacaacgcggacttttatccaaaattattatagactcatattgccaataaagcattaggtattgaaagaattcctagggtgctttaaattcttgctttaatttatttaaataagttcgctttgtaatacgcaagctctttgatgctttctcggatgtcgtccagactacgatgcgtgaaagattttttgggagcggaatccagaattgcgggatgccatcgcttggccagttccttgatggtggacacatcgacgatgcggtaatgcaggtaagcatctaccaatggcatgaatttcataatgaatagtcggtcggtgtagacggagttcccaccaagcggacaggcgcgctttggtatgttcttctcgagataggatagcactagattggaggcttcttcgagattcacatccgagctcttgcatcgatcaataagacctgaattgtaatgatgtttcatgcaccactcgttcatcgagtcgtagacctcctgcggatggttgatggcaaagcatggtccctccgacttcacgttcaggtcctggtccgtaatgatgcaggccacctcgaggattttgtccttttcaatgtccagcccggtcatctccaagtccatccacacgatgtccgtgtctaagccacaggtgctgctcattctgtcatttgaattgaatgcgatgtggctccgaatttggcggttcagggacaatccgacgcgtcgaaggtgagcaagcatatatagctgtagcgcaggtttctttttgctaaatgtaaatatgcggcggttttaccatgtgtttgataacatggtatcgttacgataacaactggtcacactacaggcacattgcccaacactgaaagggggattcctgtcattacaggaacaaaacaaatcgaatattatgttcatacccaaataattgcagaataatttgtt

SEQ ID NO: 21881 - DNA, 1286 bp, DROSOPHILA
caacagttctcgcatctcaaccgaatcttctcgagaaatcccaacacaaatggcaactgcaaccagcggcagtggactccatctggaggccatcgatcgcatcggctccattccccttgtggaatccagtgtgaagcgggtggagaccatctacgataaggtgaagaacaacaataggctattctcatggtattttgagacggcggaggccaccatttcggccgcctacgaaaccatccagccggcggtcaagctcttcgagccatccattcagcgcctggacaacgtgatgtgcaaaagcctggacattctggagcagcgcataccactggtctatctgccgcccgaaatgatgtactggaacaccaaggagtacatgtccgatcacctggtgcgtccggttctgaaacgcgccgattctgtcaagcaaatcggtaatgctgtcctcgagagtccacttaccacttatgcagccgagcgcattgatggcgctttcacagtcggcgataagttcgtggacaagtacctggtgcccatccaaacagatcaggatcagaccgatggcccacaggaggatgataacgaggccgtgccggacgagaggggcgccatcaaggcgatccatcatggtcaacgcttctcccgcaaactgaagcgccgccttacccaaagaaccatcgcagaggctcgcgccctcaaaaagcagagcaaggaggcgatccacgtgctcttctatgccgcagaattgattgccaccgatcccaagcaggccgttcaaaaggccaaggaactgtgggtctatctcagtgcagatgaacccgaaaatcaagcgaggcccgccactctggagcagttgattgtgctactgacccgcgaatcggctaggcgtgtggttcatctagtgaacttcagtgctcatgtggcagccaacatacccagaaacctggcgcacacgacaacagaggttaaaaccatctccaaagaggaagctgaatctcttttcaagcgcatgctggcgttctatggtagccttcagggcctgaccaatgcctacctggagcgcgtggccagctttctatccggacgcatggaggccgagaaggtgacgggcagcgatggcggcaattccaaccaccggtcatcgcggaggaggcaggatccgaaccattattcagccacccacaataacatcaacggcgtctactagcattgaattctttattgctatcgtatttttatttctgtttctccgtgcatatacggaaaatacactaaacgatattgta

SEQ ID NO: 21882 - protein, 385 aa, DROSOPHILA
MATATSGSGLHLEAIDRIGSIPLVESSVKRVETIYDKVKNNNRLFSWYFETAEATISAAYETIQPAVKLFEPSIQRLDNVMCKSLDILEQRIPLVYLPPEMMYWNTKEYMSDHLVRPVLKRADSVKQIGNAVLESPLTTYAAERIDGAFTVGDKFVDKYLVPIQTDQDQTDGPQEDDNEAVPDERGAIKAIHHGQRFSRKLKRRLTQRTIAEARALKKQSKEAIHVLFYAAELIATDPKQAVQKAKELWVYLSADEPENQARPATLEQLIVLLTRESARRVVHLVNFSAHVAANIPRNLAHTTTEVKTISKEEAESLFKRMLAFYGSLQGLTNAYLERVASFLSGRMEAEKVTGSDGGNSNHRSSRRRQDPNHYSATHNNINGVY

SEQ ID NO: 21883 - DNA, 4336 bp, DROSOPHILA
taacgaagagctagctgcacagcactggctgatagctattaatccactctttatcaaattgagcgttactttttgaacttaaaaatagagattaatattatttacatatatgtatttttttacgacttttcctggataatctagactcaagtttatgctgtatgcagcataactacttcgttgtatgcaatagctaatacaaatatataatatcaactcttttaacaattcctaagaaaaatcgtttctattaaaacgctttttagacttactctataatcttaatgacacgtactcagacaacaaagagctgtaaaagattaacccaaccatacattttgtaatgaaatattattacttgaacctcaagtttaaatttttaattagcactagttgagctattacatacacattgccgtttaatacaattagatatgagatttattaataaagcttaatttataaaaaaaaatgtttccatatctatatatagatttgaataaacacgctttttgcagtctagggttaatggcaatggagtctggagccccagaaacgggcacatcgaacccgaggaagaacgcccccgcaattattcaacggactgcagtttgaaccttttcgtcacttgtgcggaattagcacagcaattttcgccattaccgctgctaatcgggtcatatatggtgcgattatgatcgctgtacagatattcctggaatgtgattcacatgcacggagttcctaagctgcagtccccatatagtacgttcgaactttggagtcccacactagtgcgaatggcgtgtttgctgataagtccggcggagcgtctaggtgaacggtgtttgtgcctccatccacgccttatctgctggcaaaggtcatcttggactccgagcatgatcggcgatcagacagcggcgatttggtgtgccaagtctatatggtagcagctcgatcggaggcctgccagtatcaattgagccggcgacagcaacagttctcgcatctcaaccgaatcttctcgagaaatcccaacacaaatgggttagtgacacgcgctgcctggtagtgtcaacccccattaataatacgactttaaatctttgaacccagcaactgcaaccagcggcagtggactccatctggaggccatcgatcgcatcggctccattccccttgtggaatccagtgtgaagcgggtggagaccatctacgataaggtgaagaacaacaataggctattctcatggtattttgagacggcggaggccaccatttcggccgcctacgaaaccatccagccggcggtcaagctcttcgagccatccattcagcgcctggacaacgtgatgtgcaaaagcctggacattctggagcagcgcataccactggtctatctgccgcccgaaatggtaagtagtcggctagtaactcccccccatgcgctgacaaaagggcataattctctgcttgaagatgtactggaacaccaaggagtacatgtccgatcacctggtgcgtccggttctgaaacgcgccgattctgtcaagcaaatcggtaatgctgtcctcgagagtccacttaccacttatgcagccgagcgcattgatggcgctttcacagtcggcgataagttcgtggacaagtacctggtgcccatccaaacagatcaggatcagaccgatggtgagtcctggtatctcacatctgggttaatcttcaaacgcatgttggggaatctattacatttcattttattttaaactgaagttcttatattttggcacttttactaaactaactatttataattcaaaattgttgtagtgaaaaaattggtttcggccctgaatgataacttttcgccgattcgacaacaattaaaccgaatgtttggccacaaaagttagtatgcaaaattacatatttctccatataactagagataatcaaaatcatatgaaagatagtttagtttgccaaaagttttacataaaaagtaagcgaaagcaagtgatttgaaaagtcagcatccaggcaaatcaccttaaggtgcactcatctcatagtttatttataaatgcccacgttgtcgggaaggttatctctggggaacggcggattcattgaaacctgaagccagagaaagttgcgataagctgagctctggccggaatttgctctctcatgctcaaaaaaaattgtataagacacttattccgagtatccgccttgcaggcccacaggaggatgataacgaggccgtgccggacgagaggggcgccatcaaggcgatccatcatggtcaacgcttctcccgcaaactgaagcgccgccttacccaaagaaccatcgcagaggctcgcgccctcaaaaagcagagcaaggaggcgatccacgtgctcttctatgccgcagaattggtcagtaaaattcagtaacctatttgctttaatttttgagtatcatttggtaaaaaaaaaaaccataagattacagtaaccaattcaaattacttacgaaatgattacgcaatgtctgtttgtattctggtgtacaaccgtaacccaaataacacttttaaacgaaacccattccacagattgccaccgatcccaagcaggccgttcaaaaggccaaggaactgtgggtctatctcagtgcagatgaacccgaaaatcaagcgaggcccgccactctggagcagttgattgtgctactgacccgcgaatcggctaggcgtgtggttcatctagtgaacttcagtgctcatgtggcagccaacatacccaggttggtagatcccgcctccatccttatctttccatgtgaaccccttcgaaccaaaccttacagaaacctggcgcacacgacaacagaggttgcccaccatattatctatatcaaccaccgcatcatcacaatctcacggctggacaaggttaaaaccatctccaaagaggaagctgaatctcttttcaagcgcatgctggcgttctatggtagccttcagggcctgaccaatgcctacctggtaagaaaggatgtgatactagcagtcagacggaagatgattatatatattaaatatattcgacaggagcgcgtggccagctttctatccggacgcatggaggccgagaaggtgacgggcagcgatggcggcaattccaaccaccggtcatcgcggaggaggcaggatccgaaccattattcagccacccacaataacatcaacggcgtctactagcattgaattctttattgctatcgtatttttatttctgtttctccgtgcatatacggaaaatacactaaacgatattgtacatctatttttaacataatgcatttgtcaataatataagcctaacttcacgcttaacaatacaacgcggacttttatccaaaattattatagactcatattgccaataaagcattaggtattgaaagaattcctagggtgctttaaattcttgctttaatttatttaaataagttcgctttgtaatacgcaagctctttgatgctttctcggatgtcgtccagactacgatgcgtgaaagattttttgggagcggaatccagaattgcgggatgccatcgcttggccagttccttgatggtggacacatcgacgatgcggtaatgcaggtaagcatctaccaatggcatgaatttcataatgaatagtcggtcggtgtagacggagttcccaccaagcggacaggcgcgctttggtatgttcttctcgagataggatagcactagattggaggcttcttcgagattcacatccgagctcttgcatcgatcaataagacctgaattgtaatgatgtttcatgcaccactcgttcatcgagtcgtagacctcctgcggatggttgatggcaaagcatggtccctccgacttcacgttcaggtcctggtccgtaatgatgcaggccacctcgaggattttgtccttttcaatgtccagcccggtcatctccaagtccatccacacgatgtccgtgtctaagccacaggtgctgctcattctgtcatttgaattgaatgcgatgtggctccgaatttggcggttcagggacaatccgacgcgtcgaaggtgagcaagcatatatagctgtagcgcaggtttctttttgctaaatgtaaatatgcggcggttttaccatgtgtttgataacatggtatcgttacgataacaactggtcacactacaggcacattgcccaacactgaaagggggattcctgtcattacaggaacaaaacaaatcgaatattatgttcatacccaaataattgcagaataatttgtt

SEQ ID NO: 21884 - DNA, 1361 bp, DROSOPHILA
cagttctcgcatctcaaccgaatcttctcgagaaatcccaacacaaatggcaactgcaaccagcggcagtggactccatctggaggccatcgatcgcatcggctccattccccttgtggaatccagtgtgaagcgggtggagaccatctacgataaggtgaagaacaacaataggctattctcatggtattttgagacggcggaggccaccatttcggccgcctacgaaaccatccagccggcggtcaagctcttcgagccatccattcagcgcctggacaacgtgatgtgcaaaagcctggacattctggagcagcgcataccactggtctatctgccgcccgaaatgatgtactggaacaccaaggagtacatgtccgatcacctggtgcgtccggttctgaaacgcgccgattctgtcaagcaaatcggtaatgctgtcctcgagagtccacttaccacttatgcagccgagcgcattgatggcgctttcacagtcggcgataagttcgtggacaagtacctggtgcccatccaaacagatcaggatcagaccgatgtgaaaaaattggtttcggccctgaatgataacttttcgccgattcgacaacaattaaaccgaatgtttggccacaaaagcccacaggaggatgataacgaggccgtgccggacgagaggggcgccatcaaggcgatccatcatggtcaacgcttctcccgcaaactgaagcgccgccttacccaaagaaccatcgcagaggctcgcgccctcaaaaagcagagcaaggaggcgatccacgtgctcttctatgccgcagaattgattgccaccgatcccaagcaggccgttcaaaaggccaaggaactgtgggtctatctcagtgcagatgaacccgaaaatcaagcgaggcccgccactctggagcagttgattgtgctactgacccgcgaatcggctaggcgtgtggttcatctagtgaacttcagtgctcatgtggcagccaacatacccagaaacctggcgcacacgacaacagaggttaaaaccatctccaaagaggaagctgaatctcttttcaagcgcatgctggcgttctatggtagccttcagggcctgaccaatgcctacctggagcgcgtggccagctttctatccggacgcatggaggccgagaaggtgacgggcagcgatggcggcaattccaaccaccggtcatcgcggaggaggcaggatccgaaccattattcagccacccacaataacatcaacggcgtctactagcattgaattctttattgctatcgtatttttatttctgtttctccgtgcatatacggaaaatacactaaacgatattgta

SEQ ID NO: 21885 - protein, 411 aa, DROSOPHILA
MATATSGSGLHLEAIDRIGSIPLVESSVKRVETIYDKVKNNNRLFSWYFETAEATISAAYETIQPAVKLFEPSIQRLDNVMCKSLDILEQRIPLVYLPPEMMYWNTKEYMSDHLVRPVLKRADSVKQIGNAVLESPLTTYAAERIDGAFTVGDKFVDKYLVPIQTDQDQTDVKKLVSALNDNFSPIRQQLNRMFGHKSPQEDDNEAVPDERGAIKAIHHGQRFSRKLKRRLTQRTIAEARALKKQSKEAIHVLFYAAELIATDPKQAVQKAKELWVYLSADEPENQARPATLEQLIVLLTRESARRVVHLVNFSAHVAANIPRNLAHTTTEVKTISKEEAESLFKRMLAFYGSLQGLTNAYLERVASFLSGRMEAEKVTGSDGGNSNHRSSRRRQDPNHYSATHNNINGVY

SEQ ID NO: 21886 - DNA, 4339 bp, DROSOPHILA; identical to SEQ ID NO: 21880

SEQ ID NO: 21887 - DNA, 1355 bp, DROSOPHILA
caacagttctcgcatctcaaccgaatcttctcgagaaatcccaacacaaatgggttagtgacacgcgctgcctggtagtgtcaacccccattaataatacgactttaaatctttgaacccagcaactgcaaccagcggcagtggactccatctggaggccatcgatcgcatcggctccattccccttgtggaatccagtgtgaagcgggtggagaccatctacgataaggtgaagaacaacaataggctattctcatggtattttgagacggcggaggccaccatttcggccgcctacgaaaccatccagccggcggtcaagctcttcgagccatccattcagcgcctggacaacgtgatgtgcaaaagcctggacattctggagcagcgcataccactggtctatctgccgcccgaaatgatgtactggaacaccaaggagtacatgtccgatcacctggtgcgtccggttctgaaacgcgccgattctgtcaagcaaatcggtaatgctgtcctcgagagtccacttaccacttatgcagccgagcgcattgatggcgctttcacagtcggcgataagttcgtggacaagtacctggtgcccatccaaacagatcaggatcagaccgatggcccacaggaggatgataacgaggccgtgccggacgagaggggcgccatcaaggcgatccatcatggtcaacgcttctcccgcaaactgaagcgccgccttacccaaagaaccatcgcagaggctcgcgccctcaaaaagcagagcaaggaggcgatccacgtgctcttctatgccgcagaattgattgccaccgatcccaagcaggccgttcaaaaggccaaggaactgtgggtctatctcagtgcagatgaacccgaaaatcaagcgaggcccgccactctggagcagttgattgtgctactgacccgcgaatcggctaggcgtgtggttcatctagtgaacttcagtgctcatgtggcagccaacatacccagaaacctggcgcacacgacaacagaggttaaaaccatctccaaagaggaagctgaatctcttttcaagcgcatgctggcgttctatggtagccttcagggcctgaccaatgcctacctggagcgcgtggccagctttctatccggacgcatggaggccgagaaggtgacgggcagcgatggcggcaattccaaccaccggtcatcgcggaggaggcaggatccgaaccattattcagccacccacaataacatcaacggcgtctactagcattgaattctttattgctatcgtatttttatttctgtttctccgtgcatatacggaaaatacactaaacgatattgta

SEQ ID NO: 21888 - protein, 305 aa, DROSOPHILA
MCKSLDILEQRIPLVYLPPEMMYWNTKEYMSDHLVRPVLKRADSVKQIGNAVLESPLTTYAAERIDGAFTVGDKFVDKYLVPIQTDQDQTDGPQEDDNEAVPDERGAIKAIHHGQRFSRKLKRRLTQRTIAEARALKKQSKEAIHVLFYAAELIATDPKQAVQKAKELWVYLSADEPENQARPATLEQLIVLLTRESARRVVHLVNFSAHVAANIPRNLAHTTTEVKTISKEEAESLFKRMLAFYGSLQGLTNAYLERVASFLSGRMEAEKVTGSDGGNSNHRSSRRRQDPNHYSATHNNINGVY

SEQ ID NO: 21889 - DNA, 3511 bp, DROSOPHILA
ttcacatatagtttggcccccggttacgaaatgcccgcgaatgagttatatttgaaatactttagcacatgtcggtttaactgctaaaacgcaataaacccagggctatataagcacctaaattggcgaaaggaatttccagagacaacgttttgggcagtcattacatgtgtataaaccaatagcgcattccgttcaataaccaatcgtctcgagacaaaatcaatcatatatctcgaggaaaagcattctagaactgcaaagtaattaacaaagaaaaaatatgagatatctgtgagcagatcgaaatctgaaacttgataagatagcacccatgaaagtgtgtggcgccagagaacatctaagaatagatgccagttacgtagctcgctgcaattattgcacttaatcaatagccagccagctctatcaatgaaacgaaaacaagtgaatgtggttactacgttatactatgcatggcgtacgagcaaaacaaattgcagtcgcagccacaaagattaacgacgtggcacactcgcgtgcaagtaagtaaacaaaactctgggaaatgccggggaaaatgttggaaaacgctcggatgtctcacgcatctggtgtggtggatagcatcgtatcccatcgataatcatgttattggacagttctatttataggcaacaaaagcaaagcgccagctaaacattttgcgatgaccttgccaacaagctagtgagtgaaaggcatctttgatctcatccagctgttggtgggctgcagcatgtgagcgaacctaaatcgtgcccaccacctcaagacgtgacaacaacaagccccgagtactgataagggtcattgggggactaagagcccctatataaaacactatagccttaattcagctgataacagcgcgagttttgagatgactgcgttcgcctgggaatttcatctatgtacatatgaccatgtatttagttattattcttagtttccgtactggctaatctctttggctcaaggctgtgctccttcatgggatgggtaattgcatatcagcgatgcagtacactttttgccttttttatatgcctcacacattaagcccctgtatttttcgtcagtttccttctttcccttttaaataagttagcattggcctttgttgtagccctctttcatgttcaagttcaagtaaataagtcacgtcgattgaaaaatactttcatactaatgacaaaaattacgccagcgggaaatacttcccgtggaaacacaaatagaaaggcacgtcagtgcgtcacaagaacttatcagcgaaaaccccatgaagtgtgcacatacatgtaactaggtgtacaaacggcagcggtgaactttgaagtaaaaaggtttcaaactaaattattataatagatctccaaaataaaattatcttttccaaaaatatataactcacttatccacaacaataatattatataaattccaagctaaaggtattcttataaatcctgcataaccactacaacattgaccgcgagtgtgggatcaataaaccactcacctttcttccgcctgcggtagttgtggtggttcctgcagctccggcgctttcggctgccccgtcgccggctcctcctgctccaattgctttggttggtctaattgctgcgattcactaaatctatgcactttaccggcactgctacgcttattataatttaattgattatttggcacttgggcggtggatgaggacgcgccacccacatcagcggctaaatcgatttcactaatatattcactatggcttttggtccgctgctggtcagatagcgcgggcagctcctttacaggcactgacgtgtccccagatattggccgattgccagtttggggcacttcggcgaaggaggaggaggaggatgtggcaacgatgggcacgccctcctgtgcagagggcaacaaaactccagctccgttgtggagtggcgggggtggaggttccggccttggaggcgccgccggttcctcgggctctatgtgggttttccgagctgcatccttggctgagtcgccagccctgcttgggatttgtgagtctgcagctgccacattgtcgtacaaccagaaacagcagctgcaatcggaaaatccacttagaaatcgctccatataggcatggatggtatctgtgtcagctcacctcagcagcagatttatgaacataaagcgcaccaagtgcagccgcatgtgcatcgttttagtcgctttgacttaacttaaccgtggctagtgcccaattcgctaatttactatactatttttgcgaacaggcgaggcccgcgttcgccaaaaagtacgtgtaccgtcgggccagagcttttgacatggattcggtgatattttttcactcgatatcgatctcgggtttagcatgcggccagctccattgtgatttagttaaaataataataataaatcaaaaagcgctgcaaaaatgtcaacgcgcacgtaaaataacaaaaaactggaggtgcccgtgcacgcgataggcagctatcgaagtagcagctattgtgggaagcagtcacagtactttctatcgactgcactggttaacaaagaacatgaaacgggttataatatttccctagcagatatgtttaatacaattgtgtgtgtacgtaataaaacagacaatctaaatagaataattatatattttattgatagttccaaaataaacatgttgttttgcagtgttatcgtattatcgatagaccttccttaccagtgtttttgtttgtcacaatcgagaaggcgcttggagttatatcaaaaaataaaaaataggaggaaaacagccgcgaaatgtccttcctgcgcggttccgtgagctatgtgtggtgcaccaccagcgtcctgggaaagggagccaccggttccgtgttccaggttagtgtgcttaacggtgttccgaatttcccacctgactcactttcctttcgtattttccttgtcttttagggggtcaacaagatcaccggcgaatcggtggcggtgaagacctttaatccctacagtcacatgcgaccggctgatgtgcagatgcgggagttcgaggccctgaaaaaggtcaaccacgagaatatagtaaagctgttggcgatcgaggaggatcaagaggggcgtggtaaggtgatcgtgatggagctctgcacaggcggaagtctctttaacatcctggacgatcctgagaactcgtacggtctgccggaacacgagttcctgctggtcttggaacacttgtgcgccggaatgaagcacttgcgggataacaagctggtgcatcgcgatctgaagcccggaaacataatgaagttcatctcggaggacgggcaaaccatatacaagcttactgatttcggtgctgctagagaactggaggataatcagccgtttgcctctctatacggcacagaagagtatcttcatcccgatctctacg

SEQ ID NO: 21890 - DNA, 909 bp, DROSOPHILA
cgcgttgacatttttgcagcgctttttgatttattattattattttaactaaatcacaatggagctggccgcatgctaaacccgagatcgatatcgagtgaaaaaatatcaccgaatccatgtcaaaagctctggcccgacggtacacgtactttttggcgaacgcgggcctcgcctgttcgcaaaaatagtatagtaaattagcgaattgggcactagccacggttaagttaagtcaaagcgactaaaacgatgcacatgcggctgcacttggtgcgctttatgttcataaatctgctgctgagctgctgtttctggttgtacgacaatgtggcagctgcagactcacaaatcccaagcagggctggcgactcagccaaggatgcagctcggaaaacccacatagagcccgaggaaccggcggcgcctccaaggccggaacctccacccccgccactccacaacggagctggagttttgttgccctctgcacaggagggcgtgcccatcgttgccacatcctcctcctcctccttcgccgaagtgccccaaactggcaatcggccaatatctggggacacgtcagtgcctgtaaaggagctgcccgcgctatctgaccagcagcggaccaaaagccatagtgaatatattagtgaaatcgatttagccgctgatgtgggtggcgcgtcctcatccaccgcccaagtgccaaataatcaattaaattataataagcgtagcagtgccggtaaagtgcatagatttagtgaatcgcagcaattagaccaaccaaagcaattggagcaggaggagccggcgacggggcagccgaaagcgccggagctgcaggaaccaccacaactaccgcaggcggaagaaaggagcacagccttgagccaaagagattag

SEQ ID NO: 21891 - protein, 216 aa, DROSOPHILA
MRLHLVRFMFINLLLSCCFWLYDNVAAADSQIPSRAGDSAKDAARKTHIEPEEPAAPPRPEPPPPPLHNGAGVLLPSAQEGVPIVATSSSSSFAEVPQTGNRPISGDTSVPVKELPALSDQQRTKSHSEYISEIDLAADVGGASSSTAQVPNNQLNYNKRSSAGKVHRFSESQQLDQPKQLEQEEPATGQPKAPELQEPPQLPQAEERSTALSQRD

SEQ ID NO: 21892 - DNA, 3060 bp, DROSOPHILA
taagttcgctttgtaatacgcaagctctttgatgctttctcggatgtcgtccagactacgatgcgtgaaagattttttgggagcggaatccagaattgcgggatgccatcgcttggccagttccttgatggtggacacatcgacgatgcggtaatgcaggtaagcatctaccaatggcatgaatttcataatgaatagtcggtcggtgtagacggagttcccaccaagcggacaggcgcgctttggtatgttcttctcgagataggatagcactagattggaggcttcttcgagattcacatccgagctcttgcatcgatcaataagacctgaattgtaatgatgtttcatgcaccactcgttcatcgagtcgtagacctcctgcggatggttgatggcaaagcatggtccctccgacttcacgttcaggtcctggtccgtaatgatgcaggccacctcgaggattttgtccttttcaatgtccagcccggtcatctccaagtccatccacacgatgtccgtgtctaagccacaggtgctgctcattctgtcatttgaattgaatgcgatgtggctccgaatttggcggttcagggacaatccgacgcgtcgaaggtgagcaagcatatatagctgtagcgcaggtttctttttgctaaatgtaaatatgcggcggttttaccatgtgtttgataacatggtatcgttacgataacaactggtcacactacaggcacattgcccaacactgaaagggggattcctgtcattacaggaacaaaacaaatcgaatattatgttcatacccaaataattgcagaataatttgttcagcattcttatttgtatccaccaaagtcgaaagtaattgtaattaaagttaaaggttttatgcgataacgacttggagccattttaactacagcgaacggtaatttctaacaaaccgcgcacggtcactctgtcgagttgatatttttatcaaaaattgttgtacggaaaacgcaaaaggtgtcgttattgttgcagcatgtcctcctcgtcggccagagaccaaccgggaacctcccatgacaacttcgaggaattctacacagaagtaagtgtggcggacggaaccgcaggctcagtttttattctacactgggtcgggctccttgcacggcagccgctccaaataaactaaacccttgttattatgtacactttagtaaatgattttgtgcctatattgcaggtgaaagaaattgaaaaacgtgattcagttttaactccttctcaacaaattgatcgtttacttcgtccaggttcaacgtacttcaatctcaatccgtttgaggtgctccaaatcgagcccgaggtcgaattggcggatataaaaaagcgataccgcaccttgtcaatcctcgtccatccagacaagaatcccgacaaccaggagcgcgctcaaatggcattcgatattgtgtcgcgttcctggaaaatcctcgaaaacgaactcacgcgcaaaaggtgtctggaggtgtacgaggaggcaaaggggcgaacggatcaaatggtgagttccagttcctcggagcattaagctctatgatcgtccggctttagaataattgaaaatccaattgcaatggcacattttctttattgtactgtattatattaatttgttcgttacctttcagattgcagaaaagcgtaaaaagcttaaaaaagagggtcggcccactgagccaatacccgaggacgatcccaccaagtacaagcacgccatctacgttatggtcatgaaactgtttgccgacatggagcgtcgacggcaaaagctcgaccaacgcgaccaggaggagcgaaagcgaaagcgcgaaacggaaatcgaggaggaggagcggataaaggcggaccgcgaatggcagcagaacttcgaagagtcgcgccagagccgagtaaacagctggcatgactttcagtcgggtgccggcaagtccaagaaagccaagaaacaaaaacatatgaccggcatgatggttccaccaaaatttaagcccgagtcgcgataatatagcttcccagcgcggcgccgctccttcactatcgccagatcacctccgccaaaccgcgtcgcgttgcacatgaatatttttacattttttttataagtatcctttggaattgtaattgacacgtgcataaaatatagatgtaagaaacacatttccgtcttgcctctttccttctacaatggatggcttggaccatctccttcgatcacagttctgtgtacaaggatgcggtgaaaacaatatcgcgcttgatagcagccgacgcctcctccatcttcgactgcagtcccggattgccaatccgaatggcggccgttttaacatcacgcagcgtttcattcagctgctgaatgcagcgaacaatgatgccctcctgcaccgtcgtcagtttcataatctcagcaaagggctgtgaattggattaaatggacagatatgaggataggcaaaattgcgtcctacagggcttcttaccttatttctagcccactcgtagaccacctccagcagaccaaagttcaggcgattatcggtctcgatggctgcctgaaagcgctgctcctcggcaagaattgtatcgttgatctgctcaaatgccgccacgcactccttcaacgcctctggtattaccggcttatcctgcatcttcgcctggaagacaaggccggagagcaaggcggctatttctgccggctcgagatcgttgaacatgttgcatagtatgagctccgtgataagtagctcattttggcccatctcacaggccacttttcccttaagtgtgacctcgtccagttcatctatgtatttcagggctcgcagcaccttcaatttgttacaatagtccggatagagggtcaaatttctcgcggagttcttgaagcgcagctcctcgatgtgaatctccagcattcggcgctcgtacactttggcgaactcctgttcgaatccggcaatgttggtatgtggcagaaattcgccaaccttacggagcagg

SEQ ID NO: 21893 - DNA, 795 bp, DROSOPHILA
aaacgcaaaaggtgtcgttattgttgcagcatgtcctcctcgtcggccagagaccaaccgggaacctcccatgacaacttcgaggaattctacacagaagtgaaagaaattgaaaaacgtgattcagttttaactccttctcaacaaattgatcgtttacttcgtccaggttcaacgtacttcaatctcaatccgtttgaggtgctccaaatcgagcccgaggtcgaattggcggatataaaaaagcgataccgcaccttgtcaatcctcgtccatccagacaagaatcccgacaaccaggagcgcgctcaaatggcattcgatattgtgtcgcgttcctggaaaatcctcgaaaacgaactcacgcgcaaaaggtgtctggaggtgtacgaggaggcaaaggggcgaacggatcaaatgattgcagaaaagcgtaaaaagcttaaaaaagagggtcggcccactgagccaatacccgaggacgatcccaccaagtacaagcacgccatctacgttatggtcatgaaactgtttgccgacatggagcgtcgacggcaaaagctcgaccaacgcgaccaggaggagcgaaagcgaaagcgcgaaacggaaatcgaggaggaggagcggataaaggcggaccgcgaatggcagcagaacttcgaagagtcgcgccagagccgagtaaacagctggcatgactttcagtcgggtgccggcaagtccaagaaagccaagaaacaaaaacatatgaccggcatgatggttccaccaaaatttaagcccgagtcgcgataa

SEQ ID NO: 21894 - protein, 254 aa, DROSOPHILA
MSSSSARDQPGTSHDNFEEFYTEVKEIEKRDSVLTPSQQIDRLLRPGSTYFNLNPFEVLQIEPEVELADIKKRYRTLSILVHPDKNPDNQERAQMAFDIVSRSWKILENELTRKRCLEVYEEAKGRTDQMIAEKRKKLKKEGRPTEPIPEDDPTKYKHAIYVMVMKLFADMERRRQKLDQRDQEERKRKRETEIEEEERIKADREWQQNFEESRQSRVNSWHDFQSGAGKSKKAKKQKHMTGMMVPPKFKPESR

SEQ ID NO: 21895 - DNA, 7297 bp, DROSOPHILA
ccaatccgcgcaccgcatccgccgcatcgcgggcactctcaaactccacgaaggcgaagcccggcggattgcgggctatccagacgctgcgcaaactgccgtacgctccaaatacatactccaggtcgttcttccgggcattgttgcccagatcgcccacgtacacctttctatcgctcggatggcgcgacatttctgtttatttcgcttttccccgggcccaaattaatgtggcagcagcgcagaaaaaaatcgatgatgggttggaatcacttgccaccgccttcctgggcactttggtcggtcaatcgcgcactggcgaacacttttagtcacttaacacggtcggcagatgcgaatttttgtgtttattttctatttaatgcagcgcaaaactcattttaccgggtagcaaacagagtgaccgtggacagaccattaaaagaaactgcggactcgctaaaaatataccaaaagttatgctcaatccgcgggtaacggtcagcaaaaggcgggagtgtctggcaacaataacttccagggccgaaaaatgaaaatctaaatatttccttttcaactcctacgaaaaaaatactcaaaattattttttcctttcaaaacattccatccgcctaaagaaagcgactataaaaccttttttagtatagtacatacaaatcatatacacacatcttattacatttttcacctttaagatattattgtactgcacaattacattttaatgtaaataatttataatacatttttttaaccagtcccctttaacttcctttatatttagccttcgtgttaaaagatagatataaattcgtaatttaaatttgttttctagtatctgttagattcagaatatatgtggagtatgttttagtatattccgtgcaacttgaggtattttttttggctggcggcggtcacacagcattaaacgtggcggcgatttatcatataagttaggttataatatcgtatgcatcaaaatcatacaattatttataagctagttttttaaggaaaaaacacttaaatttagtgaatttgcagtgcgaaatctttaaaaaaccacagacgaacacttggcacaaacggtaagaacgaaaagcgaccgaaaatcgcatttacataacaattacagtgctttaacaaaatgcctgcctagcctttcctttccaaaaaaaacgcctgaatacttgacgcagctgccattgctcggtgtgcgcgtgtgtttgtgtgtggggtaaaattggctcgattcgttcgaatcgtttcttcgccttttcggatttctcgacaaacagaggtttgtgcaattttcagcgatttttcgtgccactttcggcactctatttccacccatcaaagtggaaaatttcatatttttatacatacatacgaaaaaatgctatgtataacaccacaccaacgatcacgcacaccattgcacagcgctcggcggccattcgcgcacacacacgctctcacgcgcacacacgtacggccaactcatgcactcacacacgccagcagattgcggtgcaaaatacaaaaatcgtgcgaaattcgtaaaattgcgtattagaaatcttggttaatttcgctcctatttctccggcccgaaagcccaagtgtcaaaagtgtacccggcgtgaaagtgcattcgtgaattagtgagtgccccatcgattaaaccgcctggctggccaaacaaaacgaaaagcgtaaaaatacagtgaaatgcgtttgttcccttttctaagaactgagacccaagacatttcttgagacttctttgttgtatcatttttcataaggcacgtcttccattttgtttttttttcttcgttgcctttgccgtggtgaatttcccacacactgccagtgcgattcattcagttcagtcgtgagtactcagccagcaacaacaataaaacattaatcgtttaaagctggaggaaaactcgaaaaagaattgtttgttttttctttcgatggaattaacatttattttgagggcattggtttttggtacgtttgcttttcgctttccattcgcgttcacgtcacacatggcgttgccacatgttttttcacttgttaatgggcaaaatgtctgcgaagtgctgccagtaaagaaaacgggattttcttgataacaaagtgaatttaaacccgttgttcattggcgtttgcacaaaaatttaaatatactcctgtagatgtttacttggcccacatctggctgtaatctgtaataccctggcaaatggcgcgcaaatgtggtgaaccggcgacagctctcttttcaccttggaaatacataagttcgttgttctcattgataggcggcatgtgtgctggtgtgtgagtgaggctggggatttgttacaacaacaacaacaacaaccattccgctcgtgacacagcgaaaagaaaacaatactttcacgtagccgttcaaaaacgagtgaaaggggatgagagtagtgttggggtgtcgaaggaggagcaaacttgtgaacgtgtacaaaaagcagttagacgacaaacacacatacacgtgtacggcggaatctcttcagctgcgtgtgtttgtgtgtatgtgtaccggccggttgcttctgccgcttttttctcttttttttttttgttcctacctgtgcctttcataataactatgcgtgaattttttgtcatctgaccatttctacccattcgcaccaaagatctttacacagcaagaaatattgtctccgaaggaaatgtaaatttaaaaaaatttcaaccatagccctggcctttaattttaataacgtcagtttgcaaataaccaaattaactattccaccttgttttttcctgtgtagcaattcgattaaccggatttcttatattctatgtgtatctttccatgtgcctgcaacaaaaacaaaccgacgacatcgatattgttacgatagaaagttacgtgtgaacgtcgtggcttttgtttaattgttttgaaggaaaaaagaactttggcaacgttgaaaccaacctaagatattgcccaaaaagtaagatattgcccaaaagtaattgcggatttttcatatagtcggcgttgacaaattttttcaacggcttgtaactctgtaattgcattctttctttggtcagttatcagctgttacttttagcttccattagaaaaaaaagtgcgcgaaattttgtttttatttgtttgtttggcgtcaattttaatatggagcccacaaaggagcattttcgtcatatcttactttattatttccgtaaaggaaaaaacgcggagaaggttgctagaaagttacgagagatacgatggtatggtgatgaagccttaaaaggaagacagtgtcaaaattggtttcgcaaattccgttctggagatttttcacttagagatgagccacgttcaggccaaatgaagttgatgatgaccaaatcaaagcattattatttatcgaattagatcgtcatgtaacttgagcgtgagataggagagaagttaaatataccaaaaatcaaccgttcattataaaaagtcttggactggtgaaaaagcttgatatttgggtaccacatgtattgaaagaaattcatttaacacaccgaatcaacgcttgtgataagcaccttaaacgcaatgaattcgatccgtttcacttcaatggctgatatccaccaaaagaaggttatgctgtctgtttggtggtattggaagggtgtcgtatatttttagctgcttccaaggaaccaaacgattaattcggatgttcgccagaaagatggcaaaagattatcgaacaatatatttgattaaagttcattcgaagttttattaaaaatgcatttactttcatttacaaaatccgcaattactttttggacaacccatacataaaatacatacaaacataaatacataaaaaaaaacacaaaaaaaaaataccagcagcagtgtaaaaattgtatattctcccccaaaacaggcaaccaaccgaacacaagttaatttctttgcaccccgtgttaataaaaaagcggcaagattacgtcaattattgagaacctacccggcgccatagctcacaaccacaaccaaaacaacatcatggaggaagacgagaggggcaaactttttgtgggcggtctatcctgggagacgacgcaggagaacctgtcgcgctacttctgccgcttcggggacatcattgactgtgtggtgatgaagaacaacgagagcggcaggtcgcgcggctttggcttcgttaccttcgccgatcccaccaacgtcaaccacgtgctgcagaacggaccgcacacgctcgacggtcgcaccatcgaccccaagccgtgcaatccgcgcactctgcagaaaccgaagaagggcggcggctacaaggtcttcctgggtggcctgccctcgaacgtcaccgagaccgatctgcggaccttctttaaccgctacggcaaggtcaccgaggtggttatcatgtacgaccaggagaagaagaagtcccgcggcttcggctttctctccttcgaggaggagtcctccgttgagcacgtgaccaacgagcggtacatcaatctgaatggcaagcaggtatgtgatcgctggaaagttgtgctatacttacaaaacataattacctatttctgcgaagcatctagtcttgcaaaactataaattgtgaatatggaatattcataatttttttcgatttactaaactttgtttcatataatacaagagtgctatttgtaacaaaacatattggaaataatttttacttaaaaacgctcaaaagaatacactaacaattaattgtacaaagaatataagttaacatttttggcaacagcactaataatcattattatccccaggtcgaaatcaagaaggccgagcctcgtgatggatctggcggccaaaactccaacaacagtaccgtgggaggcgcctatggcaagcttggtaacgagtgcagccactggggaccgcaccatgctcccatcaacatgatgcagggccagaatggccagatgggtggaccgccgctgaatatgcccattggagcgccgaatatgatgcctggctatcagggttggggcacctcgccgcagcagcaacaatacggctacggcaacagtggcccaggatcgtaccagggatggggagctccaccaggaccccagggaccaccaccgcagtggtcgaactacgctggacctcagcagacgcagggctacggcggatacgacatgtataactcgacgtcgaccggagctccttcgggaccatcgggcggcggcagctggaactcgtggaacatgccacctaactctgccggacccactggggcaccaggagccggagcgggcaccgccactgacatgtactcgcgtgctcaagcctgggcgacgggcggtccctcgaccactggaccagtgggcggcatgccccggaccggacccggtaattcggcctccaagtctggctctgagtacgactacggcggctatggatccgggtacgactacgactacagcaactatgtgaagcaggagggcgcctcgaactacggagcagggccgcgatcagcgtacggcaacgacagctccacgcagccaccctatgcaacctcgcaggctgtctaaagagagaaggatcgtgtggaggagaagtaggagtagcggagcagagaggagcggagtagcatgtcgtcctcggcgaatgatgaagaagacagaaaagatggtggtaattgtaagctaaagcgtcgtctgttcgtttttatttcagatcagatcagttgttgaaattaatatttaaaactcttgtacaactattatttaaagcgaaaaaaaatttaacatgagaataactagcgacaagtcagattcatagatatacatgtatgttctatagcagcgagtatgtaattcataggcgaaacatcagcactctcacccatttagacaagagaacattatttctttcatgcgcctcataaacaccacactcaacaagcattctcctgtaccccacactcaccaacaaaccaaccaaccagccaggatcaactaacaagatcttcccaaccaactaaaacccgtagacacttatgatacatggcattaacaagaaacaaaatagaaatgtgaagatataaacgtaatgatttacaaatataaagtttagctaattagacacaagaaggtcaagaatagagcgcgaaataccaacacaaagaacataagaacttataattttatttaaagagtaaacaagtaaagatccccattaattactaaaattagtaaatacaaattcgaaattgtacattttaaagcaaaagcacgtcgttagccgatcaactttcgccaccacccgctttctgaatcaggcgacaaggtttagtaagggtttgaaaaggaatcgagtcgaatcgaatcggtcgattttgagaactttgcttgccttagcttttatgactcattgaccggccgcgcggttcacagatatgggaggttagtagtagttagttttgttttcagacaatggttgaacccaatcggcaaatgttttacttggttttatcggcaataggtcgttggatgggagtggtgtggtggcgaaatagggcggtactgacttgggaaagatacgttacaaaattaaaaatttaccatttaaagtaaacaaaacaaaaactagctaaaagttaaactacatatataaagaaacctaattaataagcgtacgtggtcgtttacatctaagcgaaagttgaacttgaaactagaattatatagtgcgttggatttattatttagttaaagcgaaatgaaagagccaagcagcagcagcatgataatgattgattataatggatatggaaaccaacaaaacacactcttaaccaatatacataaaaactataaacatacttataaacaatatatatatatatatatttaaagcgagtatatatatataaaaggaaacaaaaaaggaaaaaagagtaaaaaaaagagcaaaaggaaacgtaaatttaaagctacagttaatgaaaataatgagtacagagttaaaaaaggggaggcaggaagagagaataggacaagttaaacaagttacaaaatacgatgcttagagttgcgttgcacattttttttaaattttcatcgtttgccaagcagacaacaacatcagcaaaaaaaaccaacaaccagctagaagtgtgca

SEQ ID NO: 21896 - DNA, 2187 bp, DROSOPHILA
caaaatcatacaattatttataagctagttttttaaggaaaaaacacttaaatttagtgaatttgcagtgcgaaatctttaaaaaaccacagacgaacacttggcacaaacgaaagttacgtgtgaacgtcgtggcttttgtttaattgttttgaaggaaaaaagaactttggcaacgttgaaaccaacctaagatattgcccaaaaagcaaccaaccgaacacaagttaatttctttgcaccccgtgttaataaaaaagcggcaagattacgtcaattattgagaacctacccggcgccatagctcacaaccacaaccaaaacaacatcatggaggaagacgagaggggcaaactttttgtgggcggtctatcctgggagacgacgcaggagaacctgtcgcgctacttctgccgcttcggggacatcattgactgtgtggtgatgaagaacaacgagagcggcaggtcgcgcggctttggcttcgttaccttcgccgatcccaccaacgtcaaccacgtgctgcagaacggaccgcacacgctcgacggtcgcaccatcgaccccaagccgtgcaatccgcgcactctgcagaaaccgaagaagggcggcggctacaaggtcttcctgggtggcctgccctcgaacgtcaccgagaccgatctgcggaccttctttaaccgctacggcaaggtcaccgaggtggttatcatgtacgaccaggagaagaagaagtcccgcggcttcggctttctctccttcgaggaggagtcctccgttgagcacgtgaccaacgagcggtacatcaatctgaatggcaagcaggtcgaaatcaagaaggccgagcctcgtgatggatctggcggccaaaactccaacaacagtaccgtgggaggcgcctatggcaagcttggtaacgagtgcagccactggggaccgcaccatgctcccatcaacatgatgcagggccagaatggccagatgggtggaccgccgctgaatatgcccattggagcgccgaatatgatgcctggctatcagggttggggcacctcgccgcagcagcaacaatacggctacggcaacagtggcccaggatcgtaccagggatggggagctccaccaggaccccagggaccaccaccgcagtggtcgaactacgctggacctcagcagacgcagggctacggcggatacgacatgtataactcgacgtcgaccggagctccttcgggaccatcgggcggcggcagctggaactcgtggaacatgccacctaactctgccggacccactggggcaccaggagccggagcgggcaccgccactgacatgtactcgcgtgctcaagcctgggcgacgggcggtccctcgaccactggaccagtgggcggcatgccccggaccggacccggtaattcggcctccaagtctggctctgagtacgactacggcggctatggatccgggtacgactacgactacagcaactatgtgaagcaggagggcgcctcgaactacggagcagggccgcgatcagcgtacggcaacgacagctccacgcagccaccctatgcaacctcgcaggctgtctaaagagagaaggatcgtgtggaggagaagtaggagtagcggagcagagaggagcggagtagcatgtcgtcctcggcgaatgatgaagaagacagaaaagatggtggtaattgtaagctaaagcgtcgtctgttcgtttttatttcagatcagatcagttgttgaaattaatatttaaaactcttgtacaactattatttaaagcgaaaaaaaatttaacatgagaataactagcgacaagtcagattcatagatatacatgtatgttctatagcagcgagtatgtaattcataggcgaaacatcagcactctcacccatttagacaagagaacattatttctttcatgcgcctcataaacaccacactcaacaagcattctcctgtaccccacactcaccaacaaaccaaccaaccagccaggatcaactaacaagatcttcccaaccaactaaaacccgtagacacttatgatacatggcattaacaagaaacaaaatagaaatgtgaagatataaacgtaatgatttacaaatataaagtttagctaattagacacaagaaggtcaagaatagagcgcgaaataccaacac

SEQ ID NO: 21897 - protein, 421 aa, DROSOPHILA; identical to SEQ ID NO: 21864

SEQ ID NO: 21898 - DNA, 6794 bp, DROSOPHILA
cgatacaatctcgtattaggcaaaattttgtattattgtaatgcatttacgtttagatatccacttcgatgccgtgttgttcgatgtagacagcaaggatctcagtttgggaatgagttgtccgccccaaagcttcctagctacgaagatcctgcagcacataaaggagattatcggtccgaaaggtctctttatgctaaatctcgtgtgtcgcgatgagagccttcgcacagaggctctcaacaatctgcacaaagtctttcctgctgtgtgcagctacaaactagaggaagacatcaacgagataatatattgtgccaacgatgaaaagtacaaaactgtcgagcagtggaagaaaaacatgggaaccgctggtcgaggattaaacagtgccgtcaaggagacaaagctggctagtgaagacgcccttgaggtggcagagttcctcagcgagttgaaaatataatctttaacgtagaacaattagcaaagacaatttacgttttgtaaataaatgttaattgtatttagttataaataaagactaaactattaactaattgtatgtagaaattgctaagaataacaaactaaatgtgtggcaacaacttgcaaatgtttcgttcatcacttaatgtagataactgtgggattgggtgaatgtagcaagaatgacgaggcttggaatatacgtacataattaacctaatctggtatatcgtttaccttacgcatgcaagcattctacaaaatatataagtactttacttaaatttgttgtttttcgcttaacagtcatttgcatttcactgcaacacaaaaggaactctcacttttcttcacttcacttcacagacctttctataatccgcaaaaaattactattcatttgtacaaatcatttatcaaaatataaacccaacaggttcaatccgaatccaaaataatgtacaaatgcgcaaatctaaaaacgttaacaagtcgaaacactgggttctagttaaaaatcgaaggccttgcgaaagaggttgttaagggcgcgctgtttcttcttggtggtggatgaggtagtgctgccaccactgccactaccactactgctgcttgccagaccgccagacattgcgttgccattcccattcggggtgatgcgtccctccccggaggacagaatggcctcgcccagtatgcgaaacgaattctgtgtggtggcggtgctggagctaagtgggaagtttacctccgacagcgacgagctgtccagactggcgctgggcagactcttgctgaccagcttcgcctgctgttgctgctggtgcttttcgcttcgtttgagtcggtaccactcccaggatgtgggctcgtgcaccgcatggctgtttttgacgccattaaagctgtagcccttgtttttgctcttgctaaagggcgacttaaagaatgccggcgaggacaggcgtctagatttcttggtgcctggctctttgccaggttttccgtctactgtgtccacaatctggtagcccgagggtccttctggcataaactcattgtaggccaaatcgctggtgggtataaagttagctagatcatcatcgtcaagcattaggctctcgtcaaagtcgctctgcgtggctggttcttcagcttgcaaatccggcgtataggtggctggcgcggattcctggcgcttaagacccaatggtttcagttgctgaagggattttttctttcccggcttaccgcagctttgctttatgcttttaagggtgtctgaagaggggatttctcgattaaatttgaattcgtttcagggttattcaagccagtacttacccacatcgaagaacttgtccgtttgctcgccgcaggacgtctccgtggtatccagactgttgtgccacgagtgcttggctccctttcgcctgtgcagagaatttcggacacttgcaccgccatttgtgttggcaatcgccatattggcggctatgttattgttgctgccatagcaaactgaaattttacgctgacggcttggtggatccaactcctgcatgttgctgtccccgcactccttcagaatgagcatggcctcctcgcttggacgccgttgcttgggtgtgctctgatttggcgtctgttcataggacttacggcgatccagttttggtttcgcagccacaggtggatggcccgcctggtccttcttcagtagctgttgttgctggcgtcgcagcttgcgatagtagacagtgcccaggacgagcatcaggaagatgcaggtgcccacaatgatgatgaccaggatgcaggcctgcacctgatacgacaatgccctcacctcgccggccaactccgcgctgtgctgctggtacagctgctcctgctctacgtaccgcctgctttgatcctccagttggcgcaccgtaagcgtctgttgtgtcagcgtctgctgcagctcctccacttgcttcttgtaacgcctcgagagctcctccaggtattgtccagaaagcgacatgtttcgttcgagcgcctacggaagacagaataccagtgaacgtcagtggttagcgaatgttgtgggggtaacacggagggaaatagttagtttgaagcagatactattccaattaaaaaataatttcaaattaaattagcaaagctatgctgccaagaatcaaccggaatttaagagactattataaataatcaaaaattagagaaaagagcacccttcagcatttcatatgtattttttttatgtgtagctgtggcggggttcgaatggattcgcatatgtatattgatgacgtcggtcggcaaggtagcgagttggctggcagaattgttacaaggatgaaccccgcacagtccttggacggagtccaaaacgggaagtggctaccgctggtaatgagcagccggcacgcaagtcgactataaacaagtcagaagagattagggagcaggacgccgaatatgggttaccttagtcgtcttaccaagtaagttctggtttcggccctgtgcaaggaagtcataatttccttatacgatttctacgccaagcggttcaaactttataaacaggaataggaaaaatgcaaggaatgaaaaaggtcttttgatattttgaagtacatttgtacagtttgccactataattaattaactccttgatagggtataattttgcttttgacttcctaccctgccacgctacgtccatgccccatcctatcctgcgtgggtgattgtcgtctagctagtttctagtttcattgtttgtttatttctgtattatttgcctcttcactgatgacgcacatcaatgggcgaaaacccacttaaaacagggagctcgagccactcacctttatgcgattggagagcctgatgaacacactctccgactgggctccattcgtcagcttctgctgcatgttaacactggatagactggctggtcctcctgctccgacaatgccggctcctccgatgttggcgtttccgttcaccacggcggctgcagcggcagctgcacctccgccagcggttatcgaagccaccgtcgtggtcagtaggttgtcaatgccgtcccagttagccggattaccctcctccatacccagatctccgttcgctacagcttcactagagccagggagtgcatttgtgctaggagcgtcagtgaacgattccacatcgctgggctgcaaagttgttggaagtgttggctccggaggaagctgaactttgacaaccacttcctcaggttccgacggcatattgaatatattgacgtcggcaggcgtggagttcgttgtggagactgtttcgctggaggtcgacgactggtcttccattgaaggcacttcttggctcacctcgggcaccacaacctcaagacttggtgtaagcggttcctttgtgggcgttttactgttctcacaatcctgccgaacacccgtagcagtggcgttatcctgcactggttctggtgagcttacgtgctgcttcagagaaggcgcctttgtatggttatggtcagtcacattctgctccgcctgaatgagtttacacatggctcccacgtgctccgctggcaacatactaaggaaatagctctgctccttacccattttactggcgaactccgagcccgtaaggcttatgccgaactcctcctgacacacgcgactgtttagaagatctgaccgtaagtgactaagactgaggagtgcctgcagctgctggaactggcaggataaaagactgttaatcctctcgaccagggtggtattacaattgatacagctgaaggcttcaaatgctggcgtttgacagagcaccgattcctctgaccattttagagcctttgtgggctttacgagaacctctgcggccttcttgaccatttgcatcactgcatccgaggcgctttgaaagatgtttccaccactgcccacggctgccttctgttcttgagcgccgtagtcgtcgtagaaatcgtccaggtcatcgcttggtcggatttccgtttcgaaagcctcgtactcggaggtgccaaacactcggaacaacgacagcggacaaaagtgctcgttggcgtagtgcgacgtgatatcgacgcgcacgaattttccgaataagtgtggatgaagctcaaaagtctgaattgttcgcttgtcctccgccgcaaagcgtcccacattgctccagtctcgtgtggggaatcgtttagaaacggctaccgtaaagtttttgggggacgaactgaacagctcatagttggccacgtccaccttctgcgcctgaatggcctcacacagctccaccacgaaccaaatccgactttcgcaagtactcagcatgtactcatcggtggattgggttagcacagcctccgtatgcttggactcggaattgtgtgcgatgatcttggctccgcagtccggcgaggcgtagttcttggagcgcagcttcagcgtcggcggctttccactggaagatccagtgttgttcttgcgttgggcggacttatttaccacctgctgctccaactccatggcctgctccctgctggcctccgcctccatttgcttctgcgcccactcggaaaacactggcatgggcacttcctcgttggcattcgtcaagttagccgtgccctctgtcccattgaatgcagctgatccgggctgcaactcctcgctgctctcttgggtttcgcccactgtcgcagcttctggtgtgaccattccttccacttgaatgcctccgccaggatcgtttatcttcggcatttgctcgtctagaatgagacaagttgaaaagtcaaaatttgtctctgaaagaggtaagacagtagagatgtcttgcctttttgaggaacttcctcgtcagcctccgaaacttgcatgggctgatcctcatgaggttgctgctgctgctgatgctgctcctcgtcgctgtggtttccggctgtggccggggacccgtcaagtataaccgaatccaggcggttcataactcgatccagcgggagctctgttattgtgacagctggcagctccgtaatgatctcgggaaaactggaagattattgagaaatcagttttaattgagagcctgtttgagtatttttgaattcggccattcggccaatatcccacctcatgaacaccgttgatatggctattatttgggagaaccatatgatccagaagaatattagaaacatggtcaggttggttttcagcttattcaactcacaacaaatgaacttcataacgaactgtagcagcatttttcttacattcattttcggggctctaattgcgggtgataatttatttgctcaaatacacacataaatatcggcttgaggctcaatctacaaccacagctgtgaccctgctgtattcttacaccccatccgtctgcatcggcgaaccgagaacccagctagatagaagccacgttggaatctcttccagctgattgccgcgaactgagtatctggagcaaccataacacacgcgactgacgatggtgcagagtatgtaaataggaaaacaagtactctagctcacaatgcgaacgttttgttttacttcacttttaactctgtggaagcgaaaccccagcagctgtgaacaacgtcaggcgaacttaaaaaggttgttaaaaaaaacccaaatgtcgcacagcgatttcagtggtctacatttaaaagcgggctagataagaatcgcttacttattacttgacatgatcttgccgagaaatattgaaatcactctgggaaattcacagtttaagcagctttcgaatctcagcgtaaaatcaaattttgaaagcaccagtttattaatatacacgtattttctctactttctcacttttagtggctgcacttttgcggaaaatattcaatgcagttttgcaattatgttgaatgtttggctaaaaatgatttcgggatgcctgtgtcaaagaaaatctgacagggcgaatgtagtagccataaaactaattaagcaaactgaaaagctatataatatactcatatatggctcattatattatatatgcctttcaaggaaatgtaccttaaaatagaaattgtgtcaaagcgccaatttaaaaatattatttgggggcgttgacagtttatacataatgagttcaaactatgtcaagttgagaacgcgataagagcaattatatttggtggatatagtccgattttatatggcattttctttgtcactgtccgattttcataa

SEQ ID NO: 21899 - DNA, 3690 bp, DROSOPHILA
atgaagttcatttgttgtgagttgaataagctgaaaaccaacctgaccatgtttctaatattcttctggatcatatggttctcccaaataatagccatatcaacggtgttcatgagttttcccgagatcattacggagctgccagctgtcacaataacagagctcccgctggatcgagttatgaaccgcctggattcggttatacttgacgggtccccggccacagccggaaaccacagcgacgaggagcagcatcagcagcagcagcaacctcatgaggatcagcccatgcaaataaacgatcctggcggaggcattcaagtggaaggaatggtcacaccagaagctgcgacagtgggcgaaacccaagagagcagcgaggagttgcagcccggatcagctgcattcaatgggacagagggcacggctaacttgacgaatgccaacgaggaagtgcccatgccagtgttttccgagtgggcgcagaagcaaatggaggcggaggccagcagggagcaggccatggagttggagcagcaggtggtaaataagtccgcccaacgcaagaacaacactggatcttccagtggaaagccgccgacgctgaagctgcgctccaagaactacgcctcgccggactgcggagccaagatcatcgcacacaattccgagtccaagcatacggaggctgtgctaacccaatccaccgatgagtacatgctgagtacttgcgaaagtcggatttggttcgtggtggagctgtgtgaggccattcaggcgcagaaggtggacgtggccaactatgagctgttcagttcgtcccccaaaaactttacggtagccgtttctaaacgattccccacacgagactggagcaatgtgggacgctttgcggcggaggacaagcgaacaattcagacttttgagcttcatccacacttattcggaaaattcgtgcgcgtcgatatcacgtcgcactacgccaacgagcacttttgtccgctgtcgttgttccgagtgtttggcacctccgagtacgaggctttcgaaacggaaatccgaccaagcgatgacctggacgatttctacgacgactacggcgctcaagaacagaaggcagccgtgggcagtggtggaaacatctttcaaagcgcctcggatgcagtgatgcaaatggtcaagaaggccgcagaggttctcgtaaagcccacaaaggctctaaaatggtcagaggaatcggtgctctgtcaaacgccagcatttgaagccttcagctgtatcaattgtaataccaccctggtcgagaggattaacagtcttttatcctgccagttccagcagctgcaggcactcctcagtcttagtcacttacggtcagatcttctaaacagtcgcgtgtgtcaggaggagttcggcataagccttacgggctcggagttcgccagtaaaatgggtaaggagcagagctatttccttagtatgttgccagcggagcacgtgggagccatgtgtaaactcattcaggcggagcagaatgtgactgaccataaccatacaaaggcgccttctctgaagcagcacgtaagctcaccagaaccagtgcaggataacgccactgctacgggtgttcggcaggattgtgagaacagtaaaacgcccacaaaggaaccgcttacaccaagtcttgaggttgtggtgcccgaggtgagccaagaagtgccttcaatggaagaccagtcgtcgacctccagcgaaacagtctccacaacgaactccacgcctgccgacgtcaatatattcaatatgccgtcggaacctgaggaagtggttgtcaaagttcagcttcctccggagccaacacttccaacaactttgcagcccagcgatgtggaatcgttcactgacgctcctagcacaaatgcactccctggctctagtgaagctgtagcgaacggagatctgggtatggaggagggtaatccggctaactgggacggcattgacaacctactgaccacgacggtggcttcgataaccgctggcggaggtgcagctgccgctgcagccgccgtggtgaacggaaacgccaacatcggaggagccggcattgtcggagcaggaggaccagccagtctatccagtgttaacatgcagcagaagctgacgaatggagcccagtcggagagtgtgttcatcaggctctccaatcgcataaaggcgctcgaacgaaacatgtcgctttctggacaatacctggaggagctctcgaggcgttacaagaagcaagtggaggagctgcagcagacgctgacacaacagacgcttacggtgcgccaactggaggatcaaagcaggcggtacgtagagcaggagcagctgtaccagcagcacagcgcggagttggccggcgaggtgagggcattgtcgtatcaggtgcaggcctgcatcctggtcatcatcattgtgggcacctgcatcttcctgatgctcgtcctgggcactgtctactatcgcaagctgcgacgccagcaacaacagctactgaagaaggaccaggcgggccatccacctgtggctgcgaaaccaaaactggatcgccgtaagtcctatgaacagacgccaaatcagagcacacccaagcaacggcgtccaagcgaggaggccatgctcattctgaaggagtgcggggacagcaacatgcaggagttggatccaccaagccgtcagcgtaaaatttcagtttgctatggcagcaacaataacatagccgccaatatggcgattgccaacacaaatggcggtgcaagtgtccgaaattctctgcacaggcgaaagggagccaagcactcgtggcacaacagtctggataccacggagacgtcctgcggcgagcaaacggacaagttcttcgatgtggacacccttaaaagcataaagcaaagctgcggtaagccgggaaagaaaaaatcccttcagcaactgaaaccattgggtcttaagcgccaggaatccgcgccagccacctatacgccggatttgcaagctgaagaaccagccacgcagagcgactttgacgagagcctaatgcttgacgatgatgatctagctaactttatacccaccagcgatttggcctacaatgagtttatgccagaaggaccctcgggctaccagattgtggacacagtagacggaaaacctggcaaagagccaggcaccaagaaatctagacgcctgtcctcgccggcattctttaagtcgccctttagcaagagcaaaaacaagggctacagctttaatggcgtcaaaaacagccatgcggtgcacgagcccacatcctgggagtggtaccgactcaaacgaagcgaaaagcaccagcagcaacagcaggcgaagctggtcagcaagagtctgcccagcgccagtctggacagctcgtcgctgtcggaggtaaacttcccacttagctccagcaccgccaccacacagaattcgtttcgcatactgggcgaggccattctgtcctccggggagggacgcatcaccccgaatgggaatggcaacgcaatgtctggcggtctggcaagcagcagtagtggtagtggcagtggtggcagcactacctcatccaccaccaagaagaaacagcgcgcccttaacaacctctttcgcaaggccttcgatttttaa

SEQ ID NO: 21900 - protein, 1229 aa, DROSOPHILA
MKFICCELNKLKTNLTMFLIFFWIIWFSQIIAISTVFMSFPEIITELPAVTITELPLDRVMNRLDSVILDGSPATAGNHSDEEQHQQQQQPHEDQPMQINDPGGGIQVEGMVTPEAATVGETQESSEELQPGSAAFNGTEGTANLTNANEEVPMPVFSEWAQKQMEAEASREQAMELEQQVVNKSAQRKNNTGSSSGKPPTLKLRSKNYASPDCGAKIIAHNSESKHTEAVLTQSTDEYMLSTCESRIWFVVELCEAIQAQKVDVANYELFSSSPKNFTVAVSKRFPTRDWSNVGRFAAEDKRTIQTFELHPHLFGKFVRVDITSHYANEHFCPLSLFRVFGTSEYEAFETEIRPSDDLDDFYDDYGAQEQKAAVGSGGNIFQSASDAVMQMVKKAAEVLVKPTKALKWSEESVLCQTPAFEAFSCINCNTTLVERINSLLSCQFQQLQALLSLSHLRSDLLNSRVCQEEFGISLTGSEFASKMGKEQSYFLSMLPAEHVGAMCKLIQAEQNVTDHNHTKAPSLKQHVSSPEPVQDNATATGVRQDCENSKTPTKEPLTPSLEVVVPEVSQEVPSMEDQSSTSSETVSTTNSTPADVNIFNMPSEPEEVVVKVQLPPEPTLPTTLQPSDVESFTDAPSTNALPGSSEAVANGDLGMEEGNPANWDGIDNLLTTTVASITAGGGAAAAAAAVVNGNANIGGAGIVGAGGPASLSSVNMQQKLTNGAQSESVFIRLSNRIKALERNMSLSGQYLEELSRRYKKQVEELQQTLTQQTLTVRQLEDQSRRYVEQEQLYQQHSAELAGEVRALSYQVQACILVIIIVGTCIFLMLVLGTVYYRKLRRQQQQLLKKDQAGHPPVAAKPKLDRRKSYEQTPNQSTPKQRRPSEEAMLILKECGDSNMQELDPPSRQRKISVCYGSNNNIAANMAIANTNGGASVRNSLHRRKGAKHSWHNSLDTTETSCGEQTDKFFDVDTLKSIKQSCGKPGKKKSLQQLKPLGLKRQESAPATYTPDLQAEEPATQSDFDESLMLDDDDLANFIPTSDLAYNEFMPEGPSGYQIVDTVDGKPGKEPGTKKSRRLSSPAFFKSPFSKSKNKGYSFNGVKNSHAVHEPTSWEWYRLKRSEKHQQQQQAKLVSKSLPSASLDSSSLSEVNFPLSSSTATTQNSFRILGEAILSSGEGRITPNGNGNAMSGGLASSSSGSGSGGSTTSSTTKKKQRALNNLFRKAFDF

SEQ ID NO: 21901 - DNA, 21889 bp, DROSOPHILA
atccaaatatgttcgaggtctgttgcggctgcgagaaggctgcaaagaagaaattactaaattagtaacatgataccacttcaaatgatcgtgtctaacctccaaaagccgtgggctgagctgtggcagtgcttccaaatcccgtggacgtgtttgccccgaataagcctccggcgggctgagctggtgtggctgccgcaccgaacagtgactgctgcgcgggttgggcggcaaaggtggaggtgtttccaaaggccggtgcggcgggtttgccaaatgccgactggccaaacggagtggttgttgtggtgccgctgaatccgccaaagctggtggccgccggagtggctccgaagctgggtttcgcgccgccaaacattttgctcgctgctgctgctcagataacaaacatatactaggtagatcccctgctttgtccttcgccggaatgccaactatcgcgatgagcaatgcttcgatttcaccacgttgggcaagctggggcggctgcgccggatgcgaaggttgtgggaccggacaggcttagcttaaaacaaataaacactcgcgaatttgtcaagtcagcaggagtcgaccgagtctgacgcaaaaagtggacagaaatggcgcgccgattttttcacgatgttgaagaaaatgcagccaaaagtgtgaccaaggcgtgaaatcgcatgcaaaaatacactgtaaaaaagcaggatacaactgccaggcgcataactattgaccataacttatttatggtcttaataaaatttttgcttggtgcctccgaagcaaatttactatgaatgtgtggaaaatgtattttataacttgggtttctcgtattttgtaggtaagctcgattttcacatttttatgtgaccgtactgcgaacaaagtgaaaacccatttgacatcaacggtgtgaacacgctgtaaggggcactctatatttgatattttcgattgggaacagtacggtacttctgggcatcgagcacgctcattcacaacaaacagttgaaacgcgcgggttgttttccgagagcggttatttaattaattggcaactgtcacacacgagtgtgtgtgcgatcgagtgcgtgtacatgtgataattagctgagcggcagcggccaactcccagcccaaatacaagtcgagaacaaaacgagcgaaaaacggcgcaaaatgcatttgcggagcgacaatttgtgcggaatgctagcttttgtgcaataattatttattggttgcaattgtccaaccggtgtgcttttcgtcgaaatctgtagcgaaatcggaggcgaaatgcttgtgttggcggcattgtgaaaacgaaatcaaaatttcaactacgtgttgctcttttgccgttgcctaatttaatgtcttgttgtttttattttcgcaaacgaaagtccatcgctttgcatgtgtgagtagcgatcgtttgtcgccgtgttggtggtaaaagtcggcgcaaaaacaacaatatcagcaacaacactagtagaagcaacaacaacgagaagaaaagccttcaagatgagtgtgtggagcgactgcaatgccaagcaggcagaattcggcattggtaagttggcaatgcggctattaagccgataaattaggtagaatatggctaggcaggaatgtttaaacaaagtgctttgtaaacaacaataaaggaaaactttatgaactgttgggcgctcttttccagagcacacctcatctccacccccacctctctctctaactctctctcttatttcaccgcatgtgtgtgcctcctgctgcgttgctacggtaaaacttgttgcaccttctcgcttgcacacgctcactcggctgctgttgatcctccctttcccgctctcactgtgttgtttcgtttttcatttcatttcatcctgctcagtcaacactagcataaaattctgagatttgctcttgaaactaaaacctgttttctattgtctctctcgcttttcatactgtctctgtctctcacgtgcaactgcaacacactgccagaaaaaaggcctggtacacataaagaaattttatacaattaatgtaattttacataaacttaaatctgaagtactacaacattagtactacaacttttacgtatttacgggtgtgggatttgaaacctggtctttgtaaacccaaggcaagctgcatcaagctgacagtagaaatgtttattttctgtgtacactgtgagacaaatcccaattcaatggcagtgaccatgaaatatctaatcgcgacccgcttcgaatgcgtgtgaattttttatggatctcgttttgttgaccttttcaccgctgatcaatagatacgacaggtacataaagtacaggtacctctagtcccaggtagatcgagtggaactgggaatctcgttcgttaacactcgaatggagcttgccggtgtgtttgcacttgttatttacacacgtttgcctctgcctctgcccttttttgtgtttgcgcgtttactagctgtcgaaatcgctgcgagtacgagtatctgatagtaccattggggcgtggccaggtggacgggggtagtgggtggtgagcggtggttggtggtataatgtaattaagcgcgataatatttggaatatggggcggcagataagttagtcgttggcattgagtagcgaatttggcctttgtaatgcgaaaacgacttacagcatatacgaaattcaaaagaaactccttatcaatagcagtttgatgtattcttgtcttatcgctgttttccattctgtttgcataccttttgtttgcttcaattttcaaattctaagcaaacagccggttgccccacattttgtaaaaattttttaagccaaaagatttgcttggcagctcatccattttgcgtattattttcgaaatattgtagtttctcgaaggcaatagccattgagtaatcgctttatcactttatgggccccattcgagttatcgtttatcgatgtgtgcctgtgcttgtgggtggcactcagctgaattgaattccgttgaagtgcgagtgagtgagcgagttaaagttaagtcctcggcctcctgcatagcggtagtcactcgcatataaaagatctggtgcatacatacatatttttcgtatgctgttcccactcactcctttggatgagaatgctgcatctccctgctcactcacctccatgcacagtgggatgattcctgaaatttacctgaaatatatataaaagtaaaccaagcgaatagccacaaaatgaagggatgtttactcataaaagctaattaacttccatcaaaaaggcttttcaaatttacaattaacaaaaccatatatttaggtaactagtataaactagcataatttgatcagcttagtaataattgttttaatccaaaacgtccacttagttattctaattgccccactgtgccgcatatgcttttgaaagtttgcctgcggtgacatcttcacttcattgctgcactactccactgttcattgcctctagttggtgtgcacctgcagggctccccatttccacccagacactcggttttatttacccactccacgcagatgcattctacatttaaatttgaatagcaaaaacaacaaccgcggtaataataaatacaacaacatcaaatggagggaagagctcacaaagtaaacgtaaaacttaatgatgcctgagagtagtgaaaagtgtagtggaaacccatgccgaaagaatatatatacagaggggatgggatgggttggtatggaatagaagggggcctagttgatttggtttctgatttcagagtctggcttttctcaatttaattaaaattttccactccgttagagtttaagatgcatgaaacgccttttgatttgcataatttcaaaggaaagcatttttcctagtccatttccacacacaacaagtgaaaacttaatcagatttggaagcgagccgaaaaaagatctgctcatatttctaacctaataaagttgggttaccattaaattgtatctactagattcaaaaagtcaaggattttgtaactgtgttacttataaacaaaatatagaacttagcaactaaccctgtaatcggctgccatctttaatgtctctgccttttgtaattttgaagataatgttgcttaaccgaataagagtcccccgattcgtcttatcacgtggcagatgcccttccttcggggcggctgcataattgtttgctctgctgactcagatcggggaacactcatccccggactttaccctcacacatgtacacatgcaccatcctccatcaacttcggatagttgagcaaccgcccaagtgactcgcacatccacttgtgattctgatttcagttggatcgtcaccccaggaaccctccactatcagaatacactcccccttggcaagcgaatctccactttccatttcgcaatcaaaatggaaactcaatcgcttcccccattccaagtcgcaactattcattccaccccgtttcgaagattgccaatgtcgaagattgtcgcatctttggtttcccttctatgctaattgaccaactgcaatcttcgattgctctcggaaattgcttaattaaacataaattgcctgccgcaaagagcagttatggagatcgaatccgatcagggaaagtgagcggggaagcgaaaaggggggcagggggaggtggccgcatcattggggcacagtgcgtcatccggtgtaagttgaaactggtttcagccgctcgagaaatgtgagctaatgttacaaaggttaccaggttccattgaaaaatttttcacaggaggttttagacttttgatcgcataaggtagtcattaaaaatatgttttaaaaacataaacagagcagctttctgtttaggagaaaatattttgcttatatttttgtatttcatagcatttatctttatgcatttttttctttcgttagttctaagaaaaacccaaatatatataattttaaaaagaagcattcgtttcatttatttttaaagaattctaagtagaaaaaatgtcccatattgatataattgttttgagaagacattattctatccaagcagtaaaccttacatgttcaaagatccataaaaccaattgtagattgtttttaagtgattttcttgaatgggcccaaatgggtcaagtttgtgtttacatttcctcttttgtcttttgttgctccgcaattttttatggccgtgctccgtaataataacgctctttttttatcaacattccttctgctttttggatactaattctaatttgtttctggatactttttacgaccgcaacgacattaaccgtaactgtcaacaggcaagacgctcgcagcggttgcgcaagtaattttatgattttatgtcccatcaaatattatctaggagtccaagatggcaggggattcgattttagaaatgccgttgaatatttcctttttggcaagcccaaaagttctttgaaaatagatacgaagagcaatgtttacataaagataataatgccaagaacgcgatatacactttataatacactcgttcaatttgaatgtacttatttgcacttaggcaatactctatctaattaagatatatatttacaaagaaacataaacactttaaactagtaattgatatttcgttgtgattgtattcatgcgaggtaattaattcacaatagctaattataaattcctcccagcgtcttcaattagccgcatatatgtgtctgtcctggattgggttgaattccaagtgaacaatagaactcccatcgtgcactcccccaatctgctgaatacacaagtgcttacttttccatagccttagtattctcacctctccccgtttcagagatcttctgttccactttgtaattagtcaatgccgcagcatcttgaacagcgagaatatcattagaattaaccctccaaacggttccccaggctttaggcaattaaaagcgtatgtggtatatatacaaacatatataggggaatatatatatagaaaacgctttgggggcttagctcataaaagctcgtacttgggatatttatacccgaatagcccgagcgtttgagagcgtcaaacaaaccagcttttatatagaaaaaaaaaaacgcctaaatgtatggagagaatttgcatatgtgtagtatgatcgtatatagacataaagaatcttctctgagccgcgtgctacaatatttaaaccagaaactttgaaatgagccaagttgtgactgtggttgtcacgttgttgtacttttggtttttttattattatttctcttttttttccatgctgtccagtcaccagtcacgacgccaacttcgacaccaattgatgacgaagcgccttaactgcggtttattttatatattcgctttgctttatggactgcgatttattattgttttggcttttgctttttatctagctttaagcaaactatagaccaaaaggggtctttagtttggacgcggagaaggcacactttgttcacgtgctggggggcactttagcagctcccttttccaggtgcagctgcatccgttggagctctacactgaacgaaaaggggaatttctaactgataatctttctacaacaatatcaaaacacaaccagaaaagaatatgttatatttatatgaccttatgaactgatcgtcgtgaatcgtatttaaaatattttccaccgtgcatttctaaaatgaacctagttcattgtacgagtatactttgcttggtctacctgcctgcctgttgagtgctgactgttttcgacggttttctatattggtccgaaccctttttccttctcgctgccattgagccgtgactcctccgccctgcgatctctgtgtatttatagtccaacaagttgtgcatttcattatttatgctggtttccgttagtcaacaagtttgtcgcgctgctgcagtgaaggaaaaaaagggtcttgggataggctttgtttcgcttatcgacaaaccgaaggaaaggaaatgggctcgatttaatgacgtttttgatcgttcttgaactcaactgccttaacttaactccactcacgcaggggttctggttctttataggtgtggcattccctgtgactgattgcttgaccgcagcggtactgttgcgtcgtaggcgtcgacgtcggatgattcattgccatttccgagtatttatattacttgcgcataaatagcttccagacgtggaaagcagtgaattccgcctaatcgctctgcgcattggatattaataataaactcaatcaattcgataagtctttaattacttagatctatatttacgcgcttcttgcgaaactttcccagctgggaaagctcttctaaagaggctcgttcaactggtttccgcaattgacccagtcccactccaagttaactttccacgcaattggacagacgaaatcaaatgcaaagcgcaaaaaaagtagcagacaaaaccatctcacacgtagagtacacttgtggtcaaaatgatagcaggaaaatataaatattattggtctattctatttggtacgaacagtacaatatatactcaaacgctaacttttaagcatccttggaatcatgatctttacgtaccaattcccatatttatgattttacaaaccaaattagccttatacatataaataggcatgtgaatgaaccatatttgggttcgtcggcagtgaagccctattaatttgccctctgctgttggagcacagcagcagcggcactgaataccttttgcgaattgctgccgctgtcgctcttaatctactgtggaggtcgttctcgcttgttatgctttccatcgagatcgggctgcgcgaacatcgcgagcatcggtcattggaccgtatcccattccgccgacgccacggctccactgctccccttctgttacgcattcgccatcggcaccaccgccagtcccagttccagtcgcagcaccactattaccacagtcatcagcaccaccatcggcaacaacagcaccacccggagcgtgccacgcgaaggcggctcaacttggattttgtatctcttgcgcttgactgcggcgatggggactcgagtacaagtacgagggtttttattgggggatgcacatttgtgtgtgttcaacaatatgtgttatatacgtacgctgttgcttatatctcaaacttgcactatcaggcaagaaggaagtttgtcggcgtcgatggttatgtcccattatgtctcgtgcggcgaagcaaaaacacaactactcctaagggagtgcatgtaatgggtttttgtaagctaatttgattaatattaaaacaactttatacgctgcggtagcagtgttgtaattattcacttacgaaatctttatgactgttatacatgagctccaaacctgccgcaatttataacttatggcagtttgttaaaaaaatcttaaattaaaccaacagagtttgcacactgttcctcttgtcacatgtattagttttgcgacttatttaaaaatggaccacttatcttagcactagcagcagattccggtatgccaagctgtatttccgacttcttggtgcgataacagtaagcattcacaatgcaagtgcgtcatttgcagttcccgccagacatccaagtcttatcgacagtgggttttcgaggaagttgcctaaagcgagatacaatttgtatgttagatctcacgtatgaaatggattggttgcacaagcgcttagaagaaggggattccggtgggacgacgttggtggatggcgggggtgcgtccgagggtttatcaaatatcccatccgcttgggtgcacagatagcgacaacccagtttccgatgatcagcgcgtccccctcatgatggtatgggctaattgataaccttccgctcccgttgattcgcgttgatttcgctgtgatttcgttcagttcgcagcggctgacaactggaaaaggtgctttagactaagctcccattgcatttgattttatactaattttaaaatgtatcttcctttcagccaagtgcaatttcgaccaggagtcgaagccacatcgccttaatctggatgtgggtgatgcggtcataattcttaaggagaccacccattggtactacggctacagacaaaagtgagtagttctgcaaattaaacaaaaagttgagggaagctttaaaaagttacttacaacttacgtgaactacggacaagaaatgtttccatcctgaaatcactttgtaacagatagcgaaaacaacttgtaaatcacttgacttcattaatttccttgtaaagtatgcactgctattattttgatcggtgtagcttgcctaatcaaacaatctgctagatcttttcccccgactttcactgcaatctcgtcgtttgtctaatgcatatgcatgagcgttggggaaacatcccagacattagcagacaaaaaagtggcagacaatcgacagacagacggaaaagcagaagaaacagcagccagcaaccaaagcaaagcaaagttcagaagcggaaatgcttgaaacagatatttcacaggcacattcagagtgaagcaatcgtaaatcaggtacacaagcgccgcacatttggctcgacctttgtttaccgctcaagatgcctgggtatttcgaggaaatctgtgccagcgctcttgcccaacgctccttcatcctttactccaaacagatgccaccatatgtggctgccaaagttgcatggcagcacatccgtccaatgcagagataaagttttcttttcccattccattgctcgattcaatatttatacatgggtttgacccttttgctgccgtttagtttgtttgcgtttcattttcgtatgcttcttgtatctcccactgggttttatctggctgacggctgaccacgtcttatcaagaaaaacgaggaaaacaagaagaacgccatccgaattgacggagctgacctttttcatatttctgctgacccaaacaaccccatctcaagtggaaccagagattccaagagccagacatctcgaatggtagcgggcagcaaagaaagtaaataaataaaagcacgaattccccgatcacagtggggctcgcctaagaaaaccagttcgcatccagttttgggcgacgttaatttgctttaattgcgtagaacatttcccacactctactgtgcgtttatcatctcccggcaataaaaaataaattcaaggcgagacgttatccgatatgctgataacctctttgagccgggtttctgtttgcttttcggctcactggctgcccatcatcaaatgcctatttttgtttatagaaaaatatcaattttaattgtgcacttccttacatgattttaaagcgtaaatatcgaaaaaattacgacgcctccgtctgaacagcggaatcaattggaaatggttaattaaattgaaggttacgcagcgagctggacacctgatccgaaaaacatcgatgtggatgtggaactatgaccggggttcagggaccccagcaaaggaaggggcgttgcgaacgtgggggaagtgggctgctgattctataagtgatgaatgcttcgagcaattaaagcggccaccccgcatgtcaagcggcgaattgagccaaattaaagcattccatttcatccgacagtgtcacactttgagcgcacttcctctgcagactcgcacactggaaattatatattagaacattttttagaccagtaattcaaggcagttgaatcaaggaattttatttcataacgataaacatattatttaagaaatattcttaaaaacctatatatcatatattcttattatgtttaccaagaatccatatcactcattcatttccgaagtgcacgcttttcaaaacatcaagttcccctatctcgtggcttgggttggataattcatcagccgcaatggctgttgaattgtgtcatatatgtaaatatgaagtgtctacggtgaagcgtcgttctgacgccttattcttgactgaaccaattggggaaaccacaaatcgagttcttactgtggcgtttatgaagcacggagtggcaatttgtacttttctgttgcatcccatgtgcttgccacattttaatgactccccctcttttattttcggtattctttcagagcaaaggaaatacgcggcatatttcccaagagctatatacacttatgcgaatataatatcgtgaatggggagtactgcatccagcgcacggatattgtcgaggagatcactaaagttcttctcgagtggggctccatagccaaggattactttctggtaagcttatgcaattattcataagtataataccaatttgatctcaatatcttccaattttagaccacaaatcccagctttcccaaaattcgacgaaaaatgaacgaattaaataataatagggcggctttgatctccggaaacctgccattggacgaggtgcgaaaggtgaagctgctggccaccaatcagatcgatactggcaacaagctccttggcctggacatggtggttcgcgacgagagcggagacatcttggacaccaatgccatctgcaccaccgagctctacgagcaacatatgcacgctgttcagcgcatcgacaaggccaatgtgagtatctaaaagtgctgcgggaaaaactatatctgtcagctataaattcaagttcaggttataaacaaattgtataaatgagttcgcttcttgatatttctataaatataattataacgattatacattaagtatgtgttcagttaaataagttcagttaaaactattcttcttcttcttatatattattcatatttcatcaaatgtgtcacgtgcactatgtgcacttgctgagaaagtttaatcagcttaatgctattttatttttacgaattatgattcatgagagatttgactcattaattcgtatatgtatagtgaaaacccatgctttaactaatcctaattttttttatccaaccgttagcggctgtcaagcgagcggggaactacaagaacacctaacaagtactctcacaacatcctgctacacgtgaacgccttcgtttgcaagttccaggaggactctgacctgctcttcacgcttttcgacggcgaaacacacaaacccattagcgagaactatgtggtcaagtggtcacggacaggtattgcgcgtgatactgaccagatcgacaacaaccgcgtgctgttcacggatctcagtaagagcgacctagccattgccaaaatgtacctggtgtgctatgccatccgaatcggttccatggagtttaaggattctgccgagtcgaaacggaccagcatgagcattgccaacagcatgctgaacgcctccagtcgcaaggcctcccagctatcggtgagctccagtggatcgtccagcagcaatggggaatacatcattcgacgtccgtttggtgtggcctgcaaggacctcacgcccttcatcaataagtcggacgacttccgaggcaacatagacctgcccttcatcatgtgcgaaaaggaaacgctggacggaacgctgcggaagctaatcgcgaataaggatattggcaagattgactccaagatggctgtaactatcgaggtgcttcggggcgacatcaagcagataaaggaagaatttccacgcttgatgcacacaaatgtgccagttgcccgaaaaatgggatttcctgaggtcattttgccaggcgatgtgcgaaatgatttgtaccttaccatctgcagtggagaattcgcacgcattgccaagacctcggagaagaacgttgaggtgtcggtgtgtgtggccaatgagcagggataccttatgcccggtgtgctaagcattggagctggacatcaacccattgatgagtacaaatcggttgtatactaccacgatgacaagcctaagtggcaggagaccttcaagatccacgtgcccattgaagactttaaacaatgtcatttgcgctttgtgctcaaacatcgtagcagtaatgagcagaaggatcgaactgaaaaacccttcggtctcgcgtatgtgcgtctaatgcaggccaacgggacaaccatcacgcagggtcaacatatcctggccgtttacaaaattgatcacaaaaagtacgacaaaacagtagccaattgttatttagaacttccagccacggttgcagagctgcaaggtgcaaagccttctatcggtggacttactctcttgccaaaggatcagctatcgattggggttaacctgtgcagcaccaagctcacgcagagcggtaagtgggggacttataattaaatactttacaaacatcttaaatatttcatttccatacagtgagcttgctgggacttctgaattggtcggcgcacaaggagacgctggaacagtcgctaaacgccttgtccacagtgcctggagaggaggtggtgaagttcctgcaggacatactcgatgccttgtttaatatactggtggagaatgatcatcctgagaaatatgaccagctcgtctttatgagcattatacatttgattgaaacggtgtccgatctcaagtaccaacactttctcagtgttctcgatgtgtacattaatgaaagcttctcgtttacacttgcctacacgtaagttatatttatttgatgattcgaccactgataaatagtttttaatgtggctttttcaattaactagcaaattgatggatgtgctgcagaagaatattagtgaagcgatctcaccaaaagaaaagtctgctgatggcaatgatctggaggagagtccagaggtgcgccgcctgtacaagacaactcgttaccttcactatgtgatgaagttcgtgattcgatcgcgtgtgctctacgccgagatgaactgcaacacggactatatggactttgctacccggctgcaggagcttcttcgcatgttcatcgacatgattggctgtccgagcaatctgcttaaatcggagggagcgctgctcaagaatctgcacatcatcgccacagatttaatgcaggtctttgaacatgtgcgcttaaggtatgttgaacaacataaatataattaacttttgaaacttattagtaatgataactgtttacagcatatccattgtggaaatccttgagaaattcccgccgcgacgtcttactcagtctaagatgggatgcattaaagattttgtggagacaaaactgtttacgttgcccaagtgtcgggccatcctactgcccgtgttctgcaaacacatcaaggatcacctcgagagcaaggaggaggtatgtgcttgagcaataactaaattgcgtgtgccactaatttatcatttgggaactgcattttgttcttaatccaatgcatcgtccttgaaatttgtcttgtgaatgcaccgacaagacgcaaaattaaaacataactcaacacatgaacaagttaatttggctccttaagtaactaactaaaaacaagcttttaaaattattttttcctcacataattgctttataaaactatttgcaaaatgaagaccatccatttgcgatgcctttaacctttaattactttgaaccatttaatgaataaatacaattccattactcgcattcataattcttgaggctattaaacacttggtcaattgctttaagcaatattttctccttgacatgtgatttgtcttaattttgctcagttccagttcgagctatttagaaattagttaagaacgtaatctttgcaagctatgtttagttagtgttaagcatgttgcatttgctttttattttaagaacgttagcatgtgatttggcagcttaaacgatttgttgccaactgtttttatgtgtcttgtgtcctagttatagatcaatgttcgtccatatcctagtgctaagcatcagaaacgattgtacaacgtagtgaaatagaaatgttatttccacgatagatccgtgttagttagcgatctttctgtgtgtgtctatagtgagatttcctttgtatctaccatggggcgtagcgaactcatgtaagtgtttagcttggccattagtactgcacccgaacacccgtcatcgtcatagttagaaagcaatttgcatttggcagctcatcaaagcaccttacaacaaaccacatcaaccacctgggaatagtaaactataaacacacctcaaaacacacaccgaaacacacactgaacacacccacccaaatatgaatgtgcgatctctcctcactggcacccaattattcagctatacctatctgtctgtaactcttctctaattccacaatcattatatgtttttcgtacaatatttcaaaaatcaaaacgaatctttattcacgcacaacccaaccgatgtgttgttatcgtttctctgttgttgccaccgcaattgccttgtacaaaaaaactagggagactcgaaaaccgatatctggcagcaagaaaagaatctttcgaaagccgccaaagtgcttggacagaaaaaatcccaactgcatacatgtgatacgactgccaacaaaaaggtaaaggaaataagtctctcatctccaaatctcagtcagatcagctgcagttcctcctgtgatcagcgtcaatcccttgatttgtaaccacaaatgttttgtattattatgatgtacctgctaagatctttattatgtaccgctgttaagcttgcagctaactgggcaggttatccgcgcccactttgtgcaattggctttccaagcttcacgctgtcgatggctagacaatcatgagactattttcccagctacttggttttcccgccatcgacaaccgctaagttaggcttaagttgttccagctttttgcaatgtaatgttctatggtttcgtgtttttttaaatctgcaatgttaatttatatttaattgaacactaacgttaactttttcccgtgaaacccaatcagatagtcaatggatctctgatagctcaagaagcacatagatttaagccgcattacctattaatatttccaatctttggcaatttggtaatgaaacaaatcttgtatgaattttctaaaggcattcccaaattgcttggattgaaaataataatttggcttacatttaatatatcaactttcatcgtcagattgccgagtgcatcaacatcatgaacaacatactgaaacttctgttccgatcggatgtgggttccacgcacaatgacattcgagacattatgatcatcctgtttcgcactgtgatgaaggcagctcacgccctggacagggacacggggttggtgggcaaattctttgccattatgctgggtatactgcagcgcatggacgcccagcactacgagtactttgtgaaggacctgcaccagagcggcgagttgaaacactttgtcatagagatccttctggtatttgaggagctggtgtctccgcaccagaaagcagtgtttccgcgggactggatggacatgattatgcaccagaatactgtgatccttggtgctctgaagcacctcaccgtggtcattacggactacttcttgtgcccgttcgagaaacagatctggtcgaacttcttccagtgctctattgcctttctggtgcaatccccgcttcaattgaatgatttcaacgataataaacggcaaattgtgttcgcaagatatcgtgacattcgcaaggatacggccatggagatcaggaagatgtggttccagctggggcagcacaaacccaagtttgtgccgcagttggtggagccaatactggaaatgagcatgataccggagaaggagctgcgccaggagaccattcctatcttcttcgacatgatgcaatgcgagtactatagctcgcgattggaacacgaaagttacggcgacaccaaattcaacaatgcccaccacaagggtaacttttccgacttcaagacagcgatgattgagaagttggacatcctgattggagctggtaaaggcgacgctgaatacaagcatctgttcgagacaattatgctagagcgctgcgctgcccacaacactcttaacgtggatggcactgcctttgtgcagatggtaacccggctgatggacaagttgttggagtatcgctttataatccaggatgagagcaaggagaatcgcatggcttgcacgttctctctgttgcagttctattcggaggtggatctcaaggagatgtacatacgttatgtcaacaaactgtgcgctctgcacatggagttcgagaactacacggaggcggcgttcacgcttaagctgcacacggaactgctgcgttggacggatacggagctgtcgcaccaactgcgcagctatcggcataataactgccgtactcaccggcaactgaaggaggctctttacttcgagatcatggagtacttcgacaagggcaaacagtgggagtgcgccatcgatatgtgcagggtgctggcccgccagtacgaggaggagatcttcgactatctcaagctggcggaacttctgaatcgcatggcattgttctatgagaagatcatcaaggagctgcgccacaattctgaatatttccgcgtgtgcttctatgggcgtggattcccgcggtttcttcagaaccgtgtctacatcttccgtggcaaggagtacgagcggcacagtgacttctgcgcccgtatgctagtacagcatccacaggctgagctcatgcaaacgctggaggctccgggcgacgacatcaccaacagtgatggtcagtacatacaggtgaacaaggtggagccgataatgggtcaggcgttcaacaagttcaacgataagattatcaacaacgaaatcgtgaaatacttcaccgccaacaacgtgcaaaagtttcagttttcacgtcccttccgggacagcacgaacggtggcgatagggacgatgtacgaaatctgtggctggagcgcacagagctgcgtatcagctacccacttccgggtattctgcgctggttccccgtcgttgagaccaatacttttaaaatctctcccctagagcgggcggtcgaaattatgaaagatacgaaccgtgacattcgacaactggtgatcctgcacaagagcgacgaaactctgcacattaatccgctgagtatgaaacttaatggcattgtggatccggctgtaatgggtggctttgccaagtacgaggaagccttcctaaccgacgactacttggagcagaatccggacgacaaggagttggtagaagagctcaaagaactgattgcgaaccagattccactgctcgatttagcaattcagcttcatcgcttgcgggcaccagatagtttgaaagcgctgcaggaacacctggagcgttgcttcgccgacatgcagcagcatgtggagcagcgctatggtcgcaagtcctgcgacctcaaaatcgaacgggattccgtggtgatgcgacgtccaaactcctttctgccttcgcttttcgatggcagcaacaatcgacactccgaaaccagcatgggatcttcagagtaagttttttgatagttgatgttgatgattgtgctgactaatttctctcgtatttccaattgtagcagcggcctgtcaaagtcaacgtttctgccgcgtccacagacgaattctattaaaaacccattttccggcctaagtttcaacacaaggtgagtgctttcgatgatttggagttctttggaatgcttgccctaaccaaaactctttttaactctttcttcatgctaaccgctggcttttagtttgagactttaacattattttgatttggtttgatttttaaattgcattttctttcgttctgtttaattatttacgttctgttgcttatcgtctacgcttattttgctatcccaacatgtccaggcccagtttgggacactcgccgagcattaagagcaacaagagcaaggataagactccgagtaagcgaagaaccaaggatggaaaggttaaggtaagcagtgtgcggtagctggaaattaaacatattctaaatacaatttaaaaccacaggagcgtgaagcccatagcctgtccagcagtcagtggtacacaccgccattgtccacaataacatcgacgccggagaaggagatcaacacatccatagcctcgctagcgagcacatcaaatagttctctaagtggtcccaagacgccagatcctcatgtcctgacagaggaggtaaattttaattaaatgcatctcctcacctttatttaatcgctgcgattgatatttaacagctaacccctaagcgacctctgcgttcggaaatggagaaggaacgtcgactctctcgtcctgctagcatcgctacgccaaccgccagtatcaagaatttccctgacacgcgctccctgtcggaaagcagcaaccgcaactctgttggtaagtgatggctacaattaatttgttattagctacatactttaatataaaatccgctacagaaaccaccgattccacttcagaggaggacattcgacctccgcctttgcccgccaaggcacgtgactcaactgattttaccagcctgtcgcaaaacatggattggaccccgaatggttatgctatgctcagcactattagcaataccagcagcatgagcaccacctcaaccctgacgaagaccagtattaccaataccacgtacgagtatttggagaccacgaacttcagtttggtgggtgccatcgatggaaacaaaccgcgtccgccgacgccgccaccgaagccatcgcgccacagcaaacacattccatagggtagcgaggggcatctttgaaccccagaagcttcagtgcagcgccatatatgttcaaacgttgtcgagtgccaaatattcctgttactatatatatagccggcaatcgagcctgtatccacatccacaaaatcagcaacgacctttgcctcaacctttgaccgcctaacaaatcaagtgtcttaaaaacgatcgcattagcatgtaaaattcagatttccgataactatgtttaggtgtttgattacgtttaaatgatattatgttgaacatgtcatttttgtttatttaaggtttttgtcgtgtaatttgttttagaacgaacccaaatgcttgtcttccacaagtactaattaatgttgtacacatatatgttgtactttagataactacgataagatgtaggctatgtaatgttgtcgaaaaacgttgtacgtctcttatgcaaacaagtgccacagtcttaatgcaatagcaaccatatcttcgattttacgaacgagccacgtggttttagcacaaatttactaacgagtcaattacgaaatactaatgtaaaacgaattcttgtatgctacaattttacacaattttttaaagaaagcataactatttacactgtttttatacgatttcgtatagtcataaagtagagcaactaaatattgagatttattcgttaagaatattatatgtatgaacaacttgcactgaaaccataacgcacaattatttaaacaaaagtttgaatatttaattttagccaaaattactgtttaattatgttttaaatggattctgtgtaattttcgatctgtgtatcggccaaagattaagcaataataaaataaaagtaagcatgtattatctactattccttatagcttgacaactgagtctgaaaattagattttaaagataaaacaaattctttttttttttggttaaaaaagtttattaaattttttgtttggggttgttttgattagtaaaacgcgagacctgtcaaaaatgaacacattagccaggccggttaaaagttggttataaataaatattgtcaagtatataaaatataagatgtcagatttgtatagaaaaaatcaatcctgaagttggagcttaagtttagtaaattttaaaatggcttcagtttcatccttgaaaaggcacacaataatacggtttgaaaatgcacggaatgttcgttgttcagggacagcagggtcctgagatttgagaccaaggtgtaagagagtgggcgtgaaaggtgtcaggaacaggatcaaacatcaactccacgggacgagtgcagatccacgcatattttagagttgcgattctgcttctgacttatctctagtacttggaacatctccttgagagcctcgctggtgcccgtcttgcggcgattgcgtcttcgcagggtcacacctcccgacttaaactcacgcatcagagcgtcaagacctgaaacaaaaaaggtgaaagtgaatgagacccaggctttgcggcgaaattacaataagtcgctaccaaagccgaacgaacatgcggttagatgttagcataggatttgacataatagtgtcccgaggagcagtcaatactcacctacgtaatcgagcaatcttgggactttaaaggactttggctaggtggcaattggacataaatcacggacagagtcaaacgggttgatgcgagcaccatgtcgggtactcagcaactgtcaccgccgacaaatgaagttggaccctgatacaagtcaatggaaatatacggtctcccactcctgctcaagatgtgtgtgtgtgtgtgttttcagtgtggttttcagcacgagagctcaggactggcagcagcagaagcaggagcaggaaaagtggcgcaataaaacacg

SEQ ID NO: 21902 - DNA, 7302 bp, DROSOPHILA
cgagcacgctcattcacaacaaacagttgaaacgcgcgggttgttttccgagagcggttatttaattaattggcaactgtcacacacgagtgtgtgtgcgatcgagtgcgtgtacatgtgataattagctgagcggcagcggccaactcccagcccaaatacaagtcgagaacaaaacgagcgaaaaacggcgcaaaatgcatttgcggagcgacaatttgtgcggaatgctagcttttgtgcaataattatttattggttgcaattgtccaaccggtgtgcttttcgtcgaaatctgtagcgaaatcggaggcgaaatgcttgtgttggcggcattgtgaaaacgaaatcaaaatttcaactacgtgttgctcttttgccgttgcctaatttaatgtcttgttgtttttattttcgcaaacgaaagtccatcgctttgcatgtgtgagtagcgatcgtttgtcgccgtgttggtggtaaaagtcggcgcaaaaacaacaatatcagcaacaacactagtagaagcaacaacaacgagaagaaaagccttcaagatgagtgtgtggagcgactgcaatgccaagcaggcagaattcggcattgccaagtgcaatttcgaccaggagtcgaagccacatcgccttaatctggatgtgggtgatgcggtcataattcttaaggagaccacccattggtactacggctacagacaaaaagcaaaggaaatacgcggcatatttcccaagagctatatacacttatgcgaatataatatcgtgaatggggagtactgcatccagcgcacggatattgtcgaggagatcactaaagttcttctcgagtggggctccatagccaaggattactttctgaccacaaatcccagctttcccaaaattcgacgaaaaatgaacgaattaaataataatagggcggctttgatctccggaaacctgccattggacgaggtgcgaaaggtgaagctgctggccaccaatcagatcgatactggcaacaagctccttggcctggacatggtggttcgcgacgagagcggagacatcttggacaccaatgccatctgcaccaccgagctctacgagcaacatatgcacgctgttcagcgcatcgacaaggccaatcggctgtcaagcgagcggggaactacaagaacacctaacaagtactctcacaacatcctgctacacgtgaacgccttcgtttgcaagttccaggaggactctgacctgctcttcacgcttttcgacggcgaaacacacaaacccattagcgagaactatgtggtcaagtggtcacggacaggtattgcgcgtgatactgaccagatcgacaacaaccgcgtgctgttcacggatctcatttaaggattctgccgagtcgaaacggaccagcatgagcattgccaacagcatgctgaacgcctccagtcgcaaggcctcccagctatcggtgagctccagtggatcgtccagcagcaatggggaatacatcattcgacgtccgtttggtgtggcctgcaaggacctcacgcccttcatcaataagtcggacgacttccgaggcaacatagacctgcccttcatcatgtgcgaaaaggaaacgctggacggaacgctgcggaagctaatcgcgaataaggatattggcaagattgactccaagatggctgtaactatcgaggtgcttcggggcgacatcaagcagataaaggaagaatttccacgcttgatgcacacaaatgtgccagttgcccgaaaaatgggatttcctgaggtcattttgccaggcgatgtgcgaaatgatttgtaccttaccatctgcagtggagaattcgcacgcattgccaagacctcggagaagaacgttgaggtgtcggtgtgtgtggccaatgagcagggataccttatgcccggtgtgctaagcattggagctggacatcaacccattgatgagtacaaatcggttgtatactaccacgatgacaagcctaagtggcaggagaccttcaagatccacgtgcccattgaagactttaaacaatgtcatttgcgctttgtgctcaaacatcgtagcagtaatgagcagaaggatcgaactgaaaaacccttcggtctcgcgtatgtgcgtctaatgcaggccaacgggacaaccatcacgcagggtcaacatatcctggccgtttacaaaattgatcacaaaaagtacgacaaaacagtagccaattgttatttagaacttccagccacggttgcagagctgcaaggtgcaaagccttctatcggtggacttactctcttgccaaaggatcagctatcgattggggttaacctgtgcagcaccaagctcacgcagagcgtgagcttgctgggacttctgaattggtcggcgcacaaggagacgctggaacagtcgctaaacgccttgtccacagtgcctggagaggaggtggtgaagttcctgcaggacatactcgatgccttgtttaatatactggtggagaatgatcatcctgagaaatatgaccagctcgtctttatgagcattatacatttgattgaaacggtgtccgatctcaagtaccaacactttctcagtgttctcgatgtgtacattaatgaaagcttctcgtttacacttgcctacaccaaattgatggatgtgctgcagaagaatattagtgaagcgatctcaccaaaagaaaagtctgctgatggcaatgatctggaggagagtccagaggtgcgccgcctgtacaagacaactcgttaccttcactatgtgatgaagttcgtgattcgatcgcgtgtgctctacgccgagatgaactgcaacacggactatatggactttgctacccggctgcaggagcttcttcgcatgttcatcgacatgattggctgtccgagcaatctgcttaaatcggagggagcgctgctcaagaatctgcacatcatcgccacagatttaatgcaggtctttgaacatgtgcgcttaagcatatccattgtggaaatccttgagaaattcccgccgcgacgtcttactcagtctaagatgggatgcattaaagattttgtggagacaaaactgtttacgttgcccaagtgtcgggccatcctactgcccgtgttctgcaaacacatcaaggatcacctcgagagcaaggaggagattgccgagtgcatcaacatcatgaacaacatactgaaacttctgttccgatcggatgtgggttccacgcacaatgacattcgagacattatgatcatcctgtttcgcactgtgatgaaggcagctcacgccctggacagggacacggggttggtgggcaaattctttgccattatgctgggtatactgcagcgcatggacgcccagcactacgagtactttgtgaaggacctgcaccagagcggcgagttgaaacactttgtcatagagatccttctggtatttgaggagctggtgtctccgcaccagaaagcagtgtttccgcgggactggatggacatgattatgcaccagaatactgtgatccttggtgctctgaagcacctcaccgtggtcattacggactacttcttgtgcccgttcgagaaacagatctggtcgaacttcttccagtgctctattgcctttctggtgcaatccccgcttcaattgaatgatttcaacgataataaacggcaaattgtgttcgcaagatatcgtgacattcgcaaggatacggccatggagatcaggaagatgtggttccagctggggcagcacaaacccaagtttgtgccgcagttggtggagccaatactggaaatgagcatgataccggagaaggagctgcgccaggagaccattcctatcttcttcgacatgatgcaatgcgagtactatagctcgcgattggaacacgaaagttacggcgacaccaaattcaacaatgcccaccacaagggtaacttttccgacttcaagacagcgatgattgagaagttggacatcctgattggagctggtaaaggcgacgctgaatacaagcatctgttcgagacaattatgctagagcgctgcgctgcccacaacactcttaacgtggatggcactgcctttgtgcagatggtaacccggctgatggacaagttgttggagtatcgctttataatccaggatgagagcaaggagaatcgcatggcttgcacgttctctctgttgcagttctattcggaggtggatctcaaggagatgtacatacgttatgtcaacaaactgtgcgctctgcacatggagttcgagaactacacggaggcggcgttcacgcttaagctgcacacggaactgctgcgttggacggatacggagctgtcgcaccaactgcgcagctatcggcataataactgccgtactcaccggcaactgaaggaggctctttacttcgagatcatggagtacttcgacaagggcaaacagtgggagtgcgccatcgatatgtgcagggtgctggcccgccagtacgaggaggagatcttcgactatctcaagctggcggaacttctgaatcgcatggcattgttctatgagaagatcatcaaggagctgcgccacaattctgaatatttccgcgtgtgcttctatgggcgtggattcccgcggtttcttcagaaccgtgtctacatcttccgtggcaaggagtacgagcggcacagtgacttctgcgcccgtatgctagtacagcatccacaggctgagctcatgcaaacgctggaggctccgggcgacgacatcaccaacagtgatggtcagtacatacaggtgaacaaggtggagccgataatgggtcaggcgttcaacaagttcaacgataagattatcaacaacgaaatcgtgaaatacttcaccgccaacaacgtgcaaaagtttcagttttcacgtcccttccgggacagcacgaacggtggcgatagggacgatgtacgaaatctgtggctggagcgcacagagctgcgtatcagctacccacttccgggtattctgcgctggttccccgtcgttgagaccaatacttttaaaatctctcccctagagcgggcggtcgaaattatgaaagatacgaaccgtgacattcgacaactggtgatcctgcacaagagcgacgaaactctgcacattaatccgctgagtatgaaacttaatggcattgtggatccggctgtaatgggtggctttgccaagtacgaggaagccttcctaaccgacgactacttggagcagaatccggacgacaaggagttggtagaagagctcaaagaactgattgcgaaccagattccactgctcgatttagcaattcagcttcatcgcttgcgggcaccagatagtttgaaagcgctgcaggaacacctggagcgttgcttcgccgacatgcagcagcatgtggagcagcgctatggtcgcaagtcctgcgacctcaaaatcgaacgggattccgtggtgatgcgacgtccaaactcctttctgccttcgcttttcgatggcagcaacaatcgacactccgaaaccagcatgggatcttcagacagcggcctgtcaaagtcaacgtttctgccgcgtccacagacgaattctattaaaaacccattttccggcctaagtttcaacacaaggcccagtttgggacactcgccgagcattaagagcaacaagagcaaggataagactccgagtaagcgaagaaccaaggatggaaaggttaaggagcgtgaagcccatagcctgtccagcagtcagtggtacacaccgccattgtccacaataacatcgacgccggagaaggagatcaacacatccatagcctcgctagcgagcacatcaaatagttctctaagtggtcccaagacgccagatcctcatgtcctgacagaggagctaacccctaagcgacctctgcgttcggaaatggagaaggaacgtcgactctctcgtcctgctagcatcgctacgccaaccgccagtatcaagaatttccctgacacgcgctccctgtcggaaagcagcaaccgcaactctgttgaaaccaccgattccacttcagaggaggacattcgacctccgcctttgcccgccaaggcacgtgactcaactgattttaccagcctgtcgcaaaacatggattggaccccgaatggttatgctatgctcagcactattagcaataccagcagcatgagcaccacctcaaccctgacgaagaccagtattaccaataccacgtacgagtatttggagaccacgaacttcagtttggtgggtgccatcgatggaaacaaaccgcgtccgccgacgccgccaccgaagccatcgcgccacagcaaacacattccatagggtagcgaggggcatctttgaaccccagaagcttcagtgcagcgccatatatgttcaaacgttgtcgagtgccaaatattcctgttactatatatatagccggcaatcgagcctgtatccacatccacaaaatcagcaacgacctttgcctcaacctttgaccgcctaacaaatcaagtgtcttaaaaacgatcgcattagcatgtaaaattcagatttccgataactatgtttaggtgtttgattacgtttaaatgatattatgttgaacatgtcatttttgtttatttaaggtttttgtcgtgtaatttgttttagaacgaacccaaatgcttgtcttccacaagtactaattaatgttgtacacatatatgttgtactttagataactacgataagatgtaggctatgtaatgttgtcgaaaaacgttgtacgtctcttatgcaaacaagtgccacagtcttaatgcaatagcaaccatatcttcgattttacgaacgagccacgtggttttagcacaaatttactaacgagtcaattacgaaatactaatgtaaaacgaattcttgtatgctacaattttacacaattttttaaagaaagcataactatttacactgtttttatacgatttcgtatagtcataaagtagagcaactaaatattgagatttattcgttaagaatattatatgtatgaacaacttgcactgaaaccataacgcacaattatttaaacaaaagtttgaatatttaattttagccaaaattactgtttaattatgttttaaatggattctgtgtaattttcgatctgtgtatcggccaaagattaagcaataataaaataaaagtaagcatgtattatctactattccttatagcttgacaactgagtctgaa

SEQ ID NO: 21903 - protein, 276 aa, DROSOPHILA
MSVWSDCNAKQAEFGIAKCNFDQESKPHRLNLDVGDAVIILKETTHWYYGYRQKAKEIRGIFPKSYIHLCEYNIVNGEYCIQRTDIVEEITKVLLEWGSIAKDYFLTTNPSFPKIRRKMNELNNNRAALISGNLPLDEVRKVKLLATNQIDTGNKLLGLDMVVRDESGDILDTNAICTTELYEQHMHAVQRIDKANRLSSERGTTRTPNKYSHNILLHVNAFVCKFQEDSDLLFTLFDGETHKPISENYVVKWSRTGIARDTDQIDNNRVLFTDLI

SEQ ID NO: 21904 - DNA, 80251 bp, DROSOPHILA
gaaaagtagaaaagtaaatttcttcttataataagtttattttgcaaacacttgtggcaagcaactttgtttggtcgccgtcggtttctggcttaatctacgagccgtttgtgcgaatgtggaaactttgacaaatatttgcgaaactttcgcgaatggcgcggcgttctcggtctgcaagaccccgatctatttgcattatgcatatgaatttattagcatcaattcccaccatatttacattgacattaatatcccattgaaagtattggcgaacggattgaacatttggattcgaatgcgaatttgaatttgaataggaaaaggaaaaccgcagcacacaaattttccggatccctggcttctattaccgtacaatgccgagttggggttgacttattatcaataaactaatgctaaacacgagacttttaataaataaaaaataatgtcttcattaatatattataattcgtttttaaaggcctaataaagcctttaagtgataagtatctttttatgccataccacattgaattaagcttatagtttttgaggtaaaggtaaaaacgattaatttactaatatttttctaaattgtgaaacaatttatacgatatttacttccatagaaattaaattaataattacaatattccgactattctaataaatatattttttaaaacaaaaacttttttgcacttcgttgtgtgcaaattattccccaaaatattgaacaattaaataatgaccagcttaaactgaatagaattagatacaaataatttgcgtaagccatattctagcacaaagattgggaactgaaactgtagtcataagtgcgctaaaaccgagcaaatacgggatgcgcatcgtttggcgtgcaactggcaactggcgggcagcccgtcgagcgtttttcgccactcagttgaaggaaaatcagccctcctccatgatgaatttcccgcggcgagcgcattttccttcctcgcgaatgaatgaacgagaggcgcccaccccgataaacttaaactgaacgaacactcaagagagagcgcaagagcgctcaaaaacaatctggttttgagcgtttcgctggctctctgtttctgttttccactcgtttttaggccgagtcgagtgagttgagtcggcagagcaaagtcaaaacactggcaactgcgatttggtgccacattcgttcgatggcaacggattggataacaggcgcgcgctttgttttattatccacattatcagcggcattattgttattattggccctcagcgctttaccgctcgcccacgcgtccgcccgtgaatgccgcgcggaaaagtcgctttccactagattggcgtccagattcgaggaaatccgtcagcagacgcattcgcgcccgttcggtcagcactatggctaataatcgttcaaatcgttaaaaccataaaaataataataataattgcaataacaataaacatagtaataatcgtaacgcttacgagcctttgatagtgccaaggcaagcgcaatccaagtattcaaattcgaattcaattaacagcaaagtgcaattggctaaaaaccgaaaccaaaacgcaacaaagtatacgaaacacttgtgaaaccgtacaaacaattgtggaaaaaaatttaaagattattaagattgaagtctcaataaacattagtgcttaaataaatttaaaacgacccgcgtggagagtgcaataaaaagaataacttttgaaataaatatttaccaaacagaaaaatattttataaatatttaaataagtgaaaaacaaattggttactctgaaacaaagaaaattcaaattggtgctaaaacaaaggagaaaaaatttcaagaatattttacaaataataagacatatttaactatataaaaccaaacttaatcaacaaagacttggagtgaaaatataaaataaattttaaaaagagtttaacaaaatttgtttaaatccaaaggaggcaaaggaacagcacagaaagcgaggaaacactcaaataaaatccgccaaaaatcgcagatccctggaaaccaattcgtgtgaaatcggtcaagcccccaacgacttttagcccgtctcagacggagcaccgccaagattcttaccgccagcagcgcaatgaactcgtactttgaacaggcctccggcttttatggccatccgcaccaggccaccggaatggcaatgggcagcggtggccaccacgaccagacggccagtgcagcggcggccgcgtacagaggattccctctctcgctgggcatgagtccctatgccaaccaccatctgcagcgcaccacccaggactcgccctacgatgccagcatcacggccgcctgcaacaagatatacggcgatggagccggagcctacaaacaggactgcctgaacatcaaggcggatgcggtgaatggctacaaagacatttggaacacgggcggctcgaatggcggcgggggtggcggcggaggcggtggtggcggcggagcgggcggaacaggtggagccggcaatgccaatggcggtaatgcggccaatgcaaacggacagaacaatccggcgggcggtatgcccgttagaccctccgcctgcaccccagattcccgagtgggcggctatttggacacgtcgggcggcagtcccgttagccatcgcggcggcagtgccggcggtaatgtgagtgtcagcggcggcaacggcaacgccggaggcgtacagagcggcgtgggcgtggccggagcgggcactgcctggaatgccaattgcaccatctcgggcgccgctgcccaaacggcggccgccagcagtttacaccaggccagcaatcacacattctacccctggatggctatcgcaggtgagtgtcctgaagatccgaccaaaagtgagtgtccactgcagcacaagtccactgaaagtcccccgaaatcccatcccttctgtcctcatccctgcagtgccaaagctttgttgttttcccagttgttatcaagctcaacagattgcagctatggcaacaaaagtcatcctgtgattaattgccgtctctgctccaattaacagacaagtcaacatgtaaggcaatataatgaagagctcgaatcgatcatgggaaaaacagataacaacttgtaatgtaagacatatgaaagcaggcagaacagacctttttatggcaggttcttagggaaaagacacaacaccttattggcaatcaaaaactttaagcgatttaaaaaaaacaaaaactaagaatgtattatggttataggaagccaaaaaacagtcctagttaatattgtgtatattcaaattggctgaaaagtttagaaaaaaagatgtgataatacttggtaaaaaaattaaaaattttaataaaaaatagtaaaattatattcttcagaggaaaaaaattaggacaagtattttagatttattaagtgttaaaaaggcaaaaacccccttggctaactcaaaattattttccaataattctatttaaaggcacccatttgcgtggccatagtttattcgctggccgccaatttcagcgatttaatcactctaagcgagattttatggctgtgatctcgcttagagtgattaaatcgagtgaagagccatgagtagctaaaataaaaaaataaaaaaaaccagctcagacccttcgatttcacctgctccgctccgcgacaccttgcagcgctacgtctgcctcataattttcaacactttgtttactaatttttgtcacctttgcttttaatgatgctcggcggtaattgttgcagcgctggcagcccaagtgagctgcaatttgtgcaacaagagagcggcaacgagcagcgtgagttatggcatgcggcttaaaaagagctgcaaaatagcaacggagaagtcaagaaatagcaaaaggcagcaaaggcagccacaggagtcggcgagaaagggcaagaatcctttcaggacacacactgcgcgcagaagtcgcgcttattacggttaactacgccattatgtaattacgttcagcccctcaccgctcgacttttccacgggtttcagtcaccagccgagcgaggcgaacggcttgcgtctgggccgagattgccgtttgggccaagaacaaagccaagagtaggtcagccgaaggaggtctaggtgctcgaagatcgaacgtaaactgcactcaagctggcactaaagaaatagggaaaatagagggcttacaagttattattttcaaattaaataaattgttaacttacaaattattactttttttttaattgttcgaaagactcaaaaaattatttgtattatccgctaatattttttgtctgtgtataaaagggagcttgcaaaatacccttcaaaaatcaatcaaatttcacttatagccaacgcgaagagctggttaaaaaacaattaaagttgaactaaattcgagagccttgcgacaggttttccatcggatcgatccgttctgcaagatgatcagggtaatgaaatttatgcgccgagcctgaccagtctgaagtgtcggtgatgaattggccaggccaagaccaaagaaacaccattgccgaaaacccttcatacagggtgtcttgtataacacttccagtgtgtcagacaatctctgcgagatataacatctttagtggaacattccctctaagaaattcaaatgcattcttacctgaagatgatcggacacgtttacctgaacatttcatcttaaattttttttcttataagaaaacgagacgatctggcagttacgatattcagactgaatgaatttttcgaacttgagacctggaattcaaaatatataaatatatatgtatatggccttatctctaatccgctagatccgcattattgccatttgtcactgttatcgccgatttgatttactccaaaacatataatgcgaatataatttaattttaagcgacttgctctgagcgaactgattaaatctgatgatcgcaacggaaaatcaagtcataaataaatcggcgcacacttccagcgatcatcgatcatttgccgctgatccgaggccccaaatgcaaaccaaattcaattttatcgtatctaaacatggcttcacatttgaaaaacccacatcagagttttctggcctttggagtcgcagttggcgttgctatgttgttcttgggccgctgttttgttgtatgtgcgaacacggcgagcggcgggcggagggcattaaatcattgtcctgaaggcttttaagtcattatcgataaatttcaacataaattcgtaaatttgctttatttgcccgggccggtgtgtgaggttcacgtcggcgaagtggtttatggccgagttctgcggctgtccgaaatttgtcggtcgcctaatttcgaacgtggcacaggaagaaaattatagggaaaaattacagggaaaatcatttcagctgtatttaacaaattcaacaaatatatttaatttattaaaaaacatgtgcaatgtgtgattttggcgaagcaaagccaaatattttgaacttacatatcacttatgaacttaaacatcattcatagtctctcttttgaatagaaaaaattaaatccatacattgtgtaataaagtcgcatgctaatttattaatgtgattttatgaagaattcaatactgattcaagtttttcccagtgtaagcacagttcgaactcataaatagattttgttgcggcttgttacttttttttgtcccacaatgaccttgagaatagctgggcggatggtcaattgacacgtttcggtgcaatcataattcatatttgccgcagttaccgaggaaagaactctcacgctgtgacgtaattatcaggatgcctggtattccagcatatacacttacacaactacctgcaattgtatggaacacgtagggccgaggagggcacgtcatatccatgcaaggttaatgggctgtgggctgcaggagacacaccaaaattgtgcagttcaaatgtcgggcaacagttgccgttgcaacatgcaattaattgccaggggaagtgcgtcgatgatgccgctgattatgtaaatggcgaagtgcaagcgaacgcacacaggaaaacctttcaacgcgcgcttttaatcatttttttcgcggagcgcagaatgcaaaattcagcaagatcagaaacaaatcaaagcgcctgtgagcatcgcaatttctgtggcggatgctagggatgcgaatgccccttgccagtcgtctccccttctggagcatcgattttgctttttcggggattggttttcgggttctggggcagcttcttgcattttttaatgtatttttaaataaggaatttaataagcaccttggcggtcctcagtcctcaagtcgttggactcgcactgcgactggcggtcgaggagaccaaagttgcaagacgtcgacgtcgccaacgacgacaacacaaagtggcccagacacatggcccaacaacaacagcagcaacaacaacggcaacaacgtggagctgcagggcgaggagcaattttggcttttccctcgtatttttcgaagccctcgaagttgcaatgggcaaatgctaagatttttaattcaaaaaaattgaaaccataagcactttaaaatttaaatacatacaaaaacattacaggctataacagttaatctactaaaaaattgactaccggaaatatatatataaataagtatatatattataaaataatatatgttgtattataaaaaagtcaattagttggaacgtcagtgtgaatgctgaaaaatatgaaataaattttaacaacacaatttacggcgctaagttgttaaacttattacaattcaaagtatcaattcaaaatcattcgttctcccacaaatgatcccattaaaaatgattaggtgctgtatttttcaaataatttcgtgatcaataactattatacatgtagaaccgattgcagataagcaataattgttagagtatagtgtacagtgagtttcttccgtatggtgacattggcagtttttcgttatcgatcatcatctttgacatacaaatgccatgtgaacaagccgttattattcatatttgtgggcccactgtgcggacgtcttcccgtggcagttgcaaaatcatgttttaaggtgtttttgatacctaataaaaacaacaacacggcccggccaaaaacacatgcaaaggggtgaaagagagatggatagagcgcagccatgccagaagggaaagggacaagggacgagaatatggtgatatgtgtacatacgggggagtatgggaacatgcatatagcagacgttagttaccgaagcagaagaccccctccattaaccctttggtggctacgtcatagccatatcgccacttggaagacgccaacattgctgctcgacgctcgccgtgtttattataaaacaacaaatcattcattataaccacttgtgtgtctgtatgggaaagtggcgtaaacatgaaaagaaacaaatacacacacacacgcgcgtacacaaaacgctccatgttgtttccgataatatgcatatttgcgtattattttgattttaataatgatttatttattattaataattcattggtggtggcctcttgccgggatttcggcctgattgcgatctgatccccacaatccaacggccccaagttctccgagtgcaaaagctgcccaccagtctcccagtcgcccaatctccatctcgtttgaatatcgcctgtcttcgggttgtgtaacagaagttgggctactaccagcaaacaaacacgccgcatcgtaggaaacgcatattataatgagcttcaattaagatagaaatctccaagactaaaaagacaaagattaataggttcacaattgtccagtcgagcggcttcaggtggctcggccaatagaactggagagaaaaaatttaactttataaattaaagaccaaaacttactttcctaagaagacacattacttatgcccttaaaataagaaacaaatattgaaacaaactatattttccagtgtaggcacaaagccacatgttcacaagcttgacgatcattaagcataaatacttctttcgtctgttcatgctatatgtaagaatattttatatgaataaagaagttaatcagagacaaacaacgttttaataaggaaactcccatgttttccaaactagattcccctacccactctgtagcaaaaaattagggcatctcggattcgttgataccttttctcaagagcctgtttggccagctcttcatgatttacgagatatgccttggccaaaaatgtgggtaactgttatggcagcttggaatatattttttcgttgttgggtcatcgattggttcgaagcattctccaaacatttgcttttacactataatttatagatttttattttgatttatctgaactagaactttggtcagaactttcggctcctcctgctgagtccttcgcctcctctttttggaaccacattaatgtcaatttaatgtttccttaatgacttcttctggctgcaacttctcgaacttgttgttgccggccagttgttatcagtttgctggtcaaactgggaaagtgtttatgctaaatagctaacgagttttccactcgaaagtgaatagctcggatgttcaagttgcattctgttggatttgatggtctgctcaaagttctccatgccacatgctcttggcgtctatttatttgggtcggcaattaagatttatatcagcccatttgatgggcaataaaaggccaaagacgccgcaagctgcagccggaaaatgagagcattttcccggagatctctctctctctctctctctctctattgctcatttatgcaactggcggctaatccgccacaaaaacgaatcgtgcgccgccttaaagagtcataaaaatcagtttctcccattgaaaaggtgtgaaaatttgctggtggggaggggtcatgagctcagtttttagggggcaagaccgcaaactaaatgtttaatttttacaagtcgcgtcgcatgtaaacagcactcagcatccccccttttgccagccatttgtttgaatttgtctaaagtggcggctggacgttttcctctttttttccttcataattcccattttcatttacagaaagaatgaaaaaaaaagacagagcggaaagcgaggcgtttgtcaaatttaataccctttaccccccctcatagtttttggccgttttcttgttctttttttttaatttaatattttctttgttgtttctttgcgtctggatggccacatagtagcagtatctgtgtgcggcactcggctgtctctgtgtctgttagctggaaattacgtttactcaggcgccaggcgcgcatatttaaatacacacgtgttttatcgctgccattaaatcatatttttatacttttaccttttacctccacggcaagctgccgacgccccctcaccgacccatttcgaggcgttggcatttcggattgtttacattttgcactttcatggcataaacaaagctgaggcgacgctaaatatcgtgaaaaaggcgagacatccagcaaactgcgatagaaacaggcgataatgccgcgattgatagccctagttcaaactttgaaagactctcgtagtgccagacgagatatcatgagctatgaagtgcactttgagtggctttgaaacaacacccttcttgaaatgaattatctgcttcgccaaactgattattaaatgggttattcgaaggaatgtagttatagtttacacctgggagaatgacttattaattgttttttaatttatatttacatacaaataattaaaatcgatctattaactttaattgaatattgttatctaatatagcaatgtttaatgtagatccaaataatctgcgtgcctctaattgattccaattatcagttatctttttgtacctttatatatatatatttctctagtcagttgccaatattccatcgacaacaacaaagctttggttggcaaatcttaaccggctccgcaacacgtgcggctggttaaccctacgatcccctaccaccagatccccacgtacccccatatggtccaaacaccatccatctgcatctcaagatctcttgagagcaaacaattttgatttcacattttttaaacgttttcttctctccgctttgcttgcattttcaggtaagataagatctgatttaacacaatacggcggcatatcaacagacatgggtaagaaaatttccacttttatttcgttacattattcgctcttaagttttccgaaaaatagtgtatagagtgtagagcaggtccactaacaaaccgtagagaactaatcccattatggtgttggtggctaaaatattgtagtattcgtctttaaggtgtgctaaattcatgaatcaatggggcgggtctgtgggtggaccgggaaaacctgggggccgcgtgtggaaatgattgattcactgtcccatgattacgctccagtcgagggaactcgccatgttcgagctgcttgctccgctggcaattaatattaaacatggcaattcaattggccaacaaacgcgaccaacacgcacggcggatgggcagggggagaaaaaatccagatcttggcccggttggacgccttgttcgagcggctcccttttccctatcgtacctcgtgctatcggctctcgttcccgccgacgatcaagtagccgaattgcgtgtttttcctgcataccctgcactttgagtgttaatttcgttaattaacagctttccagataaaatatgaatttgaataatatttttttggtttcattattcattgtctgagtttgctggagcattcaaatgaattaatgaatttttattaatttaattataatataaaaatgcagcaaatattccgaccttcttcattaatagaatgtaattctataaagctgatcgactgcagtttacagctgtattaattgttcttaaaataatgcatacagcgattaaagataacgcaagtttataatggaattttcataccttttttcatatttaatttactagaatatttgcatcccatccatttagttcagtgtatcacaaattcgtctatatctgatcctcttaagatattcgctgccgaacgcgaacatcaaagccccagagccactgaaggcgtttatttcagcctgttgtttgggaccttttgatgcgaggttatcaatcagtcttgtctcgcgcagctacttcttaaaatccaattacacacgtgaacgagggaaaagccggggacttggggatggatgcctccctctgatcagcgcgggtcttgagttttttttggtttttttgcgggcaggccactcaaattacatacattgttaccggagcattggggcgaaaaattgcggggccatcagtaaagctgagccacccagattgctgctcagtcagctacttcgctcccacttattatttatattcaattgataatctcgcgcaaatcggtagctaaatgttggcacaggcgcaacaagtgggcagctacttgggaatctgcgatcaactatcccagattcaagatccaccaactgtgcacggagagaaaagtgtgtcgttcaacaagatgttctgatctggtgaaatagaaaatgattagcttgcaagaatacataaactttaaattttccacactgatacatcattattttgcatgacaaaaatgggaatgcaatttctcaagcaattaatcattaaacaatcgatcagttaaagccgaattcgatttccacttttcaccgtgtggcatcacttttgactctcacagataagcaccgataagccccacagcttctggctgtggattatgcccagcacttaaggggcaacttgtgggggaggggtctttggatcgaaacaggggaaccactctcttccggcttctctgacattgaaagccgcgatttgggtccgtggccgcaagagataattaaatagcggccttaatagaattaaatgccgtgtttgcatttcaaaatccgcaacgtgccaaaatgcaatggccaacgggctgacacccccaactctaaaatgcatgtgcgtccacctggctggccgggaaaaaatgtcaatttggacaagttttgataattgctggtccccctagttactctatatgtttgtgtgtgtattgctactgtgcggcgcgttgcaggttgcatgtggccatgtggccatgttgcatgtagcatgttgcagttaataattattgaaatgtgcggcctgccaggagtcgtggcatgctccttgtgcttcctgcgcggcttcctccatctgaatgtccgtatagctgtccgtttgtccgtttatccgtcagtggctgcatgcttcgttaccttttagcctgaccaaaaggctaacaatgcttgcattttcccacctttttcacataactttttttcgcctccccggctttgttttgttttcagcgtggttgtttttgttttgttttttttttttggtctgtttttcgccttgtgtgtttgctggtggcagggtaaacaagtcggccacttggccaactcgttacttcccgctaaaaaccctcccctcacatgtcgattggcgatgtcgaagttgttaccactttggacgcgcggttcggcctccgtcggccggcacccctgtaataaattcatattcaaattgttaattgaatattatttgttaaatttgcaagcattaaatgtaaatgtcagcggcggatgtccgacgcagtgggcgtggcacatgagggcaaacgagagctccttattttttattcgattgtataatattggaatcgccagagccggtgttcgatttaattgaatttatgtgggattttttcaagttgcaggatgaacgcagaaaaagatcgaatttgtttattatattttttataaggttgtggtagctagacattcaagcaaggattcctgatcatcctacatagttaacaaatcttcagtcaaacctttaaaatagatcgaatccataaaaaaccaaactcggtcactgtaccaacgacctcaaaaatcgcctgcaaacatgcggaaacaccgcccccaaaaatcaacaaaaaaccctcccaggagagttttaaaattcgcgagcgaatgacaaaaaatggccaacaaaaaattgtgccaaatgcgactgtgagtattttgaatactcaggctcttgttcgctggtcgttgtccttgtcgttgtggctctgcaatttccataattcatattcatagacattacacaataacagccagtagagaaaggagaaatggagaacgagaaagagtagtagacccagtccagacaaacaaacgacagcacctgcaatacggacaaatgtccgtcctggcacacccaacaaaaaaaaaaaatagacaataaaagaatgtgcagagtgcgaaaatgccacatatgctggaaacgaaaaagaaagttcaaaaatcgtcgcaccacgcttatgcataaattattcccgaagcaaaactcaaagaagaattctaccattaatttgatgggcttcaaatcactggcaaattagcccaacacacagcactcatgttatccgagagatactccgctcacacatccgcattcgcaacgtgctggcaatttgattttacacacatcgaaattattaactggggagcactttgtgtgtggcaagtgtaagtgttgtactctttccaacggagcagaaacagttcataaaatggcaacagggcactttcgtttttaccgttggcatttgcagcatctgcaggacggccaggacgaaagggggggggggtggccctggcaaggacatcgtggcgtgtgtcgccaacgagcaaagagccaatggacatctggcgtggcctggtcagcaccggactgaggcaggtttcaattaatgaattagtaattttggcctcattgccgtaatgaacactttggggagatctgaatgaactggcaaagtatgtgctaattattggtactgaagctcagaaaataagataatattttatattattagaaatatagaatgttgtttatcacaatgataaaattcgaatagagcaaatttcttttcttcaaaatctttcaaaacaccgtgtatttaatattgagtcaataagcactactcatacaaagcaaaacactttaagctccttttagcagccgtgattacaggccacagctaatagcatttacactggcgtaatttaccatatcattgtgtcattaaaacgtccatttgaatctttgatccaaagtgaacacacgttggaattgcagtttgtttgcttagctacacttaatgaacggttggaactcgaaaaacagatacatcgtagatggaatcacctctttggggagtagtgaccatatttgctcgcgatgagccactggcttcaaatatcctggaacccgtcttatcgcggaatttacatccgtatcttttcggctgctctctttcgattcacttttattgccattctgtttgctccgctgtaggtatgcaattagtcaattaatttgaaaatttattaaccgccaaaaaccaatttgctccagatcagcaaaaacacacgagaaacgatacgaacggggggaataggaaaacaaaagaacgcgctgctaagatcgcgaaatgccggcggtaaactggcctcgatcttggtcaagatcacggctgcgaaagctgtaagatccgttcaaggcgttggtcagcgtacaaatgaagggtctatagtttgcaggactttcagcgagttagggatttgaaatcggagaccctaaaggagtttggtccccccctgttcccgtttgaaatttgtggaaaagtagtgcagataatttatgagttcggcggcagcggaagtgcgtgtgtatctgggagatacgaatcggaatcgcagcgactaccgatgattttctaggtcaaaaagcagagtccgcgaaataaatgacttttgtgcatgtcgcggactgcttgccgtcggcttggcttcaagccataaattttgtggtatttgaaaagcgtttgttgtctttcccactcactctgttggaggtgccctctctttcggcttatgattaataatgctcggttgagctgaaaacctgcttttggcggccatcatgatcagctgatcgcgcagacccgaaaaaagagcaaacgtcatgacaatgtccgcgaccgttgggcaaatgaaatgaacctggtggtgatcgctcatagaaacaagtgactgatcgcccataggaacaagtgtgctggtgtgcgtgcgtgaacccattttggaaatgtcagatggctggaaatcttcagtgatcttcacctgattcacagaataagttgcttgctcactgcacaggtatgcgatcgttctttctctcggcttcttattcatctgctctctgtgcgcgttctctctatttatctggctcctctctttcgctcacctggtgatcgatcatcatttcgctcagccggtttagtggttgctttgggagtaaatttatctgctctcggcgaaatgaatctcaatctcacctttattcgaattggaacaatacaggtaatcgtagaccgtttacgatattcgcagctgtcaatgggagtccgcagaggtgagataattcttctgattagaccaaggttagtgaggcaaagaagattgttataccagttaagattatctggagtcgttaggaaatctcagataagagacttggttggatttacctgtatgggtgttatatcttatagatgttagcttttgtaagatatccgaagttataaaaaattatgatgccgctttaaaattaaaatattttattttcaaacgttggttaggaaatttgataaaatatattcagcatatatattttcaaattaacaggaacagttttaatttgtttttactgctgtcttgttttactggatatataccaatcccgccccacccttttaccaatccaaaccgaactgacaacaaaatcacgttcccccgatttcatgagaaatttgtagggagacagacccaccgcagtaggaccgaaccagaatcgagcgtttccctgtaatctcaatcgatgatctattaacgagtgtccataaaaattatgcaactttccgctgcagcaacaaaatgtatgtgcacaacaacagcaacgacaattgagccagaatgccatttcctttgtcagctggggccataaatcttgagcatattaacatggacgtgcgatgaaagtgccagccaaatatgtcattgtcagttgggtttttggtcaggaagaagggggagtggaacggattggattggatgggatggtatcggataggttgggattggattcgagtaggagaccaagacgcctctgcggctgccggtggcgagtgtattgacacctgagcagcccaaacattcgaactagaggatggaagagaaagttagggtctgttagggcctcagatcaatagaacaggtagttttctgttttgtgaatactttcggcagtaaatcaccgatccaaactgaaactgataactggccaaaagtcgtatgccaagtattttgggccctgtttatcgcactcgatgcatttggaattggtcagagtatttttaggtatttatgcgcaagtttgttgtgttgtgtctgtgacacaaacacaaaacatgaccaaatttttgggcgtgagctggattgaggagcgagagagggagagagggatagatagagagcagcagagagagacggcatactgacagcgcccataaatctttgtaacatgacacttttggcaatggaaataaaatatggcattcggcgcaccaaaatgtcgcaccaggctccctcgatttttttgttctgttccttttatatttttggcattgcccccggcatttttggcccactgtgccatgcgacactcagcggatcgctcgcgtacagcattcagctaattacaaatgaaattacaatggtcagattgagcccctgcccaccgccatggcgatcctctgagctgctgttactgctgccggccaagtgtcacttgccgctgtcattttcgtttcgttttcatgtgtcacttggcaggccttcgctccgagccgctctctttactccttttaccccttttgggcccagtccttgtccttgtaataaagcaaaacggctgcgcatgcgcgcaagtcactcagcaacgatgcactgcggaaaaatggtacagtgaccatttaattataaaatcctttttttaaacacacacaactgattttcataattcggtatatgcattattccaagcttcatcacacggttttttcgcttttaaaattaagttgaaatattggaaaaccaatttaaatcatttttctaagtgcaccaactcggtaaagccgctgcctctgtcagattttgtgagtgtcacttgggctgctttgttgctgggacccgggttttggtcgtggtcttggtaactcggatcccgagccagactcttgggtgttatctgtcccgtcgaccgtcttcagtttcgctgcggttgcatctcgacgaccggcgagcgtccggtgaccgtcttcgaatctgtatctgtatctgaattcctgcggaaacacgcgaaatgcgcgcctcggcgtataaaactgttaactaactcaattttgtagctgtcagttggccaagggggctgcagagttcagcatgggttaatgagttgttgttggtcgttgccggcgtgccgcttacacatgtcacaacaaattgccagccgttgaggttcggcttgcccataaacaaatcacttgacctgtgaggcgaaatttcgccaggctttttttacattttgatgaatccagatctgtttaatatataggattaccgtggatgtggagcaagtatgccggcggctcagagcacgtgtgtcacgcagcaaactcacggatgcacgccgcgcacatgtctgtcacacaaatgtcacttagagttgcaaacgcgtcggacgcttaacaatttcataattgggtggagaaacgagggggctctctggaacagttgacattggcccaggagaatcgggcatgcgaaaagcgagtccagatatttagtattcaccgcgcatttgagcagccaagtgaccagcaagaagcaaagatttctgcacaaaaaaatgttcacataattgggaatatacaaatatctatcattattaaaatacaaaaatattacatattaccattacgcatttttaggatgcaataaatatttttggttaaattcgaactttatgtcaaaagtttttcaacaagaaataaatataatagtatattatattttgtgcaatgtaagccctgttcgtatctcctttttccccaaatgaaagcaaagttgacaattcaatcattgtgggttcttggccgcccggaggcgccactgcagctggaagtgccgggtgcttaatatatagaaaatagttagttgtatgcactacaattgcagaggtttcccactccttaccattcttttgtttgtttgtgtcacttggcagcttctgggttggggaaatgaaaggaaaatagggatggcgaaagcgatggggacgggaaagaggaggcacgttgacaacggcaacaattgcagccacaacagtaaaagggggacaaaaggcgcaccacgcggcaattctgcccagaaagagttttgcccatggtctagtgtgctggtgtgtgtgagccaacaaaacttggggccataaatttgcaacggatcacataaatcacattcaagtgaagcttaacacacgcgcccaagtagaagacacacacactaactcgttcttgcaagtccctgccttggtgtgcagaaaaacactttttccacttctggaagaagaaaaaccgttgtaatgggaactcgcagggtgcaaagtgtccccaaagggtcaacaaaggtcaacgagaatgcacattctaaaaggtgtgtagcttatcttaccttgaaatttattagctctgataaattaagatgtatcatataggtagacactaaacgaaagtcttaagcaaactaaattaaaatgctctgagcttgtgttataagaccaataaaaacaaaaacggtttccattaacattaccaagtgaaaacgccgtcttttgaagggctaaaaatcccactatctagaatgtcaaattccaaacatattgtagtggccaactctccattaggcaacatatccgaaattacccccaggatggcaaaactttcaagccaaattaactaaacggttaaagcaacaattgcaaattggcaacaaattcacagatcataaagtgcagccgaggtgggacaacaattccagttgcacttccgtctgcaaactccggtttccagttcccggcacccagcatcatttcatttgaagaactttgccatttgaacttgacatttagcacacggttcgaggggacttctttgcaaaacaattgcagtccaacggagagagaatgagagagagagagagagagagagcgtgagtggtggttgcggcgagaaagagaagggaagtgcacttttggcattcctcgactgccagggaatgccatcacacaagcacacgagctcactcacacacacacacatgtgcaggctggcaggacgaaaggaaacagttgcaagggtgcgaagggatgggccaagccaccccctgccggcaaaaagagaggggtagatgactggtgacagagaggggcgagtccgcatcggacgggcggccattgcagcacctgtcggccatgcggctgagtcgcgtgcttgtctctttatttgcttcccggattttgcgccattaaaaatttggttcgaaccttcccctttttgatcactctttacttaacatatatattgcatcaaacgaaatcaaaaaaaattattaaaaatcaaaagtggtggtctcctcttcatatatatttaataagtattagtattggtttttttttatttaaatgttaaacttattacaagtgaccaattttttgcattttttgaacttatagataatctatctagctagaaaatcaccagcttcgcacctcagccagccctttggaaaactggtgaaatggggaaacgccgtgcagttgcttataaattaacccattggcgaaatgaaaatattgtctgttaattgatcaatgtgtatgcaacgggagtgcagttgtgccatttggcatgtactcagatgtttggggcgtgcgtagtgcagctaaaatttaattagattccgtattagctgctgcgccaaatgttctggtcctacaggctttatcagctgcatacaattgcatggaaccgaactcacacacaccagcgcactttatgtggtacgtgcagatttattgttattgaaatacaattgcaaaattaactgtcaaagtgtgcgacccatcgtcaatgtactcgcaaaatgccatatgttttcctattcagtttgtgtgggtctcggaggtagtggggcaaataccacccatttattcaaagtcagcttacgggataaaaaactggtataacaacattaattcaaaataaaaatggggaaaatagcgacaaaaaaatattataaatctataagatatcaatacagatttcaatatgcatttaaattaaaaccatttgtttagtgtcgttaaaataaatattttcattatcatttcatgacagttttaaaaaattaaattttaatgatctttaacgctcagtgtacttttgtcatggtcatgattaatgatacgcttatacactcgtaggggctttattttgaatccatttctttggccagcaccaaaagttgccagtactctaaatcagtggctaaaactcgcccaagcacccccctagaaccaccctccacaccacccccaataaacccccaactgtttgcgctaaacgagctttgcatatttactgtactagcagcagacattttacgatatattgagagttatttgcaatatattttgcaacgggcaacagcagcagcaacaaggacgacaaatgttccaccgacggcggcggcaacaacaagtgcagtgtgttcggtgttcagtggaaatgcaggcagagaaagcttctaattccggcactgaaaccataagtctttgtcgcattgtacacacacacacacacacacacacactcagatacccactcgcaaatacactcgcaaaggggacgggatgaggggttgtatttgtatgggtggtcctggcatttcagaaggtcctgcgaggtctaggcctgaagttgcgtccattacttaggttcgatacacaagtttcgcctataaattcgaaacttatttttctgttttcgaagattttgtttaatttaggtaaatttgcataagatacaattgtgcgccccccatagaccgtttgtaggatctgcagagtcctgtttgccttttgcagtctctaaatttgtgcgaaaattgagccaaagttcagtttggctctgaaagaggagcaacaatcgattctttctatttctctctttttcacattttattgccccggcttggtctaaatttgaattcagctcaaattgaaagttcacaacgcacatatacacttgtagccagatctggcgggtattcaaatatacaaacgtacatacatacatacatatacatatgtatatatgtacactcggggagacacaccgatatttatgcgttttcgaatgcagctcaactcagctttaatttaaatggatttctctggctggcaaccctggcagacatatggcagcatttgcaatttgcagcagaagaggggttaaaaggggctaaacgggggtccaaatgaatgggaggtcgcactccctggatggccgactccactgactgctgaggattgattgtgcttgttgatattttgtcaaataacgcaaataaatacacaattacacactcaagtgaattcgttgcgagaatggggtgttttcgaaaggggggggctatggtgttccggtgttgccaggggttcctggagtcatggggttaacccgaccatggacgtgctctctgtgtgttatcctcgtttaaaggattttcatttgtttaaatgtgctttatcgaaaatggccaaaaggccgctggccattgctgctgttgtttttggtgttgttgcctcaactcctgtcccttgttggcacgtgaaatttattctcagcggacagtggttacaaaattagtgggtcaatttagaatcttctgaacgaaatcaaaaaattaaataattttgttaacaaatgacttatgattaatattactgccataaattgtcaaatcgtatctcatttcctttaaattatttttgttttatttaaaatggtttgcaatcgttatttgaaactaataaagtttcaatatattttgttatatatatttcaatcattaatcccactaatacatgtatgtatgtaccactgttccgcaacttttgactttgtcactgtttgtttttgcctttggcattgtttttgttgtggcttttttcggcgcacgcccgtaaattccaatgtaaaatgttgcatttatcttgtaaaaataataaatccgggcaaagggactttactctctcacgcttggcggcacatccagtaacagattgcgccgcccatctaagggatgcaatcggaagggttcgagatggtatgagattggattacgggctgcgggctctgggcttttggttttggggatggtcattgttaatggccgaatgggtaaagagacgtaaatttggctaattttattaaccgtcaatggagcagatccaacgacaaaggacatgacaatggggaagtggcaacaaaaaattagtcaacactcggccattaattaaacttatttattggctgctgcgcatttattccaattcggaaaatcccgaactgctggcgcgataaatttagtcgaatgtgaaaattgtgctgctgcatttccactgcattcaccatgcacatgtcgcggattttcattataaaatatagcggagggcgcgggcaacgggcacaggcgactgtcgcaaaagagtttgcaatttattttaaaataaaagtatctaaaagcatgacaaatagtgtgagatatgtttttgcgcactgcagcaggccaatccccctcgtccaaccccctcgatccggagacatatgatggggcgccgctgatttatttgcatacaacagcgcggcagacagagcgaaaatacaaaattcctcggcctgattcctcccctggctgattttatttctcattttttctgagctacgcccatttttgacgccaacagagacgcgccgattgagttggctgcagttgccaactttcaaaggggtatgcaaaagggggggctgggattggggttgggtgggatgccgacggagttcatgaaaaatccattcaaagtcaaaaaccaaaatgccagcaagctacaatgaaggtggattgtcaccatggcagagaacatattttcaaatgggtttcattgcacccaaaatgatacgttgttgagctccagtaaatatggcacattgcttattcagcaaatcattgttcacatcctttagcaataaaataaagagatttgataattttactttgatggtcatatgatcatatcatgaaaaggtctctattaaaatatatttcaactgctttataattggtttcaagtatataaataatttaactaaatattttaaactaagctggcagcagcatcttttaattttattccttcattttatgactcatcgtaaaaagttgaagaacaacctggttattaagagatttcagcttttcctgtatctttatctggcttaaaattaccctgcttgttcgccttccctgtctactgctcaattcatcatttggcaacattttgcccagcgccaagttgcatttagttgttatttatgcaaattttacatgcttcaacttttcgccaagtgcgtcttgtcgttttcgattatttaaaactttgtacggaatttactaggttgctagggatgaaggaggtctcctttttaatgcgcacacctgacgcgctccaacgtcttccgccgggaacacggttacctcgggccggaggattagggtctgccctccgtgcataattttgtgcgctgctgttgaggcaaataaattcttgagacggctaaagttattagattagcattagagagcgctgcgtgatgggacaacagtccccgggctgagcttagaattatgatttacctggggttatttacatgcgcataaacgaaattcctccggcagcctcaaatttatgaaaaactctctgtttagcgagtcatgtggcttttatagtttcggcgcggcaatttaaacattattattttttacattttacaaccaaagtggaagttttcaacctttgccatatcgttgtattcctataaatgttcgctaatattttcatatttgctttccgttttaataaagtgttcctaatactattatatttatgttttgaaatcaatactttccctatgtcttttaagttttctactaattatgatatttaatattttaagtatttaatttaatttaatttatatacatttaaatttgttaaatctattataatattaatttaaatggtccttgtttaatatttttattataattattattattttttattacgtttattacattaaccctgcttaaattaatttactaacatgtgaggcataatgacgttcctggacctttataaacgttttctctctattttttccaggtaagagatactcagaatctcttgcgggctcacttctaccagactggctaggtaagtcgaagttttgttatattttttgtaaacccttagcctatagttttgcctatgatttaatttgattttttttgtgaaaaatcccattttgaattttcacataatttattcacttattcgatatgcgttgcaaagccatttttcttttttgtggaacatctctcttttgattttgagattgcaattcccgaaatccaatacaaaaacatgtttttcggaagcgacatacacacaaaacatacaaaacaaaccaaaccgaaacccgtccactccaaaatgtccagcatttttccaaaattctccaaaaactccggatccattgaaccgagcttctttgaattttgcgttgattttttgcgtttggttgttgttgctgttgttggtgttgcaacatcatcacatcaccatcatcctgatcatcccgtttgtcttcatttcgtgtcagtcaaaaggaagcgtctcctgccagagttcgagaggtaaagcgatactttcaaattccaataaatctagtaagttctgtgttgtgtgcatatcctccaactatacccctagaatccccatgtacatacatacctatctgtatctcagtgtctgtcatagttcagcatgtgcatgcctcgaaaaataggtgttggtccaataagttatgcaactctgtacatataatatgtgaaattatcagctcgtaaaatttgcccaaaataattgccaattattcagtttgtcaactcgggccaaagcacacacacacacacacatatgtacactacataccagtgtaacaaccaaaaacactgcacacacagagacacaatttccttgctcttggtgtgcaattaaagccacccaccgcccaatgaggaaaatcgggtaaaagtatcacttggcacgcaaagaaaatcagcgagaaaaatggtgatgcctgactgcgaattttacaaagcgtatcattttgttagcagtttttcagcaggctgcacttgacaagaatcgccccggggcacgaaagaccaagtggcactgtggtgcagcagtcacacagtatagtacagtggcacctcccccgcacagccaattaaacacacatttaatttactttgcccgtttaggcactcgaaaggctgttaattcctgtttttagttatgttaaccaaacactcgacagacggccaaccagcaacctctgcagtttcctatatgtttatgggcaatttatacaatagcataaattaccggcacaaacataaacaaaacatccttccaccgagtgccatttgccaatcgtaatcaattcctgtccataaaaaaacagggacacagcccggagagtcctgtcgccgacagtggcaacaacaagtacgtttccaagttcgtatctatatcctcatagctacccaacctaccaacctaccagccaacccaaccccacgcataaatatttatctgaaatgttgaaatcttcaactgcagaaaacgtaaaatccattagaaaattaataaagtctatggcgggaaatgtattcctacgaatgcggttttccactctctctgtgtcccactccacattttcctgacttattttttgtcatatagggaaaattggtggctgttttttgaggggccaaatgtatattatgccgacgctaatagaataaaatccaatcgattacaataatgcttctttgtctggataatgtttccgtctgagtttcggagggaggagtttctggagcggttgttgtcagccatttaaggatataatccattagaccagttcaaggcagatgttgcagagtgtgggcactaaggatgtttacgtttataaatgagagctaatagatgttggatatattttagttatttattacacaggataaattactaattttacaagtcagccgcattaaattaggacacttgttatagaagatatattaatatataataattaaagattcatgttccgtagatagattttctttctcctcagtttttattttataatcaattacaatttaaaatcataataaccacctttgtagatcctcaattgctctgattaagatatccatacaaattcccatcaattagatcaattatattgtaaattgttataaaagatacatttttattcccagtaactaagtaaatatacaagatttgttaccgagatatgtaaattccccgatgtgtgcggctttgatcgttttgttggccagatgtttgcacacactttggagtaggcttcattatcattcgggcggggtctatttataaccggggggaacatgaatggagcaaatgtcttaatgtctcgacaagatcgacgcgtcggcgccctcttctccctccccctcacgaaacgaaagcaaatggcacgcaattcacaataataacataataatgtgcaataaagtatcttaatttgttgaattgttgataaactttggcgccacttcgcggataaacatgaaacgaagcaattggaaaattctggcccccaatccgcctatgaactgttccatttggtgaacgtaattcggcaggttggaaatacttttactttgggtttgcttatcccacaccaattacttgcctcatgacaaacagaaagttttccctttgtcatttccggtatttcgatccacttcgttccattgcaattatcagttcgcttgacttctgacactgacaccaggtgagcggggcaggtaaactctgagatggggacaaattccaactgcaacaagttgaattatctgcaagtgcctcacgtgggtatatatatgtacatgtttggtggcccagtatgagtgcacttccctatctggtcgttggtcgtgtcctcttaattgcccctcagagagagacttggcaaattagttaattggcggccagcttactttgaactgctccacggccactggccaacaacgtatctcggagatgcagatactgtggaagtccccagatatattctaattcttacttctacagggataaacgtacgtcgttaaatcattttaattcatttgccaaatagtatacatatatagaaaaaatacacgattttctgttatactgatttctgaaacatttttttttttaaattagtttaaaaacttgtacaatacatctcgctgaacaagatccattctcttagggtcaaataccaaaattcgacatgaaaacacaaataaataatcgctttcctgttctctctcttcaaacgtcctttgataatgccgcattttcaacgtattattattaacacttattatacttgtgtatatatatttgtatacctacatgtatattttttctgttaccggttatttgaactttttcttacctttttctcttcttgactttaaagtagtgtatttttcgacagtaattactggttatagtccatttatattcttatattagaggtttcagagactctagaatgacatttcaaaatatacaagaaaataaaacaagttttcagggttagtgtcaatacaaaataatgcccaataaaaaatcaatgcttattattattatttgtttgtaagcaatagaattaaaaatgaaatcatctaagtttataatagcacattcgcactttgttgatggctaataaagccagcctacaaatgctaatttaatcggtctctcctaatctctttaaatgaatgataaatggccaccgaatttgaataaaaatgtttgcaattaacaacggagttaatatttgaatgccgttcgttttcaactcgattcgcgcgcaattaaaacactcgttcgtcaggtaaacagaaataaaaccaagtgactgttctccttttatcgatttttggtggccattagctttcacacagttacccatattttccgccattcgaaaaactcccccaaaaatgggaaatgcgagcattttcagctccaccctcgccgcaggcaatgtggcagatatttttctcgttcttttgccagctcagcagatgaatgcgtataattttcggtttgatttatggccattgaccccgctttgggccacctttagtcgcacacatggcaaacatccgacagccaacctcagattttctatggcttctgatgctgctccttcggttttatcgctgcgaatgctaaacgcaggccatccatttgtggaaatcctgggatccagcttttgggagggcgggctttattacattaggcgttcgtaaagtaaaaattgtgccactttctcaaaaacacgcatagcacaataagtgggtgtgtgcgtatttgccactggcgttcaacctgctgtggcaaacaaccaaaaaaaaagcccggaaaatgccaaaagatacaggacccaaatgtgcttgcctgtacgcttttgtttgggctcactgcgtttcctttcgcttacataatcagtcatgttatccttgtttcgccgcccgccacccaaacacattaggatacacaacgcgacagaaacaggcaaaaaaataagaaatattatttatttatgtcgctggcctaaggcagatagttttttatttccattgcgtgcggctagggtggtttcgaattcggtcagcctttgcgtcgagttcatgcgactgcataggaatgtcgaatatttacaatggagtttaggaattttttctagaacttagtatacttcaaatcaatattttttaatgaaaaacatacttaagtttgagttgcattcctatgttttactattgttgtttcaaactaaaagtatatttaaaagggcaaataaaagtaatgctcattatagcattatagctttaatgcacattatagctcgatgtattaaaagccgtgatctgaaaagtccatttaattttactcgcatcttgaccgtgtgtttgctcgcatttccatttccccagcttttcccagaacaaaaactgggtttttggccttccgcaccgaattcctttcgcagttgataaatggctttctactcggagtttgttggttttattgctctccgggttctggtttctgggccttctatgctctgctctcgcgcttttagccatttgtccttttcgcattcgccgacggcgaaatttttgtttgtttccacttgccttgcgccggctttctcctcgagttcctttttttctgcttgctcaacggaatctgtgctatttattcacccaatttctattttttctttgccttttgctttgtacatttatcattgtgccttcaaatgcacacacacacacatttgcagggtaacacccactaacttgtacacttgcgaaaatcaccgagttaatagtcggtgaccttcttttctctgcatccattttgggctcttgacatttcccaaagagtctcaagtctataatctaccatattttattaatcataattgccattacgtttttgtgcctttcggtgacttcgaatcgaagccccataggtgaaacccccaagagaggtgcggccaatgattattttttttagtatttcccaccaagagtatatcatattaggaaccagcgagttccctaactcttacatatagtatataatcaaattccacatattataaaatatttgaagcaactaacgatcgtaaagaatttttgatatttataaaaaaaaaatatatatataaataaatatatatgacaatattttgaaaatttcctagctaactgtattaaatgaatatacaattttaaagatttttattaattgtcagcaacttgtgacagttcctaaatctttataaacaataagataacccattaccaatgctatatgcgtgttccacctcagcgaactcataaataaactttcagcgtcggcggatatatgcgatttctgttttttcttattggtatggtgatacgcatgttgagccccgcttgcctcgcaaactgctgatgatgacgctgttgtgcgtgttggaagcccaaaaaaccaaaatgagcttctaaggcttggccgtcgctacaaacatacaaacacacttaaacaacttttgggtatctgggaagataaggcgatgaacgaattaaccctttatttaaaaaaaattacgttttttaattgcaaaccatttatattattgctgtggtaaaatatttgttcgatgctttttttttttgagtatagacaaggtgccaattttttctaagtgcctgggcagcggtatttagagggttaagaacgacgagccatctgtcggccatcccgggtacctggaaagggcaaaaggcaaagcttttggctcaaaagacgagcttacgggatcgctggcttgacactgggctacaaaaatcgagttccgcgggcacatcctctggatttcgaattaaaatgcattgcatgccgcaacgcgtgggtggaaaaacactcgttttgatgaggtgtcggctgtaatttaaacaacaacacaggccagaaactgaatttcaattgccgattatataattgacttatgctcgctctctctagctctttctccttggacactccttctcttcgcagcctattcccagtggaatgacccatatacgaatttgaattccaaaacctagctgataatgatggaatgtgagtacgagtgctttatggcaactcaagttgctctcttttcacttctcgagtcgttttcccgcataaataaatcgatgaggactcgagtttttttttttgctaaattcttcattctattgatttgttccccatttgtatttgtttgtttacctcttaatgagtgtttttgttgaaattccagctggttaataaagtttagtttatttttattgtatgaaagactctttcaaactctctctctctctctttaacaatttaatgaccataaattgtgcagccctcgtaaaacatgcgactattgcagctgagtaatttccatcgtttttattttgcggaacatgcgcaaaagcataggaaaagataaagaagaagaagaagaactagccgccgcgtcgcgtgtgtagaaaataaaattaatttattatatttaaaagtagcaggctgactactgaaaaaaagtgagaaaaaacagccaagaaatacgattctcacataaatcgcgcagctaaagacgtgcttaatactttttatgtgtatttctggacacttggcaaacaaaggaaatggtttatgacccgaaagtattgagttattgttgctacaccgctgaaaaagcgaagtgaatctaaaaacttgggtaaaagccgtattactctttacctgtaccgcgctaatttacttgtgaattgttgatcaaaaataatatttattaattcctcagcgacaaagagcgagaaacgagagagtgagcacttcccctccacacactcacacaaacgcaaaaacacatacgcggcacctactcaacggctgctgatttatttcacataagtcaaaacaggcgagcatataagcgcgccgcgacagagcaagacagcagcagccagcgagagagaacggggctgggttatttgtcttgcggcaaccgccattattcatttggctctttcgctcttgcgtgttcattccgattttcactggacgcgctcgctctttgagcgagtgcgctctcactctctcactgtgattttaatggccgctctgaagtgtttatagttggcacacaatattcgcaaagtggcatttcttatggccgtctctctccgctcctcttttccgcccctttttctcttgcttgctctctctctatcgtttttgttgctgttttccatggattttcctgttgcactgcacttggcgttttccagaggcaaactcttggcttttcttcttggcagcagctgaaaaaccgcgcaaggttccgctgccttctctctttcttggcaaaaagagttgttttaaaaattatttacgaccgcttcgctgacgctgttcattttcccccgtgcactgtaaaaattgtatatcttgagctatttagctaaatagttaatagaattattaaattactatccaaatagaaatacttatttagattatacaatacaatctgaaaaatgtggtaattaagccgaaataagggtaagaaactttactctcaaaaaaggcgataattataaatgtgatatttttgttgctgtgtggaaaaactgaaactcacttccatctttattcgctcttcctcttcgtgctggccctgattaatagttttatttatttttagcgctcatcttgcaagtccaaagtcgttttgtcgcttttgttgtcgtcgccagcggaatttatgagtctttattaaaacgctgtatttcttctcttccgtccttatacatttatccccacgtcgttgctttttttgttttaccctctccggcattatcagttaaaccaaaatttttgtttttatcaaatttctgtcacatttcgctgatttattaggcccccttatttattgttcaatgttttcccaaagactttaatgaagtggccggcggggaaaataaattaccaatactattcatggccctgccagaagtgataattggtccgggagaatatatttatggatttaaggtttgatgaatggtattagttcataaggcttgaaagaaactttctacatcgttagaatgaaataagggattatcattataagctttaattagaacgggtgaactttttactttgtgaagagtagaatatattagcttaaaacagttttaaacgtttcctgtggaatgtaaatgttgttacaagttctttctcagtttatgttcacgcttaatttttaaataacctgtaccttatattttctttcatttcgggaaaacgtcgaaccacattttttatctttggaggttgacagagtcgagtgtttgggcttaaaaaaaaagtggaatcaaaaaaaggagacacgaccacgactgctaacttccagctgaccttgctgaccctttcgggccaacatgtgagaactctgcagctccagctgggcatccgatcgtgtggctccgtgtcctcgaagagatcatgacaagattttcgtgcccgcgcaggaggatgagaaatgtggcgcgggacacgatatttctctgcgaatttcggcgggaaatcgttgtaaattctcaggcggcacgaattcgaactcgactgaatcgcaaataacaatcgttagagttatccttgacttatgcattgtcttctggtagtttggttttttttagggaaccgttttttatgtgtgcggctgagcaacacatgagaaacattaaaaaatcgttccagagccgatggtgatcattaactttttgacgccgccttcaaggtcggtgtttttccccgaaaattattccacccagccttcaaatcggcgagaaatgtgtgcagtttttttacgaggtcataaaaagtacaatgttaagtgccgggcgtcgtaaacaaaacgcgcgccttgcagcggaggcatctctgctaatttggccttccgttgaaaattcaggatgcaggatgctgcgagacaggccagcggacatggccagaacacacgctgtcctgcgacctctgccctcgcgatccggagcccaatcctctgccatttaggtagatgggccagtgcatttggcagttttttatgggcccaccggcagttggcagccgtcgcagtggtggaaaaaaagaataacaagaagccgaaaagtcaaaaagtagatagcagcaggtaaatgcggcaaattgcatccagagtcgcaggaggttcacctgatgagtggcgagagtttcgaaaatttaaacaaagtcacaggaggttcagtccctaacggtattgggaagtcgtcgttatatgtatttaaataaaaaggtggaagtcaaataactataacagtataatcctgctaaataaacagcgacctaatgaactcacataaattaacataaccatacattcaaaagtaagttgccccttaagtaactcgtcaaacttttgagattattaaaagatataaaatgaagagaatttgtttatatttagttatgtacatcttaagactttcaaagtaaatcctaatcctaatggtttcaaataatgacgacgatgtattcttttggaaagccaagaattaaattaatatatacatacttaacaaattatacgaaataatttctacatataaccagcaagcaaaaaaaaaatagaaaacaggccgaaaaaggtatcatgtggccaagaacaagtcgaggcttagcgaaaaaaagcaaattaactaaggcgcaattcgagtggaagtcttatcagatttctaattaatttaattctgcctcgtcggcccaaccactccctgccgccccctaaaacctgagtcgacaaaaacggcgcacaggtcagttggcggaaaagggaaaaatagggggaaaactgggaaatatgtggggggacgtaggaagcgggatgagggacggcgaacggttgacttcctgactcttgtcaaagtttgctgattaaatcagtcatagaaatgtcgaaaggagaacggagaatggcgagatacacggcgacaaacgaaaaacttttagaccaaatcaaatatttgccttggccaggacggccgtccagccatttaaccgttagttttgtggtcgtattatgcaaaaaaaaagaaacgaaatagtggataaaaactatacaaagaccaccagcagttggaagccatgacacggagggggaaaaaagctggttaaaaccaaacacgaaacagttaagagggaggcaggaaaaagccatcgtcatcggcaattcaaacatatgcacgcctctgcttgtgccgcagtcgacggcgctgccgactgcttagttagcctcatttagaaaacgtttgttatgcaatgccaacatttgtattcgaaaatgttttttattcagttgttgacttttttcccgttcgccgttgagttggcgcggcctaaatggccgacttggggtcttttgggcctgagaacgtcgaggagatggccgaaacgatggcgacatggctttgtgccgacttcagctgtttgttttttccttcttggtctcgcttttttccttatgctgtttttttttttacttttcaacccgcgctcgagtttgaattttaaatgcaatcatttcctttgccgcagttggcaacccgtggagtaaggacttcgtgattttcgctatgattgtttaaaatgttaaacgggttaactaacgaaccgcagagaaacggcacccatatacaacaacaagaaacactaaaaacatgcaaattcgctcagtgtacgaacgatgatttcaatcgctgcacgcccgcagaatttccacaaaaattcgaaaacaaaagttcgtttgatttatgcgtcgagcgatttataaagatgtcgactgcaagtttttttttttatatatttttatttctgttttgatacatctccgtatgctttggaacacaagtatataagtattttgtcggggcccacgttttcggatactacctgaaaccctccatcagctgaataagataaaaatttcgagtttttttcgtgtccgtcggtcgctgtcaacccaattcaaattgtgtacaaaatcgtgagtcgcataattaaaatttattcgttataatcatggcaggaatcgggcaattgagttgttcgcggtaatgtctgagtatcgataagcagtttaaacgagaaattataaaacagtaagcccgatactcctttattttcaaacaatgtaattaaattgtgataaattaagtatttcaattaaattaaatacctaacaaaccgagcaattttctttaaaaatattgcatattattgtcgatctttgttattcagaagtaataaaaaagacgcattttcccatatataatggctaggtatctgcttaaattaattattgtttattctgtacaagccaagtgtgattagacattttgccagtcatggcaagacatttaacctaacgatctctctgaaggcaagtggagcagtgtggagcctatttatagacaaccaatcgatcagaagcagtcactgctaaaatcatggcgccagttaggcagtgctgaaaagcagtgaaaatcgcgacgaaaagccgccaatctgtcgcagccacttgagtcaagtggtcagggccgctgccatttttggttgcgatgcgaaaaactttacaatggcaattaaaagcaattacccaggccattaacgcagcagcaactgcagcgcagatacctaaaatggaaaaacgccggctaaaagctaagaaaagagccagcaaaaccacaaaaaattgagaaaaaggaaaaagagtgcacgtaatttatttgtcatcaatcggctggcaataagtcagacaatcacaaaaatgctgtcaacattaagacatgtgaatacgacgaatacattttgctgcagcaacagcggcaacattgtggttgcattttgctgagacgatggcgacgacgtcgccagcatttcaagatttatgggcgtgtaacctgtttctttaattgcacatttgcagcccccaaacgacgtcaatagcagcagcaaaagcagcaagaaacgtgaaaaatgaataaaataaaactgcatacaaagcaaacgaaacgatttgaaaatgaactgaaaaacagtagcaaaaacactccgatgcaaacaaaagctgcgaccacaaaaagcactcatttaattcgcttcttttttttgcagtcagttcctcttgtgttttttacatgcctttgcttggctgaactgcatcaaatctggaggctgacgatgcaaagagaaaaggttgccattcgtcagcgaggcacattctccatttttggcctacagattttcctttttggcgacattgcagctgcaacatcgttagcgattcgccaaatacgtgaagcaatccatcattaaattctattaccagcagccgtttaggcgatttcgactttaaaatctactgaacgacacactagctgcattaaaatcatttcaacttgattttaagtgaagtattgcttaaggaatcgcacatcttgatttttaatgaaaaatgatttaagcctctgttcaaacaggaaatttgtgtggcaaacgaaaattaatattatgaattatttattttattcaaataattggtcttattttagtactaatcattcatcttatcgctttataaatttatgttacgattgcccattgaagaaacgcagagtcaaagtttgggcatccaaattaatactggcaggcgtcagctaattttataattcctttgaaaaataaggacccagccacaagagccgcatccttgaacattggcaaatacaaacacacagccgaaactcaatgaaaacttgcaggcaaacaacatcccaataactgttttgagtttcatgtttttgtcgaattaaaatttgctacaaggcacgtctcggcgagagcgccaaactttgccgctgccgctgatcctggggagcacacagaaaaaggacgaggacaagcacaaggaccctgccccttgtgccagtgcaatccttttgccggcttgcttagttattcatgtacatttgtatcctgcgcataaaattgcggctgcggctgctgtgcggaaaggcagcagacaaatagtaatgaaaactcttctcgactgccaggacactatttcttccgctcgtatcgccatggtatcgccccattgttgcaacaacggacggcagcggcaacatttcgacataatgtaaactaattaaaattcaaaagccataaacagattttgccaataaaactttgccagctaaatattttttgcacacatacacaaacatcgagtggatggtggggctttcttttcctccctccgcagggaaaacaaagaaaacttctgacaggatttttggcttcaagttgttggcctgttattcgcattttcttgtcttgccgccttagggccagaaatctcgggttaaaggcagctttaaagtttgcagttcgcatctccaagatacattcccacttgtgtttgttgccattgtgcattgttgtatctgtggagatgtatagatacgactgcagatagatgtgcacatactctatagattgtatggagattgtgtatgtgcggagtgtgtgtgtgtgtgtgtgccggtggaggaggaggatgcagctcagctcgagtcgagtgcaggaagtgaaacgtaggaagtgtggccaacaacattttatactcgagcgcataatattcatatgcaggccataaaaaactttggcagctcaacgagagatcttcttccgacgtaccgacaaccccctccaggtttcacctccctcggagacacgaacagtggggctttaaaatccgggaatgtggttcttcaagggcttaaaaagaaataaaatttctttaaatctaagaaatttcgatgactttgtacttatacttatactttgcaagaaacaaaaataaaaattcttaaattcgcaaaattttataactatataggacataaaaattcgaaactcaaaatgaacacaatggaaaaattagatgtcgacattattcataattatagatcgaatttgatttcttttaatcgattggcttagttttggtgaactctttagcaatattttcccatagtggctcataatgcaacgctcgatagttgggcagacatttgtgcaatatacgagagtcgagtcgagttgagagccaagccgacccctcggcccgcccctttgacccctcgtgtcccgattgtttgtgttggctgctgaacaattgaagttcgccggcgcaaatataaaaagtgagcaagagccagagatatatgcacatttatatccacgtatacatccagcggggcagaaagagagagagagcgagctgagactcagctgatggttgtttttgttggcggtggtggcggcggtggcggcggtggcggtggtgcaacgcctccatttgcaagctgtgggccaaagttggaaaacgggagcggcaggagcttaacttaactttgcttttactgcgataaaatgaaaattgcacacgcgccataaataaggattctcacaaggataatttataaaactttgctcacaagcgttttacttatgagaagcgagcgacgccagacaacgtactccacacctaaaaggacgaaaacgggggaaaagtccctgcactgaaggaaaaaatgactgagatgtttgaaccacacagtcaaatgaatgagtaatcaattctgtacaaataaacgaaatcatggaattcttatatacataatttaattataatagtccttaaaacgagtcgttttgaccctcttgaaattagaaaggactgttgacaatgaaaaaccaaaactagactccaaatgagttttatttaactgtattggttttcaccgtgtacttggtttgcattttccccaaccattcgtcctgccgcaagtgaagtttgtaaattccacgggagttgggaccgtgacgtatgcaccagtacctgacccgccgttggcccaagccccaaccagcagacctcccccgccaatggtgaccccgccacctctgcaaatggccgaaatatccgtaatggccaaaaccccggaatctgtcggcctgggacgcactccggcattgtaatcgatgtgcgaaataaacaaaagcggacataattatcgagttatcgcgcggcgccttgctgcgggtgtgcctatcccccactgatcccctcgtgaccccatcgtgtgaccccgtcgcaggcccgccacccccttttgtagccctcggggccgctcggaatgaatggaactaagcccgcaccgaaaatgttcgttacgacggcaacgcatcgatatttatgatgtcatggattttattgttgcctgctgcaaaatattcatatgcacactgtgctggccaagagtccttgccggtccaaaccccgccctccgccaccactccactccgcctcacacggaaacagtaaaatgaccatcagcagtacaggatgtaaattttgcagcaaaacgagacaacgcacaaggatatgaacgggctgcaagagtggcgagtgtagggatagtgggtggtttttgggggcacttcagtgggtggttattgacgtcggcgataaggcggaaaacagaggaggagcaagagattgcgatagtccggcaggatgttcggagtcaaatttgagcaggtcgtggccccctggccaccccctctaggtcagagggcaataaaatgttgccgatattatttcgctgttgctgctgttctattttttcatccgatttttccccttttttcttgttttggccttcctttgtttgccgagaggtgtgtgtgagtgtgtgtgtttatgcctattgccaagtttgatggggtccagcatcagttaagcgcccagcagcaacagcaacatcggaagttgctcatatgcctctcggacccggtccaatgatgcgggctcgctggtgttgctgcacttgagttatgcgcatagattgaaaatcgtcgataaccgaaaaagaatcgcacgaaatgcagcaaaaaacacgcgctttgcaattgtttgccggccatgtggggtatgccccatcccatcctaccctaaagggggcgtgtccacacgaagtttgcggcgcgtgatgcaacacgccattataaagttattaaaagggaacacagccggctaaaagatacgaaaacaagccgtgaaacaggtaggaaaataaggtgggtcggcccaaaagttgtgcgaatatttgtgggagaatggggcaggtgcattaatgatggttagaccaccttaattagccaaaaagttggctacaaaatctaaattcaatagagatggaagcaaatggatcaacaaataatagtcaattaatggtatgaatgcacagtatgtcaaaaattatggtttcaaaaagtccctttactactctacactactgtgttttttctcaaacaattttcattgatgctatgttttttatttggttacaaaatattctgcctgccgtctgctgacaatcaacaatgccaaaacgtcgaggaacgagagcgaatttgcaacaatgcagaaattgtttatgagattaagcccataaactgcgaaaatgcattttaattgaagtgcagctttgggacttaataatatttcgatttttgcactttttgcagccacagtggccgatagtaaattttccaatatcaggacgcgaaaggagtcggtttaaaataaagcgagaggtccggacaatggcgttgattgtttgaactctgcccggcgcttcgatgcatgtttttcccatcatttttttcatctcgcaataaattggcaataagcataaattgtgtggatttatgcgcggtgctcacatgtgaaaaataaattgttattttttttcaacaaccatcaaatagagaaaagagattaattaacagtggcgatgaagcagagatagttagtaatttgcacatcccaagcggatacagcactcgagatggaaaggaaacgctttcagacaaggcgctaattgtcctgcgtccttgaaggggacctcataaatactcaatgttttgcatgaattcgaaatgaaatgttgtctgagccgaaaatacggcagaacagggcatttaatttgtatggaatccatcagcgatcctttgtcttgtttagcactatgtgaaaccgaaaaaagcacgaaataaaataggggaaagccagacaacaagaggaaacctccagctagccaactcctttgccgctttcatggctttgttcaaaattaccatcaagttgacagttctatggcgcgatgacagttcacacagatacacgaacacacggacacacagatgcacatatgtaaatgtcgccaactcgttggctcattcttgtggaaaatgtttttctgcaccgcaaaacggaaggaaaggaaggaactactgggcaaacgaaacgaaacgaaatgaagaatgtgaatgtggaaaaaaaaataggaaaagggtggaaaatgcgatagccatgctttccctcgacttgaaaatgcaaataaatgtaaggttttgtcattttttagtccttccacgtcacgaattcgtcactggccacgtgaagtataccccatctccacctccgtccaagtttttttttcacattgtttttgtatccaccgcagtctggcactatttttgtcgctggcattttaagtgtcacatttaaatgggatttttattcggtcctagccacgcaaatgtgtgaatttttgtcgcgcctcggttggaattttaaaatgggctcccacctttccgcttttagctcgtctttcatatgcagtggcagcggataaaagtcactcaggtgctaaaatacacggcactcactgaaggggttatttattgggcttcagcatggaaatatattctcagatttataaatacgaaaaaaatccaaatatgcctaattacatatatctgtattcaaaactaatctcttgtaaaatgatgtgggaaaatatccgttaagcctattttaattgaacatttcaagtttccggcgaagcatattcctagggggaaccaaatcttaggttacaaaccaactcctaaacacaacgtggctcccctagatttaaaatgtgtatcccccttcaaggagcagatcgcttcttcttgacaatgggaaactgataaacctcaagagactcggaaaatgccatgtcttatcgctggagataattgtcaggccataagagtcattcgaactccaattacaatcactgctatctgcctcctttgcttttcgttaaaaaaggaaaatggaaacatccttgatccttgtcttttgggaaacatggcagccattactcaagggccgcacacaaatgtcgctatttttggtcgatttcgatgttcgagtacttcccaccacttctccgctttctccgcctttctcctgctctttctcccgctgcactgaatgtctcactaactagcgcatatgcgcacatttcccacacacacacacacactcagagggctatggactaagtacccttgagccagctacaacatgttccaatcataaatcataattcaatatggagtactcccccaactccgaaatatacatatatatagagagtggccgaacacgcattacacccattcaaatgaaatatgcattaaaattgcctaccaattggtgaaataaaacccgatcggttctggggttacgccggaaaattaacggaacagttgggagctatatttttcctagaaattcaactgacactgcattgttttattccatttaaaatgggaacccagacgtggtaatgtgctaattgccttaaatcacatgaggatttcggtgtctggcaagtacacgttgtgtggttacttaaattttgagagttctaagcaaatcccacagtatctttggcagtgttcgaggtattagctaaacatcggccaactaaaaacccaaaagctcccataaattgccattgtgatcctggttttggcatacgagtcgagccaaaagattgtccagacatcagggggagattaggtcgaggattaagagactgctcacatggttatgcaatatgcactgcagtactcttcgatcaattaccatgtaccataaagaaacttgtccatagttcgatgacatcgcggcaagctgcaagtttgttgcacaagaaggaggagctgatggtcaaagatttaaaagtaaaaatagcttcttattcattttcgatacacggggcagctgaaaggaagtgaaactggggtctgcatgcccccataaccattccagttcccaatcccagccccagtccgcagccatttccattcctattcccggaacgtgcaatgccaactcgcatgttgcatgttgcacgttgcatgttgcgccgcgtgttgctttatttgcatacgaggacgcagacagatggtggatattgtttttgggggtaggtgaatacaagccgaatgcaaatcacaagacagccagaagctgcaaattcaagtttcattaaggagttagagtgaagtattaagatactctcttcatatctaaagttataattaataactaaaactgcagctatgaatcctaatagcgtgtaatacaatcttctaaaatacaaacaaaactaaggatatatgtagcataaacttttcctctttctatcttttaatcttaatttaaaagaaagaagtgcaaatatataaaatacctcgttactctttgtaacaaaattaatgtttcagtctcaagtgcaatagcgttaaagatgtaggccatggtttcggccttttatattcccatatatacgaacaaaagatacacacacatgtgagctccatcttcaattggttctccctcaattccagagttcgaatcgctgtcggacttggcaaaagattggcttttgagatatgcccacaataaaacacacaaataaagcttgcaaacctgcagcaactgcgactcacctttgcctgcctcatgccccttgccccatgctccttgccccttttccttcttttttttgcctgagtgttttggcttcttggttgcgttttcttcttctgctcctctgttggcggcaaaccttttgtttattttattatctttggctatttggctgctccatgtgctgtgccgccccctcagccccttccccgtatcaccctgcagctgctcttcttttgtatatggagtgtggcgaaaacgcttaaaacaaaatttatttagtcggcccaaacggaggtcgcgcgagattcgcaatgcgacaaaaatgcgactaaaaataaagcaaataacgacacaaagtgagcagaaaatgccagggggaaactaaaactaaaaataggaatagaaaggcgtttctaaaaattaattttatttgcacacatgtatgtgtgtatgtgtgttttaagtaagtaatttttcgcgagggatctaaaatagcccccaaatcggattcggaatcaaaatctcaatccaaaccagaatcagaatcagctgccaaatccaattttatgatggcgcgcaggcatttgcataaatgtttttggtggcgcgatagagaaggcatctgtgcagtgcgaaagagatgggcatatggtctacaacaacgcagcatgtggcagccttgttgatgttgttcattcgtgagggggttttttgggtggcagataggtcccatacatagggagccggacattggacatcggacatgacatcgcattgcattgcatgttcgccgtgtttcgcaattctcgcatgcaacagcaaacagcacgcgaagacagattagaaacggactagcaccgaactgcatggggttaaggggtgcccaaggggggttggtggggtgcgccaagtggagactatgggagccgtctgttatcatagcaaaaacacagcaggcagctgcagtcgcgaaaccgagaagcatcaactgcatatgggttacgaattgagtgctgtggaacagaacccaaagatccaatccgatctgcccagactaagtgcaaaatgagttctgaatgcaatcaagagttcaaaaatgagttcaaaaagtttgaaataaagatacacctcagaaatataaatataataataaatatgtaacaaacaaagatctataaaatgtctttaaatacaccaaggaacatttccgtaaatatgtaagtaggtgaataatttaaagatatttctggcacttagccaatttaagtttcaccataaacaaagaaaacttttcggtagcgcaacattaaatcacgagtcagtaaatgttggctattcaaaacgggaggcttttgctgaaatatttgctcaagtaaaggcaatgaacagcggagcatattctttaaggagtatcttcattactctatcccgtatttgcaccgccaacccttttttctggcccgttcgcaagtttagctgcattctggtaaaaaatttgcatatgccgcctgtcgacgtcgaggcaaaaacttcttagcatttctgctccttttgtttggttttcagttttcagttttccgcatttcagctttgttttgttttgctccacttgctcctccttgctgttgttttcccagtcgcaactgttggcatttccattttccatttcgatggggcatgggaaagctggaatggaaatacgagccagcaatttctttaattttctaaacgattttaaatttattgccacgtcttgcgaggctccttcaattatattcaagatcggctgcaggttggagtctctttctctctccctcgtttttttgtgtattttctgcgcttgttagttaaagctgcagaaattgcaataatgttaatttcttgcagccagccgccatgttgccatgttgctgcaacagcgtcagcggcagcagcagccgccgaaaagggtttaatttcatttcgagttttcaggctgcggccctccacctctcggggggctccccttaacccctaagtgtgtgcttatgcaggagcagacctcgttcgctgtggctctgttatctgcgaaactccattagaaaggcaaaggaagcaaatggcagctaacgaaggcgaacacaaaggagtctggtgaggggaaaactgccagcaggacggcagacggatcgaaaaatacaaaaaaaaaaaaaaagaaggagaaaaaaccatccacgaacgagcgacgtcgcttaacgactttaaagaaaaattaaaaacatcccaaaaggaatacatcttcgccctgccgcatacatcggcgatacatggccactttggaatgggaaactgagaactgagaactgggcaccgggaatcgggtatcgggtatcggggactccgatgttgcccctactgttctgttgcatgttgtccatccaacattcagcatcccatccgatggtccgtccttctgtccgctcaacattgttagtggctctcgaatttattttaacgaactagtttggtcacttcatacaacattttttgctcgcacggattccacagtgctggctgcatttgctccgggttataaaatatattcgccttatataaataaataaattggtaaatggcgtttcatttggagctccatcctacatcctccgacgttgctgatgcgatgataaatgcgacaaaaacctgtcgcagtcccctctgaccagcagcaaattgaatttatttgctcgcaaatgtcgcaagatggagttaaggccaaaacgggaacaacagaaaaggtaacaaaaaaagtaaaaggcgaaatgcagacaacagcagggaagaaatctaaagagaggttgccttttatggcttacagcggtttagtttggtttggtttgggcttgtctgattgccagcaatgtcgagtatttggcggatgctggcagctcgatgggaaaaactggaggatgtgggggaatcgaatcgaatgcgagatcattgtctgctccgccgactggggaattgtcaatcatcggacatcgaccatgcgggccccaatggtacaaatcttaggtcactcaggaaaccacgcacaaaaagaatgatatgatttgaaactaccaataccactaactaactaacagaaaaaaaattcgcagttcactagaagcaaaagtataaagtatatgtatattattaataaatatttcatttaaatggctacttagcacagtatgcacagtatgtattgctattcgtctccatctgactttatcaatctcttactcactcctcgagaattcaaaagcatctccgcataaagtgttttatataatgcacccaaaacatgagataaacgaaacggaaccacttttcattcttttctttccctttaccccttatttttgtttcgtttttttttttttggagctgcatgatgagcaacatcagcagcaaataaaaagcaacaaactcgcacccaaaatgcttaacgagcagagcaggcacttgcaaaatgctcaaaagcaaaagcgaacagctaagaattatttacttcaaattccaagtgcaacatagaattcgtgcagcggcagcaacatgcaatgcacggcagcaacatgttaccaaaaggagcagaatgcagtggtggggttgtgagaaggggtttccaaggggagtctttttttttgggagggggcagctacagcagcggcagctaaaacgccgataaaagcaacgatggcagttcagcttcgtttgctgctcaggcggccatgttgctgattgccattgccgttgctgttgcgggttgctgttgctgctgctgctgctgctgcagcggcaactcattgcaaatgcagcccaactgcgcgcctttctcaagactctgtttcggcgacgttcggccagcatcattacttccattcaagctgtttggcttggcgtgtacataaaaaaatgcaaaaaaaaaaaacaacgtatacggaaaagtaaaaaggccagcaaaaaagaacgctgcatgccggcgctgctgatgctgctgctgctgcgttgccccaacctcaagcattttggacaatgcgactgggcagcaggaattgttgccattgcatgttgctgctgctgctgctgcagctcccaaataaagcaaacgcattgcgaattcctcgtggctggctttttttcgccgctgccttttaatgatttaaaattccattttaagaattttatacttaatgatgtgttttgcgttgtatagcatcgttgtccaaggcagatgcccccgccatcgaccgtcccccacacccccttggtcctgcgcccctggcaaatggcgattgtcgtcgtcgtcgtcgactttgcttttgatctaaacgctgcgtgcttttcgtaaattgcttttcgttgtcgtcgtttgggtctcttgggctcttaccttttgtggaagccgcatgaaatgtgtgtgagtttcgtctgcttctctctttttttttttttgttttgtttgttggtccgaaaaaatcgtcggcagaattaaatgcaattgcaatttacaggcatgaaatcgcagcgaccaaaatatttgagtcgagatttatggtccatgcggcagttgtaaatcaaatttcgattttttggcaactgttgcgaaatttcccaaattctattgacgcatgcaaatttcacggcgcaccgcccgctggctttgtttttgtcattctataacagcaggtacggaaaattacccggccaagtgcgtgcggaaatatgaattttcataattttcgcacagtctgcggttggcaaaaaaaaaaaggtcgacttctggacggtcataaaacagctgcagcgaatttttcatatcgcccgaactgataaaaagccgtcagacaatggaaaaggcaaaaggttttcctccgacttcttttgagatgtttagaaagtgcgttacatgatttgccaggaaattggcacatgaccctgtgatttatggctggagaaattgattccggtgactgtaggtcacagttcagagtacccagtacagaatgcacctttcgctgcgacacttggaactccgattgtggagctctcgagttggggacataaaaattcaattatcacttaataacaagggaaaatgaaaattgcgtgcggtgctgcacagttgctgctgcagttgcacattgttattgccgccgtggggcagttgcaggtggccagcagcaacatttgcactttgcgttattaacagaaaggtcgttaaggtattttaacttactttacacctttacacgggcgtattttcattttaattatttcattttgtgcaattacacaaaagttgcgaatgaaaacttgcaataattatgtttaaaatcttctttgctgaaaaacggctttgcaactaattgaaacggtaaaacttgagattttcttatttaaatatgcatgtctactttttgtactcactgtttgcctaatactaatcaaactattttcttctcttttctaggtaagtgtcaaatatttaatacacccttaaaccaaaacaaaaacattgacaaagtgagtaaataagtataataataaaaagaacgcatcaaccagttaaagcagcggtgagtggagaaaaacaattttccggattagcagaagatgtgaaacaaaaattggaaaaattactcatgcgtgctgggcaaagcccaagagcagaaaaacttgcaaattccaacaacccctcgaagtccccgggccaactcaactcaacgcccccatttaaatttatttgcccaagtttactttcccatagcccgaaatcaaatccaatcaataagtatcttaaataaattcatagcacccacacacccctgccatccatatccatgcggcatcccttctggtttctcgtttcttggttttttttttttttttttttttttgccagccagccacttagctacctcattttttgcaatgctaaataaatttatttgctaatgtagtttctcagcttttttcctccggagaagtgcagcggagcagagagggcgggataaaaaaggagcaagagctcaagccaaacggaatgaaaaagaaacgttggtacttgttagttttatctgcatatcattgagataaatttggtgccgatcaactgtctgtctccgtcccttttccgctcctttccccgcccatctgtcctctctttccctcgaacggcgtctgtcggctgccgtgtggcacagcggcacagaaaaaagtccgcagaaaagccgctgatttgcatacgaaagtaatttgatgtcttgcgagcaaaacacactcgcacacacatacacacaccgcatccggaaaaacagaacggtgggtggcaaataaaccgtaggacacgtcatgagttacatttcctagtcatcgataagcgggaaaaatcggcggttggcagttgaaaaaggagaagcggttttccaaattaaaataaaccgatttggatatttattccggcacccctgcttgttactaaaatttttccaaattctaaaacgtaatagaattagaatttatacaaatgtcccaagtaaaatcttccatggaaatttattaaactcaaacgagaatacttttatgatgaataaatagaaatttaacacaatcttgtttaggtaacaagatcaaacagaccgacaaataaatcaggctaaattcaatttccacgcaatattccaattactcattggccgaactgaggccaaataagattaatgtgtgtgcgccggttgaatttatcccttgaccatattttcctcgtatcaacgggatagttttccggcgttccctaatttgatttctggagaattttcaattaaccgtttgtcagcttagccaacccccttgccgattcatacggattctccgttttgggggtgggaaccattttgcgaggccataatagtcgcggccattgcaaaatggccgccacaaagggaaaatttaaattgaaaatttccggaaatacaacccaccaccatcattccagtgctgagcggagctagtgctccacatagttttatagttgtttggtcagtggacagtagtcggtgcatatgtagattttcagctgacctgacaaaaggcaatgtcaacccatctggcccacgccccattttggcctactgaacccaccgcacaatttatggtcctgcaaaattcctgacacttaattgtctgcgtttaatgaatgaataaatgccggggccacattgtcacccactcggatgcccggccgaatcccccggatccctgctacatgcagagcatatttatcgctcggtccaggcggtgccattaactctcgattattattagttttgattcgatttttccacatttgattcgcagtttttaattgaattttaatgaatttaatgtgccgtgcgccgcatgcacttcgtatttatgctggccatttaaatacacataatgctcggtcggagttaatcaaagtgcgcttgattatttttgctaaattaaattttataatatttcgttgggaatttattttgtgcactagtttaattagtttacacagctctacaaattttcggaagctgcctaccccccctaaggaaaaaaggaaaaagaacgacgaggacgacaaacgttttattttcgttatctttttgccgcaggcagctgcaaatgccacgcaaattaaacaagctaccttttctctttttttatttggtccttggtcggtcctttttgttgttgccttgcctactgattttttaccttttgctgggtgacaaagtgggctctctcttttttacaacctgcttctttttcggtggttctgccggtggagcagggggcggagtaggaggcatccggttattaaacacccacttattacctctttttatttacatattcatgccgagcactccgcgctcccggccttaattggcagccttcttatttggccacgtaaatttgccggttccgcaactccttgcaacctgagctgctgcccctgactcttgctaatcgcatcataaatattcagtgtgcgtcggtttgctttttgattccagttttcacacccccgggcttttggggcgtttaacgtgttttatgtctggccaaacagaaattgttgcatactgcgcggcgcacgcatgtgaaaaagggtttttcgggctcgcacgatgctgtgtcgcgatattggtggtattggtggacccgggacataaataatttcactaaattacgccacatgaagctgcaaacggtggcaaggcattgctgcctgtaaataatttttcaagcccaaagtttgttgaacttccccgcggcggctgcgggtcccgctgctcggaaattaattgcttaattagttacggccaaacactttgaaatatggccgacatcggtcgactgttcacgactctcaactgctcataattgctctattaaatgggctcagtgttattttttttttcgttttattttttattcctcagatttttcgggggctggccagcctgcactaatggccttaaagcgaaagcccttttcccttcggcctgtgctgaattattcgatggctttgccattagccgggccatatattctatatggttccatagtccatggccgctgcaacaaaaacatgttttatgtcgcccctaatgaccccggagtctccagatccgagatccgagatgcgagttgctagttgcgagactggagacacttaatcgctttgaattgcaaaagcaaataatgtgcaaaaaagcataaggataaaggataaaccaaagcgtcgccagctggagagtgtgtgtgtgtgtgtgtgtgtgccaatgtcctggcggatccttgtggcgtctttgtcggctcaccgcccccgaaatgccaatcctcttattttgggctccaatccgaaagccaagcagcaatccactgcggcgaccactgcagaatgacgccattattttgacaaattttttggcaatcccgatgttgttgttggttggcttttagctgcgactgctgtcagcttttgttggtttttaaattgcatgcaataattcaattttatatttccgcaaaaaactttatcatttttattggcgagcgaagtttttcccctcatcgcatggattagcgtcgggggaggtcaagaatgcgttggcaaggattttgcatagctggcggggccaataaatttattaataaataaatatttgcacaggccataagagctgcaaaattatagcgggataagggacatcaaaatgcataagcttttagaaaatggataaaatagaaaagcttaagattataatataatattttgataaataagaaatgcattggatgagttatggtaaatttaaagattcaaatgacttgtggcataataatctgtatctgtatctgtatctatatctgtaaatgaaggttgacatttccgatttgaaagtaaaatgaatgttaaagttgagcaaacaacacaaatgcttatttcgaatttttctgctcacaaaaattgttttgccattcgagtttcgaacaaatgaaaacaatttcaactattcggagtttatggcaaactttgctcaatggagcaaaaatattccgagttgccggtggcgccacaaaactgtccccctttgttggggaagctgcctgtttggctttcagcttacggctttcggcttgtggcaggcagataacaaatatttgcaggaaaccccgagacccttaattagtgtaaagcagccccgccacctctgaaccacataaaatgcgagcaaggaagcaatttatcaaagttttgttgcttaattgtcgtttgtgcgggtgttttggtgtttggccagtgaaagtttagagggtgttgggctgaaaaggctggaaaatccgtcggtcggtcggtccgtccgtgggcgtgctctgttcatttggccccgcaatcaaggaccacggaccaaggacgagtgtaattatcctgataaatgcggtgcggatccccatcatcattatcgatttcactcgccctcccccttcccagccaggccgtgcagttctcgagatattttccacatcataaatatataagtacgcaaagtgcggcacaggcggttggctgagtaaacacacgggtccgggctgcgtcgcccatcacatttataacaatttaaaattgctcgaaaaaatggcaataaaatcccacagacaaacgaaattacgtgaccaatgtgttttattacgattttattgcgaaaatgccaagaagaagtcaggttcgtgcggggattcggcgaggagcaaccgcaaatatgagactgcgtctgggtggagcggcatcagattatttatctttcggctgaaatcggcacagaagcgtaaggaggcaaaaacaggagcagcacggaggatgaacgagctggagctcagttcggtagatgagggtggcacgtgagtggccgagggtggctcgcaaagtttcccgcgatttatggccattcttcacggcgctacgccgcatcaggttaatgcacaatttatgaggaaaaacacgattcgggcacacgaaaaaaaaaaactagagtttaattggatccgttgtggaaaaatgtgtttcagctgcctcagcaggtccatcatatccaaagtccatcccttcctgacttcggggtggacaatcgaaggggttgtgtaccctgtcgaaaccataaatggccaaatactaacgcccctggtctcgcattggtctattgaaaatgtattttgttgttgacaacattttattaagtaatttgcataaatttccatggccatatgctgcacaaacgcctgaaaggggtaattaatgttggacaataataaaaaaacgaaacaaaaagtgagataactgaacctggagaatgcaatcacaatgataagtaatgctatttgtaagtctcaggagacaaagtcacaaaagtgactccaaatccaaaccttgaactatcaaccagcaattacaggtccaagcttagactcaccaatcttgatgtcttgatctaatggctttcaatatttttgattggtacgctccaatttcggactttcggaccatccatccatccaccatgatagcccctgtactttcgtagcccttcacagcaatccatcttggataatagttagtgctgccatactgtccgtacccccagttgcccagtcgcatattgattaaaggtaggggaaataaattgcggctctggcgagcgggcggcggttatgtataaaatgtaattttcaacaaattatagcaatttttatgcttatagaaaagcgcactcagctcgcaatttgctgcactcgctaaccctaaagggtaaagagcgattacttttattattccaacggagcatggacgtcgctgcacttttcagccggaggggctcggttcggttcggataggcagggagcacggacagaggtcaattcctttaaaatcgcaccatgattgatgggtgtctgtctaggcaaaatatatacatatctatatatatgtagatgtttcgtaaattgcgcacagatattattataatgcaaactgtatgattacgagcgtggaatgtcctcccgctcactctttctgctgctctttctggctcgacggcatccgaacatttctggtttttctcctttttctggtctgctcgtaaatcggccgaaactgtccacagttcttaactcatttggcctggccaggcgatgaaagagccagggcataacgcgcgacgtttattggctacgtctggccatttatttcactcctatgatcgctggcggaagccattaaagccgccaccgagccggcttggcttcttattttacctgccctgtggaaaccggttagtggcactcggtgccctggcaaccatttagccatttcgctggcaattcatcaactgcatcttttggcgacccattagagcgtcgccctccatccaatccacgtggtcttcttagccggcaggttaatcatatgcgcgccaagtgccaaaagccgatctcagccggtttggccagttgtttgcagtctgtgtgtggtctcggccatgtctatgaggcatctggaatcccctcccataaagccgaaccgccgaagatcggacctaagcacagtcattagtttaattgcactgtttatggaggagcaatgtcgagcaggttgggttcctcggtcgcttattaccatttcgcatgttgcgcgtccattgcgatcatgttgtttggggtatgttgtattaaattaaattaaatttaacatcagttaatagaaaatgtatacgaatcggtggtgggcaaggccgggaataagtgctgctttaacttaaatagtaggatgcactgaatgggaaaattgaagaaagttctgcagcattaagaggttgcaatgcattaatatggaatgcagttgggaaaatatgtatcatggattattatttttaatgcaatcataaaataacatgggaaaccccatgccttatgataaaaattattataaaataaagaaaattgattcaatttcagctaactaatccgcaatagagccgcttagcatttatgtaatctccggtgaaaatcgaaagaaatccaacaaattgcacttaatgttaacaatcaatttggccatcttatcgcgacaaaatcgacaagtgcagctgcgacgaatgcggcagcaaaacatttagaagcaaataatttccaaacgtacttaaaatcaatttacttaataaccgggcaatttgaagggttggccagggggcaggggggcaagggtacgaccactgcaactacaactgaaacgcatgtgtaagggggggcaactaaacatgttgcatgcaccgcacaaacttctgctgcgtccgccggctgctcaattcattttggcatgcgaataataatttccagccaaagcagaacaatggccgcaaagcgttgcacttgtaaaaaaaaggagagcaacaacaacgacaacagcaggaacaaccacattgtgccggccaagttaataatagttgttccaacacataccaaaaagcgagcctcctagccggcgggtaatcgttttactcacccggcaaactggcaacgagcaatttgaaagcgcacaacggcaacagcaacacggcgaaagagcggctacaaccggccaaaacaaatcaacagcaacagcaacctgctgaccagtcccagtcgccctcttttcccaaatgcactggggaaaataacaagatgcaagtcctgcatttcaggagggagccactttcatactattgcaactcagacctaagagaagtgatattagggaataaacattagactatctcaatccttaaaataaaacaattggcattcaaaaataaatgcaacgatatgaagtgcttaccattttcttttagcgtgaacaatttataatgatttctcgccgtgtgtccgtcagcattgcgatggtcatcgggtttcgttccttttttcacgcgcccaggagcgtgtccctgtgccgcctgtccatgtccacgttcacgtccacgtccacgtccattgccatggtccgtgctcgcatgcgaaggaagcgggaatatgcaatgtcggggtaaattgtccgaggtaccgccaatcccaatccctatccccgcaccgaatatacccggccaagtccaatcaactttggctgcctctcggcgtgcataattcgccgtagctggtgcttgttgcttaaattgcaaatttataataaatagaagtctacctcctcctcaccgctcctgcctggctgcgttcaatcatctgggctttggattagccatttgggtgggtgaataacaagcatttcatttcagttaaagactttacaatcggaattcgttctgctttttaagcactcaatctggttatttatttaatcgccaggcgcataaaaggtgggtttttcgtttagaagttttgtaattaaatgctcgcctacctctaaatcaaaagtaccgataaaattccattaagtatcgctgccaaaaatggtattaagatctttgcaaaactaaagatttattcagaattgcctttcattgaaggatttgcaaattatgttgttgcttgcacgtatagtattttccagcaggtatcttttgacatctgacagattatcagcatggaccataaattcaattcagactgtttgccatttattatcacataagctcgatctgaaaagaacattacatttaaaatcgaataaattgctgtgcttttctcagtcatctctaccattgaaataatggcttttgcccgcagcctcgaacgctcaactaattaaaactaaactcaaatggccgcctgtgcgtgcgaattatttttgccaacttatttgtcaaatccacttggccatggtcaagtttttgctgctgccagatagtggtatctacacacaagtgtgtgtttgtgttctccagttagtttttctgccgaagcatccggcattttggggcacggtttgttttgtgaccattatattgcatatattttgtataatacgagcgagggcaagaacaacaacagcaacagcagcataaatgccaaaaaatatatacgtttatatgttatatgttgtgtgtatgtgctgctagctgactgcagaaatttgtgtgtgcagagataaaagtgccagggcaacttgtcataataaattgtgcagctagagctggcttttgccttttttatttatgcgcttttcataaaacacaatagcttttgtttaataacgctgcgatttattttttttaaataacgccgggtgcaacaacatcaacatcaacatcgacaaccaaccaaccttaatgaagcccgaacagacaatttcatgggcttcgattttcgagtatattttttgcgagcgatttttgcaattaataatttgcataaatttatgtgcgctttaataatctgttaactacgaaaacaaagccgatgcgctcgcatgcaaccagggaaaatgtggaaagtcggagcaaaaagtttatcaatgactgcacaggcccacaaacaaccatcgtccacgatgcaaataaactgcaacactgtttagagactgcactgcagtgcacccctctaacccgcctgaaaacaatgtgcagcattcaaatgattaaaacagctccgaaatgctgcagccacagcccagtttagctcggtttggttctggccaggccgaaaccatacacaatccagtatccagtatccagaatacgccatacaccaaccagcggccacaacaactgactccctgcatgcatgtgagtgtgtgcgccacgttaatctttgaaaatccgagtgctgtatgcggtattatgcgaaaatttatctgatttaacacctaatatacaataacttaatatgcagtgtgctccggcacttgcacgagcggcggcccaggccaggcctgcagtcatccaccaaagccaaagccggcatccagactactactcctactccgatttcgactccgacccgactctgactcctctggccaagcgccatcccatctgccaggctttgatctcgaccaggcactgtgggatactcatccgattgggaagccatcaatttacagcatcagaggctacaatagataagttactatctgtttttttaaacaaactgtctataataacgcatttgtgggacatactatccagtgtcttcttagtattttattatttttttatgagccaaatgaaaaacaaatttgacctatttaatgatactatatctaaaattgttatttacgccattaaaaattgtatcttgtctaattattataattatattattatataattattgattgctaaaattctccgaaatagaaggattttgttattatttgtcagtctttctacttgaagattggttaaggacattttcaacagttttaccatctaatcggtggtatttttatatagttaattatttgacccccaaaaccgtttcacatccactgtaccaaaaccttaacagcaacaaaaactgcaaactgcaatgctcagcgcccattttgcgcccaaaaaagcaccaacaattgcggctggacttactctttccccctaaacgcacacacacacacatgtaggctggcctagcgaacacatatgcacattgcagtgtccgtggtggaccctgtccatgcccctgcccctgcccctgcccctgcccttgccactgccccaaaccccgccgcccctggcaccctgcagccgtgtgcgtttcgaatgctgggtctctggtatgcggcgtttggaaaatgtgaatatgaactgcataaatcttccagggcggcactctttgccactgcgcctaaaccccatcgtggcccagcccctcggaaaactctccaggcaaaggctttacggcttttcggcttcgtactcggcgttgactcgctcaaaatgcaaacggacaaaaaaatatcaggcggcccgctggcgctgaagcgagtcgttgctagtcctagtccttgtggtacactcaaagaaattgggctggcaatgagccggatttagggaacgttttcccaattttgtaatattatttatacatattacatatattgaagtatcattcactttcaaaatatttcttgaaagttctttcaacattttttcgcagtgcacagcacacatattcctgggacggccgactaagatatatggctataggtagttggagcgcaaatgcgaatagaatgtggcggcatcaaagttcagcacacttactcacccggcgatgatggccgggaatgggggattttgggggtgctgaaggactttagtttgctgcagttttatgcgccgatttaggaggcgagcgggcgggcagggaagcggactggacggcggggtctggctgggtcataactttcgtattattatgcattcatatcgccattttaatcacactcacacacgcatcggaggatgggaaagctgtgagcgatatgggattacggggattgcctttcgattgaccagtggagccacaagacttacaagctgtgaatggagaaggccaaaagtccttgttaagctaaaaaaaaaaacaacaacatatataacatttttagcacctgtaaaaaaatacaatgaattattttgattttaattaactaccgccgtttgaaccgcattttcccgcaaagtcaatttttcccggttataaataaagccaatcagttttccacgccatttcctccaacggcatatgtcgcagtgtgttgcaaaatctatacaatttgtagctaaacaaattccaactgtgtacattgtggaagtaacactttgaggccccccaatgatttattgcccaattttactgccatgttttcttaatttcgcattcgacattttcccttgcacctccgttcggtggcggccatgcgcacagcaccaccccatccaaaacaaccccgcccactgaaccggcgagcaccacccttcgagggggcggaagggaaaagcgtgtaccgttagatggtggattgtaactcaacgaaataaaataaaacacgcaccaaagcacattcatccctcgagaaatatcgcttatttggtcggtaataattcttggcctgtgtgccaggcccgaaaaacccacccactggcgcgccgcctttcgagtaaaacaaaaggcagcatcttttggctgctgctctcttcttcctcttcctcttgccacgtgcgtgagaaggggggcgcgagaggcgtggcaggacgccctgaaggaaaggagaaagttttgtgccagcaacttgagcaagacgcatggcccagggaaattctggtaggaaactctggccgaaaaaggtgaagtcgtagccgtaggaaaaacgggcgttgggcaaggggatgggaaagtctttggcgggcgggcggcgaaaggagcagaaagagagcaaatttttctctcgtagacactttttacgaaatatttcatcgaaatgtgtccctggtgtaacatttaatattaaaggtgggcggatgcggtggccagacgggcggaataactcggagaggcggactccttataaattagccttattctccaagacattttgttgcgaataaagcaggcaggagaaagtttacaaaatgaaccaccggaccgggggacaagtgcaggataaagtggcaaaaggaaaattcctgggaaagaataaaaccaatggcatgaatagaaaataaaagaaaagtaaatgaagcggaccagcagacgcggcagagaccgctacttaaaacttaaaccaataaatcacaagttaattacactcgcgtattaactcaaggcactgcaaccgcattgccaccacccacaaaggcgcccacaccaccgccacccccgcgccatcaagtgcggaaatctccctccgctgagagctacaaattccataattatattttatgcgatttatttgttcctcgttgtcatgtctgtttgccgaaagataatgccaagctgccactggcttcttctctcttcgtttatcggccaccgagttttcccctactccaattcaattggcgtcatgtgctggaccattttaattgcccaacttttcttgggggagcgggaactgccaatgcgggctctggagaaaccagtgaatctctcgaacccaaattccgaacccgaacctgaacccgaaccctcctctccacgattaatgctcagcaaataatattgcgcccctcgcaacggcaaacaaatcatattaattgtgattattaattatgattgttcattttattggctacccatctgcaactgagtagggtgctcatgccaatcttcttaaataactttaatccggagtttttataagatctattcaagagctgtattcattcattatagctgtatataaatatgaattattgtgtacagtttttcaaactgtcatatgaatactaatttcactcgttttaaaaagtgacaaggataacagaggactataaaatattcaccagcaaatccagcttaattttctctgcttgttaaatgaatacggaaataatttccaccccaacttcagggcaatcacccccccaattataaaagtatatatttaatttgatggtctatttaccatattcatgatgtcacttctatggcatcactctcataacttgaaaacttttcgtaagttttttttttttttttttttgaaaagtttcgcttttgcccaatgcctctgggcgagcattggcagctgctcacgacgaattggggcggaattttcactttgtaagctaaagttttcattgccctccacccaagattgcgtgtggcaatgtttctttttcttctgtcttctccgtttcgattcgattcgattcgccgctctgaaatgtttactgtttttatttaccttggtgggctttttgcaaactcatttgcatttttccagcccacaccatccatctaaggccttagccatttattcattaattccaagtcctgcgacataaattagttaacttggactcgcagttcgcaattggcgggtgtttcgcccaagaattttaatgtggattcccgcggggaactgacattttatttgcctattttttggtaggaagaggggtagcataagctgcggtttctttcgccagttgtgccgaagtgcatgttttcctggggaaaagcaaaaggaaaagcactggcagaggaaagcgtacaacaattgaaacgccaacgagggcgtcggtgccaagtcaagtagaaaaatactcgtacaatgtaataatacaacaaaaaacagacagcaaaaacactgaaaagcaaaccaaacccatctgaaaaagaaagtgggaaaagtggaaatttaaatgctcttaaattaaattaatttctccaataattccattgtaaaatgttatggaatgttatgatggaaaatatgtgaaatacacagcttctaaatagtttttagttatatatacttttggtttgctgttaagatatgattctgactacaaacatcgaatcaatcgcaatacaccctttgtaagggtataaagaggcaacattgtaaaatgaaacaacgggcgtgagcatggaaaagcgaacggcatgggttggttgggcaaagttttcctttgccacgtttttttccgctctccgttttgtttgggcctgcaacaatcttgaacattttggcgctgtcttttgccggcccaactgcagaattgtattgggattgggtatgggtagctggagctggagctggaaactggggactggaactgagactggggactgagcagtgggaatggagaatgtgggccgcaggcggaaacacccaatacaagtcacagctggatttatgtcatgcctttaattggctgctgtgccgatgtcgaactctcgagcgcggagtaccggcccagtctttatcctcattcccattctcggttttgcagtatcagtgcgagtaccagtcctggtctggtctggtctggtcctgctcttccgaaagcaacaattctgccttcatccattagctggaaaatcgagttttttctttcacgtctctttttcgacttcctcgagcttgggctaaaaaacacaagtggcaatatttctgctcgattctcggtctcggcgatccggcgggattccggggcagtaattaaaacgaaatttttctacccgccgccatcttcgggattttgcgatggcaattaaaaacgaattttgcgcggcttcattaggcgatttcgaatggcggctggtaaattttgaaggcggtggctgcctgccagcttaaatattcatatgatccaggctttcggctctaaggcggaatgagatacgatgtgcggatgtgcagatgcagatacggatggagtagcagatatacatttagatacagatacagatactgacactgatagtgagtccccatcaagtgccagctgttgcgggggccattgggcgcattcaaattaaattcaataaatttttcacccatattttttatccgcattttttgtcgcctcgcacttgcagaagtcaaacgaccatcgaacgaaatatcaacacttggcctggtcccccggtcctggtccatctggaggagattggatgggggctttgggggcgtggcaaagggttagggcagctcttgaggcccagaagccgtctgcgccccacttgcaatttatgcgcttcggcgacaacatatggtcacgtaaattcatgcgacaatatacgatatgatgtcacacacacatgactcggtgctttattttttatgcaaaacgttgttgggattttttctctgttttggttttgctctgcttatttttaatatgtgagaagagacttgaaacgccgcccgggaaaatgtcgcagtttggatggcggataaatccaggcgagcaggcgcattgaagtgggctggggggtctgatttacgacagacagccggccgccattcgcttaagttaataagcgtgcctggcggaaggagctccattcattctgaaaggaaagcttatcaggccgttattatcggcgataaaatggacggatagtcgggaaaaaatgtaatttttcaaataccaatttaatacaaatatgtgccttgaagaaacaacataaacaatcaggcaccttggactattattcacaaacatatgccaattttgtggggagtgcatttttcacctcgactgctttaaataaactgcaagaaatgtcacaatattttccccaaattcggaccctcagcacacctctcattcctaagcaggctattggcaaaaaagttatggtccgccctgcagcgtttggcagagtgtgaaattggcaaagggcaaaatgaaaaacttttgtccagactgggggatgggtgggtaaagtttgcagttgtggccagccagtcagccatccagcagcctgccaagttcataatttcccaagaagatttcacaaaatattagttaaacaaaacataaaccaaaaccctgcagacgtttgtgcatacaaacgtgggctaaatcacctaaaagcatgcaacataattcacccgacgccagctccttggagcccaacactctcacacacacacacacacactcacgcaatagggaaggaatcccaagaagcgacgaagctcaacgtttccgtttcctcaaacagcactccaaacatcctcccacacaacgcccacttttaatggccctgagttcagttttcggcagtttggggatcgtcttttgcatgtgcaagctacgagaatcgggtgggcagtggggtaaaggacagggacaaggactttcctccgaggagcacgcatgcgaggacgacagaatgggtggctgggacggaaacaacaagccgggttgacattagcgggcacggcgcacaacgaaacccaattagaacggagatatacgacaccagagcgaggcgacgaaacaacacggaaaatggagaccctcgatgccagcggaaccatcttccatgtccaggggcgtagtcggccgttcagagaacgtgatgtgcatcattataaattgtattcattatattcactctatattaaaagaatacttacatactcctattccttatctttaatcaatattaaagcttaaaaaaggaaaactatgagcagagtgtccaatttcaaattttgtatgaatactttgcattctataatgatttcctaagcccccctaaaactatttcgccgcacgtccatggccatcttgggagctcctttctgaacctgcgccctttcaacaatgaagcgtgtaattacaagcgtaaacgctgtgtgggtggtggaccaaaaatcacacgacaggagacattttttgaaaagggttgcgctgacttatggcggtggtggtgaaagtggaagaggaagtgctggctctccggtttctccggtggggcaaggtggcgcatacacacggatgcgtcgcagcgcataattactttacaagttcattataaaccatcataaatctatgaaggagcatagagccaggcgacgactcacaatggaaatgaaaattttcaaccttagcactttctttctttgcgccttcccattttcacttgaaccccaccccctcttttccatcttcccgctcccggttgggccgtaaattctttgtctgagggatgggcaaaacaatggcgagtaattcacttgcgaaaatgttattgattacgaaacgggacggcaacaactgcggcacccggcatcgaccaactgcatccccagtgcgaggtacaatgggatgaattgataagtggggagaaaaaaattgtaaggaagttttataccaccctagaattttgggacaatatcttatatgaaactggttttcaattcaaccaacacaactttaaaatcttcaaatgttaggatttttcttacggtcaactgtattactatatttacttaacccactgtcttcacttcactggccctctgcacctttggatgtttttgtcgattttgcgcaaaagcaatttgagcataaatcttcccaacgacaaactcgcagcctcacacacacacccccactaacacacacacacacacacatacaacagagtgcaactctcgcaatggacgcggcaggaatcgaaatcggaatcggaataggaataggtgcagggtaaggatccaggactccgggatatggaatgttggatgttggtgggcaactgcaactttgaaattaactgttagtttcacacgttctagcagcgaggacttgaaaaacaacaaacagtacggggggcaaaaagaaagaaattgttgctcttaactttcacttttttctgtcagacggtggaaaagaaagaaaaagcaggcggggagcagctggtgtgaccccaaaagaccgaacccaaaacccgaattcgacaccacgccgaatggcaccaccatgttcatctccgtctctcttcccccaatccagccatctcacttgcacagtttttggaccataagtttgtcgtttagttgagggggggcaaataaaaataaaaacttcaagtgccaattatgtgtgaaattccgacacttttcgcttgtttacttttatgcgcccttaatgaagtttcttctgccccacctgacctttctcccctttcatagacacatatgtgtaagttagtgtgcgtgagtgggtgaaggggcgtgattttgggcgtgtaatgcgaaacggaaaggtgttgggcgaaaccggaatctgcgataattaattaggcaaaggtacgctggcgaaatttgactagacgaagacgaaccttgtgacatccttaatgaacacactcttacctgtgatttttgtgctggtaactttaaatgtaagttacaccattcaaatccttattttacagaaagctagcagtaattcaatgttttttaatttatgtaagcagttgtatacagagcacaaccaacaagacatatataatggggcataaaataaacccctaactgattacgaaaaaatgcaattaaaaacgcattcgagtcgatttctcaaccgatatcgaagaagaaagaggccgccccaaagcagaatcgcaaacgagagggcgtgtcggatcagaatggcgcactctcgcgcaattaaaagatactcagatacataaatggcgctgccgccgtcgtccgatttgtatcttgaagaaccttccgcctgccccaccacccaaaaaaaaaaaaaaaacgaagcataaacaatccgagtcttatcggggttggcagccattttccctatttgggagtcattatttagatttgacacttggcgctgatttttattggcccgtttttcgggtgagtagcggaaatgttgcacatttccgttccacaagcagcgccataactcccatcgataattatcggggactcgaggtgacgtcagatgagtggctctatgcgaattttgtgagttgtgcgtttttagtttccgtctaatgagctctgaaatcgggaatatattgcccggcagaacgatgttcgccgcagatatgaaacagcttgacatcgtgccacttatttatttattccgacgtccaagactgttgtttgtcggctgtcttgggattttgccggactgaaactgaatcgaaatcccccattgaacagcttcatcttcgtggtcacgctttgctcgcatcttccacaaatgcctgtgcttgtgcttcgcatttgaactgttaaactttggtctgagtatccgtatctctattcctcaatccccatcgatgcgttccgccagctgtcgctgctttgtatctgtatctgcgactgtatctgtggctgtatccgtatctgtctgtctatgaagatgaaactggaaatggaaatagaacttgaaacggagccaaaatagagtcgttgattattttaatgatgacgccgaggttaaagcacgatgggaaggcgttccgcactcacacacttggctggggtatatatgtacgtacgtacatatatgtatatctagcggaccctagatggtttgggtctatgtgaatatggaaatggcgtgtcgcgttcacatatatttttcctcttttttggagggacaacgggctacaggggtgccgcggcgttcacatcgctcattaattgagctattaagataaacccacatcaaattccgcgttcagcttcgacgcgccatgggtttttgagctccagacggctgagcttggggcactgggtcactcagccatcttttggtttgattcggtgtgccaatgatgatggcattattatacaactaacacattgaatatagacaataaacagttgaatttattcattcatacacaaattggcttttaattggcatgacatgccggcccacaagtaacgcctagcgcaaacgtgaaagggaaagccctaattagggagaattggaaaatttcagactcttctaaatacacagtagtttagtagatggattgaatggatagagaaaactaagccaaattcgttatttataacaccagcattcgtcactattcgaagctccctctttgtcctgcgttttccccctgaaagtaagactgttactgctaaattgcaagctcaacagggccagtcgtaactcaaaacctggaagatgccacataaccggcgttcggggatcggaatatggattgctggtcagtggccctgagtcgagtcgacctgctacctgttgcaccggcagctaccgcgagcaacttgcaatgaattattttaatgacgagagagatgcccctttcgtttgatcctgggcatgcgtaaaaagatacgccgccatgcccagatcccgtgcgagtggaaccagtttcccaggccgttccacttctcagatcatcaggcggccattgagagttgcgcttgcaagccaaaattactgagataaagggagacacatgaagcaaaaattgaaaaaggtaaaataaaaccaaaaaggtgcgtgaggcataagcccttgctttaagcggattttatcggcggttcgccaaaaatttcaccaaaaggtgccctttcttttcggccgcaattacgccatggcatcgcaattttgtaggctgtacgcgccacaaattccgcgatccgtatcgaagcgatcccaacggcacttggcacatcatttttcggcaagagcccagggaaaatctcaattaccagcaactaggactttcagatgcagattcagttttggttcaagcctgtccttacccaccgtaaagcaattaaaaactctgattgccttgtgagtttggatttggctttttggggaaaaattgaaaattcagttcctggctgcgacagccataagatactgggccaagttgggggtgcacacaccctaaacgtgtatctcaaaatttgataaccgcaccgcaccggcagctgcagttgcaagtatctgcaacctgcaacttgctgcttgcaacttggattgcgttcgtgtttgtgctggcaattgcaactcaattgcgcatttgccaccgcaagcatcaatatgtggcataggcgtagtcattcgatgggggccataatcacgtctgaacaccgagcgtttcaaggcagccacgcccccattcccagccccgtccccagagcctcgtactccctgcggccaatttaattgacagatttagtggtcctcgattggcagtgcggaaaattagttttccgtctcgcagtcaacctcagccggagctgagacgcatttaattgttttatagacactcgaattcgaatccggggagaatctatgtactgaacccccctacccacctatccacctatatatctccctatatatctagcagctgtcggtgggtgtgtgagttgtgtgtgtgggttcgtacatcatataagcaaggtggaacacgcccctgacaaacacgcacgaaaatagatttaattaaattgcgaataaaatgcgtgccatagaacggaacggagtggatggggcgggcgacacatgtgtgccaagccatccaattaatcgatggccaaccgatggctcttctcgccttttggccatttttccctccaaaaagggttccttccgcgtgtccttacggcttgttgctgggaaaaaatagaggcaattaatttccggttgggcctgagacgttataaatggcagcagcgagtcccatttcttcagcaattctccgtaatctaagtattgtatcgatgagataccaggaatgtccccatccgagttccagcttatcagacccgaggacagctccccaatttctggtaaaatctcaactcagatagcacgtgacgatgacaaaaacaaagcataaattagaaagagtaagagtaagataaggctgaaaaaccaaatcgaattaagtataagtagtgaatgtagtagtgtggcgtgtatccgcatctgtgtatataaatagttataatagaagcatagatcacacgatgtgccgcatgcaacatggagtcgccgtcacctggagatttatggccgctggcaacgctcctactccgggggtgagtcacttccccttgggcggaaagagacggatatatgcggcgaaaacgggacgggcatagatatcgctccgtttcgtttcggttcaaagttcgctgcaaatgggaaacacgtaaactgtcaaaactttaaatccctgaggaatttaagttaaaaaatataacacgtactggggacccaggcgcagctgtgctgccccaaaaaagcaaaaataagaaaaaacacacgaagacgtagtcgacaaaaccttgaaaatgtatcttcggggcgaccaaggaaaagccatggaaaggccccatggaaaaccgactggaaccgaataaatattctgaaaaaagatttcctagactcacaccccgactccccgaccccactccactccacttcacccaccgctctcgtttaaattatctacaagaaatttcgcgccttgccataccaagttttattgtgccaccccctcgcccgcacataccagcatttaaattatgtacttagaaatacacaaaaattttccaaaagtctacaaaagaaaatggcacagcacagcaggacgcagatgaagaagaagaagcaaagaagcgagccagcaaaatgaatttcgcactttttcgcataataaatttggaaacttggccagtactggaaaaaaaaattctaaaacgggtgaggaaaactcggaggggtggtcgggaaaaaaaatcgcggcaaagcaaagtttcgtaaaaagtttatttttgcatatatgtacgtacgcgtacgtagctcctttttttttttgtggggcggtaagttgcgataaaatagtcggtcgccgagtgacaaattccatttagaattgccgagcaaagctcacgtactcctcaagcaaaatctcctacttcgccggcaactcctaaataaaatgaaacttttgctaagcctcagcgtgatgtattttccaggccacgaagctggcacgactgccggggatttaagttaatcagcaaacaggtttagagccaaataaatttatttacgagtatacagccttttgcgctgcttatttggccgcgaagggcgcggaaattacttgggaattcttcgacgagtcagcttctttgtttaattgaaattccaacagcactttaaacaaataatctgcgaggatttaccaaaataggatcctgtatttttgctaccatttcgttaagactttctgagagatatggccgacaaattgccataaactgacgcatcgcaaatcttgtgacctgtcactggccaattttctggcacattaaatgggtctttataattctcgcaaggcagtttaaaaataaagccacattaaggaaatttatcagcatgcatgagcgagtccatatagatgataatttctttgttgcatcctggccattttatttccatatcatttttattgtctataaaattttttcgccatttatttccaccacccacacaattgcaatcgctacgtacgctgcacatgtgtgtgcttgtgtgagtgaaagataaatgcgttttcactttatgactttcgtgtcggcataaatttgttaatacctttaggccaaatttataacataataaatgctcataatatttaacttaacattgtgctcgggcccaggagaaagacctggtctccaaaatgccaagttaacatggtcgaatgggtgggttggttggttgatatggtgtggtatgatttggtatgggttgatttcgataatatcagacattgtctgggcctcttcttcgatgggagatgggccagagacagctgcagtgcatttgcacacacacgaaattgagttattgcacttgaaggcaaattaaacttcataaatatttaaaatcagagattaaacacggcattgttgcaacatgttgatgcgacttctggctgccccggctcccctggcttcccccggattcccctggattcccctgctcctcctgccccatctcgtctctcaggttgccaattaaacgggcattatctggcataactgcaatttaagtagccacattcgccatatccccagtgcaatgccacaaccgagtgctcgcacgtttctccttttcattttaatgtggctgcatctgcggatctgtgtatctttgtatctgaggaactgtggaactgcgaatctggatgcaatgacagcacggcagcaacattggcggtgcagcggcaaacgatcaatttaaagtaacgatcgcgccgcagaaacaaaaaccgcaactgcaaactggcaaactggcaaatactcggcgatactcgtaaagatgaaatgtattttttgcgctgagatcccctttcctttcgatttgggcccctttgcaggcaattgcggcctacgttcgagctgcttgatgatcgctggcaaaaaggagaatttatatttacgacttggccaaataacaacggcgaacagcaaacaaatgttgagttgctcgttgcaatttttcaatttaatttgcccgatgaaaggccaaaatataaatacccgaaaacactctgtcactgctgctcaatatgactcaaattttgatgtcctcatgttctcctaaacgttaatataaccaattaaatcacttttgtggcgatttatataaataattaggccaataaatcgataaagatatatatctacttagtcactttgtcaatgttttcctaacacatatctgcattttgtagctgctgttatgagacacatatttttgattgcaaaatgaaatgtatgtatttcgtcgatgcaggtccaaaatgaataatattaaaagtttaataatctggttacttacaaatgctttcccattccgatctacaggtacaaatggtctgcgaagacgcggccgacagacatacacccgctaccagacgctcgagctggagaaggagttccacacgaatcattatctgacccgcagacggagaatcgagatggcgcacgcgctatgcctgacggagcggcagatcaagatctggttccagaaccggcgaatgaagctgaagaaggagatccaggcgatcaaggagctgaacgaacaggagaagcaggcgcaggcccagaaggcggcggcggcagcggctgcggcggcggcggtccaaggtggacacttagatcagtagatccttagatccttagatccttagatccgtagggtgtatgtgggattgggcgaaatgacgcggagacagatacaaagcaactatattgtaacaaatgaactatttacttaaatgaataatatttaaatattttgatggtacttgtgcgaatacgaaacttaacctaaatcgaacctaatggaattatttcaagcgtttgagcagcaaccgaaaatacgtaaatgaaacaaaactacaaactaattaactaggctaagtaaataaaagtagtggaaggagcgcagattataaacctacttagaattaaatgagcaaaacaaacaattttaatttagttccaaacgaaaaaaaaattcaagaggattcgctcgaaatggaaacctctgtcctgcccctttgttgcttactgctatgtttaaattaatttcgcgaaaaatactcaaaaattgaaacacaaagaaaacaaaaaatgaaagtataccattataatgttgaatgcgagcaaaattctgttgatatgaatttttggtaaaaacatgttctaaaccaatttaagatacgtaacgaaggatgcaaaaacaaaatgaaaactattaaactttaacttaaatataaatagaatttgttagccaagtaaacatattacgacacgaagaacaaacgttttcgggagtatcgaatatttgaatgtgtatagtttgtgcttattaaataaaataatgcaattttagttaactctgtttatttgtaaacgaatttgtttagttctcgcccaaacgactagagtgaagctgtttctttaagtaatgtgtagtgtgtttactttttaaattaaattaatgcctaattttattattattatgtttagtttaatgacaagcgtttatgagattatccgacagaagcggcgagaagaggagtgcgacaaaccgtttgccccggcaaacgcaaataaattattggttttgaaaaaatctaaagaaaacaaaaaaaaaaaacaatgagaaatcgaatccgattgttgtgttattattttagttctgccattgcgattttccgttctcccagtgtaattagagcctgagttgtttgagagagtcttcgcgggctacccgcttgcatgcgaaattgcttttgatctcgttttgagccgttaattgatcgtgagttgtacgctctatagagatacccataccgattagctataacgataccataccgataccaataccatatatatagtttagtggatccaacgagctgtgctcgactcaagccacaaggcgctccgtgtgtgtgtcccgataattgatccttcagttgagtttccatggtggtcccagttggggccgttcgtaacgaggtcctgcagaagatgtatacgtactaccgcctaagattcgattatagatatattatatttataaatcttgatatatatttatgtacttatgtatgtggggatcgagtcgaaatggacaaacaataagagagtaattctgcggaacggaacgaaggcagatgcaaatacgtaaataagaataagttaaatgttatagattttaaacgcatatgcgtggatcgaatgggatgtccccgccaccgcaaaccaagaatagacgctaaaatacaatacataaatatttaaacgtggattatcgtagcaacagatatacgtaaaaggaagacgattcggtgaggtcttgcatacagtactgcatccgaccacttacctactacttacttaccagtgcattcgtagtaaatagttaaataatcgctacttacttgtacatttgctagtggcttttactttaaactctctgaccctcggccgagcaggcctatccataagagactactacttttcctatatacctacttcatccgatcagatcagacctacagatactttgcggttacattttctacttgtaatttcccctccccgcgatcgaagattggacccgcaggctccgttcatacttaatcgatgtaactctaatttaatgccattctatgttagctccgtaagttgtaaattatcaatataaactacacgtaaaaagaacaaacacaaaacaaacagcaaccagtgagaatgtggaaaatgaaacaaataaattaaacaaaacgatttaaataatttaaaagatgcctttggattattaatgtgaaatagttggtttcggaattgtaggtaattcgaaaggatagttttgcggtactcttaaaatagcagtccttcgttctacatttttaatagcaatattctccatttggcgccatactttcttggcttaggaagtatcttgttccaagaaagccaataaaacgttaagtttttcttgccgtgctatccaggaataaaattttcagtggaaattcaaaccatacaaatgtaaaggtatattttacacacgtgtaatgtagacttcgtagtttctacatcttacgctatgcgtagaacggatggaaatgaatatcgatctgaaaaagattacggggaagccaatccttatttcgaagatctggcagcactagcgtcaaaaaatttaatttccaaaaaaattgagaatttaaaaaaaacgtaaaatttttttttggtgtttataagattgtcatttttatttaagcgtttttattaattgaataaatttttacgactgactttttatgtaaaaaatgatatcggtacatttcgaaaactacttctttaaaaataaaagaaattgatttttcaattaatttccttaaattctttcaaaagaatttagctaaacgcccacttttagcgcggactcaaaccattgagagaaaagtctccaaaatgaatttggtaaaagtttaatacacgagagaatgctatagtcgacttccccgacaatcagatacccaatactcaactagtggaagtgcgaacacgaaatttcatattttatttttctgcgatatcgatagatattgatgaatgaaatgagatataaatactacactcactcgacttatattatgaactgcagctctaagcactccaatcgatactgatgaggtgctcttaaaacgtgttttcagattggtatgagattcggcttgaacacattggagctcagttcgctttgtaagctcggtcggagtcgttcttagctcggcggcaagtgctttccagacgactttaatcagcacgcacttgttttaggcatacctatgtgattgccttgtgcacctggatcgagtgcataacagtgcatcagaaataaggattatgcaactaatatcgtttttatcaaatccattgttcttctgcgcgcttttattgaaattcagaacaagtgagtaaagttcaaaatgataatacaaatggaacgaaaataaacactttctgtacatatgtac

SEQ ID NO: 21905 - DNA, 4445 bp, DROSOPHILA
atgaatgaacgagaggcgcccaccccgataaacttaaactgaacgaacactcaagagagagcgcaagagcgctcaaaaacaatctggttttgagcgtttcgctggctctctgtttctgttttccactcgtttttaggccgagtcgagtgagttgagtcggcagagcaaagtcaaaacactggcaactgcgatttggtgccacattcgttcgatggcaacggattggataacaggcgcgcgctttgttttattatccacattatcagcggcattattgttattattggccctcagcgctttaccgctcgcccacgcgtccgcccgtgaatgccgcgcggaaaagtcgctttccactagattggcgtccagattcgaggaaatccgtcagcagacgcattcgcgcccgttcggtcagcactatggctaataatcgttcaaatcgttaaaaccataaaaataataataataattgcaataacaataaacatagtaataatcgtaacgcttacgagcctttgatagtgccaaggcaagcgcaatccaagtattcaaattcgaattcaattaacagcaaagtgcaattggctaaaaaccgaaaccaaaacgcaacaaagtatacgaaacacttgtgaaaccgtacaaacaattgtggaaaaaaatttaaagattattaagattgaagtctcaataaacattagtgcttaaataaatttaaaacgacccgcgtggagagtgcaataaaaagaataacttttgaaataaatatttaccaaacagaaaaatattttataaatatttaaataagtgaaaaacaaattggttactctgaaacaaagaaaattcaaattggtgctaaaacaaaggagaaaaaatttcaagaatattttacaaataataagacatatttaactatataaaaccaaacttaatcaacaaagacttggagtgaaaatataaaataaattttaaaaagagtttaacaaaatttgtttaaatccaaaggaggcaaaggaacagcacagaaagcgaggaaacactcaaataaaatccgccaaaaatcgcagatccctggaaaccaattcgtgtgaaatcggtcaagcccccaacgacttttagcccgtctcagacggagcaccgccaagattcttaccgccagcagcgcaatgaactcgtactttgaacaggcctccggcttttatggccatccgcaccaggccaccggaatggcaatgggcagcggtggccaccacgaccagacggccagtgcagcggcggccgcgtacagaggattccctctctcgctgggcatgagtccctatgccaaccaccatctgcagcgcaccacccaggactcgccctacgatgccagcatcacggccgcctgcaacaagatatacggcgatggagccggagcctacaaacaggactgcctgaacatcaaggcggatgcggtgaatggctacaaagacatttggaacacgggcggctcgaatggcggcgggggtggcggcggaggcggtggtggcggcggagcgggcggaacaggtggagccggcaatgccaatggcggtaatgcggccaatgcaaacggacagaacaatccggcgggcggtatgcccgttagaccctccgcctgcaccccagattcccgagtgggcggctatttggacacgtcgggcggcagtcccgttagccatcgcggcggcagtgccggcggtaatgtgagtgtcagcggcggcaacggcaacgccggaggcgtacagagcggcgtgggcgtggccggagcgggcactgcctggaatgccaattgcaccatctcgggcgccgctgcccaaacggcggccgccagcagtttacaccaggccagcaatcacacattctacccctggatggctatcgcaggtacaaatggtctgcgaagacgcggccgacagacatacacccgctaccagacgctcgagctggagaaggagttccacacgaatcattatctgacccgcagacggagaatcgagatggcgcacgcgctatgcctgacggagcggcagatcaagatctggttccagaaccggcgaatgaagctgaagaaggagatccaggcgatcaaggagctgaacgaacaggagaagcaggcgcaggcccagaaggcggcggcggcagcggctgcggcggcggcggtccaaggtggacacttagatcagtagatccttagatccttagatccttagatccgtagggtgtatgtgggattgggcgaaatgacgcggagacagatacaaagcaactatattgtaacaaatgaactatttacttaaatgaataatatttaaatattttgatggtacttgtgcgaatacgaaacttaacctaaatcgaacctaatggaattatttcaagcgtttgagcagcaaccgaaaatacgtaaatgaaacaaaactacaaactaattaactaggctaagtaaataaaagtagtggaaggagcgcagattataaacctacttagaattaaatgagcaaaacaaacaattttaatttagttccaaacgaaaaaaaaattcaagaggattcgctcgaaatggaaacctctgtcctgcccctttgttgcttactgctatgtttaaattaatttcgcgaaaaatactcaaaaattgaaacacaaagaaaacaaaaaatgaaagtataccattataatgttgaatgcgagcaaaattctgttgatatgaatttttggtaaaaacatgttctaaaccaatttaagatacgtaacgaaggatgcaaaaacaaaatgaaaactattaaactttaacttaaatataaatagaatttgttagccaagtaaacatattacgacacgaagaacaaacgttttcgggagtatcgaatatttgaatgtgtatagtttgtgcttattaaataaaataatgcaattttagttaactctgtttatttgtaaacgaatttgtttagttctcgcccaaacgactagagtgaagctgtttctttaagtaatgtgtagtgtgtttactttttaaattaaattaatgcctaattttattattattatgtttagtttaatgacaagcgtttatgagattatccgacagaagcggcgagaagaggagtgcgacaaaccgtttgccccggcaaacgcaaataaattattggttttgaaaaaatctaaagaaaacaaaaaaaaaaaacaatgagaaatcgaatccgattgttgtgttattattttagttctgccattgcgattttccgttctcccagtgtaattagagcctgagttgtttgagagagtcttcgcgggctacccgcttgcatgcgaaattgcttttgatctcgttttgagccgttaattgatcgtgagttgtacgctctatagagatacccataccgattagctataacgataccataccgataccaataccatatatatagtttagtggatccaacgagctgtgctcgactcaagccacaaggcgctccgtgtgtgtgtcccgataattgatccttcagttgagtttccatggtggtcccagttggggccgttcgtaacgaggtcctgcagaagatgtatacgtactaccgcctaagattcgattatagatatattatatttataaatcttgatatatatttatgtacttatgtatgtggggatcgagtcgaaatggacaaacaataagagagtaattctgcggaacggaacgaaggcagatgcaaatacgtaaataagaataagttaaatgttatagattttaaacgcatatttacctactacttacttaccagtgcattcgtagtaaatagttaaataatcgctacttacttgtacatttgctagtggcttttactttaaactctctgaccctcggccgagcaggcctatccataagagactactacttttcctatatacctacttcatccgatcagatcagacctacagatactttgcggttacattttctacttgtaatttcccctccccgcgatcgaagattggacccgcaggctccgttcatacttaatcgatgtaactctaatttaatgccattctatgttagctccgtaagttgtaaattatcaatataaactacacgtaaaaagaacaaacacaaaacaaacagcaaccagtgagaatgtggaaaatgaaacaaataaattaaacaaaacgatttaaataatttaaaagatgcctttggattattaatgtgaaatagttggtttcggaattgtaggtaattcgaaaggatagttttgcggtactcttaaaatagcagtccttcgttctacatttttaatagcaatattctccatttggcgccatactttcttggcttaggaagtatcttgttccaagaaagccaataaaacgttaagtttttcttgccgtgctatccaggaataaaattttcagtggaaattcaaaccata

SEQ ID NO: 21906 - protein, 346 aa, DROSOPHILA
MNSYFEQASGFYGHPHQATGMAMGSGGHHDQTASAAAAAYRGFPLSLGMSPYANHHLQRTTQDSPYDASITAACNKIYGDGAGAYKQDCLNIKADAVNGYKDIWNTGGSNGGGGGGGGGGGGGAGGTGGAGNANGGNAANANGQNNPAGGMPVRPSACTPDSRVGGYLDTSGGSPVSHRGGSAGGNVSVSGGNGNAGGVQSGVGVAGAGTAWNANCTISGAAAQTAAASSLHQASNHTFYPWMAIAGTNGLRRRGRQTYTRYQTLELEKEFHTNHYLTRRRRIEMAHALCLTERQIKIWFQNRRMKLKKEIQAIKELNEQEKQAQAQKAAAAAAAAAAVQGGHLDQ

SEQ ID NO: 21907 - DNA, 2788 bp, DROSOPHILA
tgcagtctagtgaactaagtgaaagctctgaaaatccggatgagtatagttattactaagctagtattactagtatctagatagtgcattatatcaatatatacacatatatgtatctttcgagagcttccagcaacgagtttccggccctgttaatattgattataatcaatctcgttgaccatactttcatttcgcagagcccgtggccatttttattgcatccacaattcggctgaccacattttagcttcatttacagttatttggccggcccccacctgcacagatactgtcacaccaccggccgccgactaaatgcctacgccaacagctacgcccacggccacacccacgcccactgccacgccccgcaggcaaaaccgcaaattcaattttggtttagagcctacaaacattttgcagcgtgtttatgtccggctgcattgttgcgagtagttttcgctcctggcccgcttttaatgcaatttatgggaagtgtttgccccggattcggttgccactgaccacaaagcgatcttttgtgatatggagagtggatgtggatgtaggcgcggggcatggggtatggggcatgcggcatgtggcatgggtgggttaaaatagtggtcgcggtctctagttgggttttcattaaagcatgaccggttgccaactgacagttcttagtggccatgtccgcatcataatcgtcaatcgaactttggacaaatttgcaattttgcagattgcggatgcgagtccatatggtcgcatttctatctagatcaggcaataaggctaaattttagtttacagattaatgaagcaaagaaaaaagtaaaatttctattaactgaacatataaatatgtttttttttattacatcaatgctagtgcttccttttaccgaaaacctattgaatacgctaaaaaattggaatagtcgcaagcggaagtcgtccaaaaaaatccttaagaattttggaaccagtttttctacttgtcgtatcgaaccaggcgcgtgtcgtcgccgacctcctccagatcctttggatcgcggcggaagcgataagtgccgacatcctggttggccgattccggcaacgtcaccttgatgcccttgtactcggttcgaccttccctgacctccggcacccgcagctccatctcggccttgtactcgtcatcgttaccaatgtccacgtcctggacgttcttttgcacggtgggatcctcctcgtcctggttccagccatcaatctcgatggggacaatggggttgccgtcgacgcctacgacggaactaggtgcgccagtaggcaggatctccacggtatctccagaaatcggattctctgctggtggcgactcaactgcatccgcgtccactatgttggtcacctctttgaatggagtatggtccatcaatgtcagcgaattgacgaaattgcgattaaactctacgtcagtcttggccatctcatttatattgatatctatcacggtcacgccatcgatgttccgcggacggtcaatggtgaggcaagtaagaccagtagacattttggagtgcaaggtcgagcgggccacacggacacggtgcagcgccagctgattcctcagcatcgaaagattgcgaaacatggtttttgtcggtgtttcgagtgcggaaactaactacccaacagaacaaaaaccgaagttaaatttaaaaaacgttcttatttacaaacaaaaattggaaggtcttatgttgccgaaattttagatatgactaaaattcccagctaaacccgacaactgacaaatctcgattgtgaaggaagttaaaggccaggctacactggttactgataattactgaaattgaaatataaatgaaatcactatcgccgtatcaatatctttattggtgcattttatgtgaagtacacaagcgtttaaacatattcttttgtcaccctcttatacctattgacaactcgaacattccaattccaattccaattccaacaaatactatatactcgttttatacctaaatttcggtagggtaacaatcaagaagtttatagatttatacctaaaatagtacataaaacaattcttccatccttaattcatattagctcactccgtagatctaactaccttttacataaggtagcgaacaaattttaggttttaacgttttcgcttaggggcacttccggttgcccttcgcaccttccgcttgccagacgtggaggtttctgatttctcctcgaaagacgactcctcctccttgccagtgcgcacctcccgatttactttgtaggcggcgcccattctcttaatgttctccttgtgcaccacttcgtgtttaacaatccggtggggataatccgtgccgaggacgcagccgtatgcccgctgatccaccagcgacgccttccagggctcataaatacagccagcaggatattttgagagttccggcacatacttcctgatatagtgcccttggggatccgttttcttgccaaacgccaccggactgtagacgcgaaaatactggtgaaagaaagcggacgcagatagccacatccagttgccagcgtttagtgcccagtcctgatccagcagcagctgctcgaacacccgctgtccctcctcccaactgatccagaggtctccgcgcgttaagaaacatgccactgcatgccgggccagatgatggatccaaccctcctggcgcagctgacgcatgatggcgtcgatgaaaggatatcctgtgcgtccgtg

SEQ ID NO: 21908 - DNA, 788 bp, DROSOPHILA
ggaattttagtcatatctaaaatttcggcaacataagaccttccaatttttgtttgtaaataagaacgttttttaaatttaacttcggtttttgttctgttgggtagttagtttccgcactcgaaacaccgacaaaaaccatgtttcgcaatctttcgatgctgaggaatcagctggcgctgcaccgtgtccgtgtggcccgctcgaccttgcactccaaaatgtctactggtcttacttgcctcaccattgaccgtccgcggaacatcgatggcgtgaccgtgatagatatcaatataaatgagatggccaagactgacgtagagtttaatcgcaatttcgtcaattcgctgacattgatggaccatactccattcaaagaggtgaccaacatagtggacgcggatgcagttgagtcgccaccagcagagaatccgatttctggagataccgtggagatcctgcctactggcgcacctagttccgtcgtaggcgtcgacggcaaccccattgtccccatcgagattgatggctggaaccaggacgaggaggatcccaccgtgcaaaagaacgtccaggacgtggacattggtaacgatgacgagtacaaggccgagatggagctgcgggtgccggaggtcagggaaggtcgaaccgagtacaagggcatcaaggtgacgttgccggaatcggccaaccaggatgtcggcacttatcgcttccgccgcgatccaaaggatctggaggaggtcggcgacgacacgcgcctggttcgatacgacaagtag

SEQ ID NO: 21909 - protein, 160 aa, DROSOPHILA
MAKTDVEFNRNFVNSLTLMDHTPFKEVTNIVDADAVESPPAENPISGDTVEILPTGAPSSVVGVDGNPIVPIEIDGWNQDEEDPTVQKNVQDVDIGNDDEYKAEMELRVPEVREGRTEYKGIKVTLPESANQDVGTYRFRRDPKDLEEVGDDTRLVRYDK

SEQ ID NO: 21910 - DNA, 2655 bp, DROSOPHILA
attattttgggtttatgtgccaaacgtgattacaataaattggcataatgtaaccttcgtttcggttatgcaaacggaatgttttcgtttcgcttttcattcacatatcacacaattttgacgtgttttattgtctgttttaaggcccagtacaatggcatttatttattgtgcactgcaaacagactgagtttaaacatgtgttcgcacctcaattgaaactcattacggagagtaaaattaatgattaatttgctttgggaaaactctaattaattgttgtattattcctaaattgtttcagacgcgagtgtagacaccacgtgcgcactaatggatggaaataatgtatctcaagctcctaaaaggtatcagctgaatcgcaacacttttatcttgagagtaaatcccctcaatcgaagcaattatcaaaaatccaacaacttgtaaaatcggatgttgaaaatgaaaatttattttcaacacgctaaccgctgagaaaacagaagagattgtgtcttttatattttctcttaatttacatcttaaacaaaacttccatcagatgtcgactataagatcaaagcgtaaaaatgtttttttaattcaagttctattattattttaggtaaaaacacgaagatgagaacctgtaagtaaaatataatgtgaaatacaaattaattgagctacaaaattccccaaaatatgaatagttgtaaaaccattgcatactatgacatagggtttccattcctttagcgaaaaatcctaactggataaatcgttgataatatcaatattcaaattcaaaaacaatattattaacgacgagagtccaaccgaagaatatatatatatatatattttccgataacttcaattaacaacaaaataccattgattagaaacgacgttccggtttttccacctgtgccgacacatttttaaagcaaatcgctcgcattttagccgggaatgcgttaaattcaaattaaacttactttgttagctgggcgagactaaacttgcgctcggcgtccgatttgcgcaggaagttaccgaatccgcggaaggagagccgggagctgcggcggttctcgcccgtctcccccgaagccttgggatgcaggtggttttcgttgctggtgggcggaagtgggtgggctgcgtccgtctggtcggattcagctgatctagcctcgccatcgtagccggcgttcgcggtgccgttcacctttgagatctggaagcgatcggccatggtgtggctctggggagtcctgcacttggttgctcagtggaccctggacacagattcttatcgattgcacgggcaccttgacgctagctaacgagccgagcacatttgcatttcacacacttggcaggatgagagcgccccactgggagtggatgatatcacaaggagcgcgaatcgaaggaccgagtttacacgtccgactgcgcttgaccctcaacgacgattgtccggatattcagaacgcatcgaccacgtcggcttgttttgggtgtttcgggttcggtttcggatttgaattcgggttcgtttttatatatgtttctgaatctcacgggaaacactccgatgatttctccgtggcggctgggcaattgcaacttatcgcgccgactgtcgcacggcgtttgagcgttgtcaagtgtttaccgcccgattattatggctttttgcgccagtcagctgctcctctgcttccgctgtgctgtggatttggcagcggctgcttcagttcgaaccaacttggcgcccgcgtggtgagtttccaacaagtgttcggggcgaactcaccacaagagcgctctctgtgcggagcgacgaggaaagcagcgcgattcgggaaagaaccgttggccaggaggtccgacggcgggatacccgctctttagagggtctagcgggcgtatacgtaatgttgcaacgcatacacagaaagtagttcgaggtgcagagtacaggggaaagaaaaattctttgttatgatagttaattggttaattttacgtaaagaattttataatatgaaaatactatgcgttctgttcaaagttccttaaaattttaatcttcattttagagcttacacaaaatattcatggtaaaattttgaaactttagaaattttaaccaactaatacttatcggattattacaacattttttcgttctggaaaaggactttacactgagaatattttttgtttattttgggtaaaaaacaaaacaaattttatagaaatattttatatttatttttcataaatatttcaaaccttaacaacttttcaaatttataagcgtacttgataagtagtagaatcaaagattttgctctatattaacatttttgttgtcgacaacgcaaacgagattagcgaatccaatcttattattatcgttccatttcagatgactgtcatttagccacacagtttaaacgcagagatgattgtgtgttgatattcaatcaaactgacattttatatattttgtttttccccaaatattaaagttgttattgtttatctttgtttcgttttattcaaaggcaaaaaggccttaacaaataaaactaaaatatgcatatttcccactcattcatattcgtttaactt

SEQ ID NO: 21911 - DNA, 655 bp, DROSOPHILA
gtcggcgcgataagttgcaattgcccagccgccacggagaaatcatcggagtgtttcccgtgagattcagaaacatatataaaaacgaacccgaattcaaatccgaaaccgaacccgaaacacccaaaacaagccgacgtggtcgatgcgttctgaatatccggacaatcgtcgttgagggtcaagcgcagtcggacgtgtaaactcggtccttcgattcgcgctccttgtgatatcatccactcccagtggggcgctctcatcctgccaagtgtgtgaaatgcaaatgtgctcggctcgttagctagcgtcaaggtgcccgtgcaatcgataagaatctgtgtccagggtccactgagcaaccaagtgcaggactccccagagccacaccatggccgatcgcttccagatctcaaaggtgaacggcaccgcgaacgccggctacgatggcgaggctagatcagctgaatccgaccagacggacgcagcccacccacttccgcccaccagcaacgaaaaccacctgcatcccaaggcttcgggggagacgggcgagaaccgccgcagctcccggctctccttccgcggattcggtaacttcctgcgcaaatcggacgccgagcgcaagtttagtctcgcccagctaacaaagtaa

SEQ ID NO: 21912 - protein, 87 aa, DROSOPHILA
MADRFQISKVNGTANAGYDGEARSAESDQTDAAHPLPPTSNENHLHPKASGETGENRRSSRLSFRGFGNFLRKSDAERKFSLAQLTK

SEQ ID NO: 21913 - DNA, 80251 bp, DROSOPHILA; identical to SEQ ID NO: 21904

SEQ ID NO: 21914 - DNA, 4574 bp, DROSOPHILA
atgaatgaacgagaggcgcccaccccgataaacttaaactgaacgaacactcaagagagagcgcaagagcgctcaaaaacaatctggttttgagcgtttcgctggctctctgtttctgttttccactcgtttttaggccgagtcgagtgagttgagtcggcagagcaaagtcaaaacactggcaactgcgatttggtgccacattcgttcgatggcaacggattggataacaggcgcgcgctttgttttattatccacattatcagcggcattattgttattattggccctcagcgctttaccgctcgcccacgcgtccgcccgtgaatgccgcgcggaaaagtcgctttccactagattggcgtccagattcgaggaaatccgtcagcagacgcattcgcgcccgttcggtcagcactatggctaataatcgttcaaatcgttaaaaccataaaaataataataataattgcaataacaataaacatagtaataatcgtaacgcttacgagcctttgatagtgccaaggcaagcgcaatccaagtattcaaattcgaattcaattaacagcaaagtgcaattggctaaaaaccgaaaccaaaacgcaacaaagtatacgaaacacttgtgaaaccgtacaaacaattgtggaaaaaaatttaaagattattaagattgaagtctcaataaacattagtgcttaaataaatttaaaacgacccgcgtggagagtgcaataaaaagaataacttttgaaataaatatttaccaaacagaaaaatattttataaatatttaaataagtgaaaaacaaattggttactctgaaacaaagaaaattcaaattggtgctaaaacaaaggagaaaaaatttcaagaatattttacaaataataagacatatttaactatataaaaccaaacttaatcaacaaagacttggagtgaaaatataaaataaattttaaaaagagtttaacaaaatttgtttaaatccaaaggaggcaaaggaacagcacagaaagcgaggaaacactcaaataaaatccgccaaaaatcgcagatccctggaaaccaattcgtgtgaaatcggtcaagcccccaacgacttttagcccgtctcagacggagcaccgccaagattcttaccgccagcagcgcaatgaactcgtactttgaacaggcctccggcttttatggccatccgcaccaggccaccggaatggcaatgggcagcggtggccaccacgaccagacggccagtgcagcggcggccgcgtacagaggattccctctctcgctgggcatgagtccctatgccaaccaccatctgcagcgcaccacccaggactcgccctacgatgccagcatcacggccgcctgcaacaagatatacggcgatggagccggagcctacaaacaggactgcctgaacatcaaggcggatgcggtgaatggctacaaagacatttggaacacgggcggctcgaatggcggcgggggtggcggcggaggcggtggtggcggcggagcgggcggaacaggtggagccggcaatgccaatggcggtaatgcggccaatgcaaacggacagaacaatccggcgggcggtatgcccgttagaccctccgcctgcaccccagattcccgagtgggcggctatttggacacgtcgggcggcagtcccgttagccatcgcggcggcagtgccggcggtaatgtgagtgtcagcggcggcaacggcaacgccggaggcgtacagagcggcgtgggcgtggccggagcgggcactgcctggaatgccaattgcaccatctcgggcgccgctgcccaaacggcggccgccagcagtttacaccaggccagcaatcacacattctacccctggatggctatcgcaggtgagtgtcctgaagatccgaccaaaagtaagataagatctgatttaacacaatacggcggcatatcaacagacatgggtaagagatactcagaatctcttgcgggctcacttctaccagactggctaggtacaaatggtctgcgaagacgcggccgacagacatacacccgctaccagacgctcgagctggagaaggagttccacacgaatcattatctgacccgcagacggagaatcgagatggcgcacgcgctatgcctgacggagcggcagatcaagatctggttccagaaccggcgaatgaagctgaagaaggagatccaggcgatcaaggagctgaacgaacaggagaagcaggcgcaggcccagaaggcggcggcggcagcggctgcggcggcggcggtccaaggtggacacttagatcagtagatccttagatccttagatccttagatccgtagggtgtatgtgggattgggcgaaatgacgcggagacagatacaaagcaactatattgtaacaaatgaactatttacttaaatgaataatatttaaatattttgatggtacttgtgcgaatacgaaacttaacctaaatcgaacctaatggaattatttcaagcgtttgagcagcaaccgaaaatacgtaaatgaaacaaaactacaaactaattaactaggctaagtaaataaaagtagtggaaggagcgcagattataaacctacttagaattaaatgagcaaaacaaacaattttaatttagttccaaacgaaaaaaaaattcaagaggattcgctcgaaatggaaacctctgtcctgcccctttgttgcttactgctatgtttaaattaatttcgcgaaaaatactcaaaaattgaaacacaaagaaaacaaaaaatgaaagtataccattataatgttgaatgcgagcaaaattctgttgatatgaatttttggtaaaaacatgttctaaaccaatttaagatacgtaacgaaggatgcaaaaacaaaatgaaaactattaaactttaacttaaatataaatagaatttgttagccaagtaaacatattacgacacgaagaacaaacgttttcgggagtatcgaatatttgaatgtgtatagtttgtgcttattaaataaaataatgcaattttagttaactctgtttatttgtaaacgaatttgtttagttctcgcccaaacgactagagtgaagctgtttctttaagtaatgtgtagtgtgtttactttttaaattaaattaatgcctaattttattattattatgtttagtttaatgacaagcgtttatgagattatccgacagaagcggcgagaagaggagtgcgacaaaccgtttgccccggcaaacgcaaataaattattggttttgaaaaaatctaaagaaaacaaaaaaaaaaaacaatgagaaatcgaatccgattgttgtgttattattttagttctgccattgcgattttccgttctcccagtgtaattagagcctgagttgtttgagagagtcttcgcgggctacccgcttgcatgcgaaattgcttttgatctcgttttgagccgttaattgatcgtgagttgtacgctctatagagatacccataccgattagctataacgataccataccgataccaataccatatatatagtttagtggatccaacgagctgtgctcgactcaagccacaaggcgctccgtgtgtgtgtcccgataattgatccttcagttgagtttccatggtggtcccagttggggccgttcgtaacgaggtcctgcagaagatgtatacgtactaccgcctaagattcgattatagatatattatatttataaatcttgatatatatttatgtacttatgtatgtggggatcgagtcgaaatggacaaacaataagagagtaattctgcggaacggaacgaaggcagatgcaaatacgtaaataagaataagttaaatgttatagattttaaacgcatatttacctactacttacttaccagtgcattcgtagtaaatagttaaataatcgctacttacttgtacatttgctagtggcttttactttaaactctctgaccctcggccgagcaggcctatccataagagactactacttttcctatatacctacttcatccgatcagatcagacctacagatactttgcggttacattttctacttgtaatttcccctccccgcgatcgaagattggacccgcaggctccgttcatacttaatcgatgtaactctaatttaatgccattctatgttagctccgtaagttgtaaattatcaatataaactacacgtaaaaagaacaaacacaaaacaaacagcaaccagtgagaatgtggaaaatgaaacaaataaattaaacaaaacgatttaaataatttaaaagatgcctttggattattaatgtgaaatagttggtttcggaattgtaggtaattcgaaaggatagttttgcggtactcttaaaatagcagtccttcgttctacatttttaatagcaatattctccatttggcgccatactttcttggcttaggaagtatcttgttccaagaaagccaataaaacgttaagtttttcttgccgtgctatccaggaataaaattttcagtggaaattcaaaccata

SEQ ID NO: 21915 - protein, 389 aa, DROSOPHILA
MNSYFEQASGFYGHPHQATGMAMGSGGHHDQTASAAAAAYRGFPLSLGMSPYANHHLQRTTQDSPYDASITAACNKIYGDGAGAYKQDCLNIKADAVNGYKDIWNTGGSNGGGGGGGGGGGGGAGGTGGAGNANGGNAANANGQNNPAGGMPVRPSACTPDSRVGGYLDTSGGSPVSHRGGSAGGNVSVSGGNGNAGGVQSGVGVAGAGTAWNANCTISGAAAQTAAASSLHQASNHTFYPWMAIAGECPEDPTKSKIRSDLTQYGGISTDMGKRYSESLAGSLLPDWLGTNGLRRRGRQTYTRYQTLELEKEFHTNHYLTRRRRIEMAHALCLTERQIKIWFQNRRMKLKKEIQAIKELNEQEKQAQAQKAAAAAAAAAAVQGGHLDQ

SEQ ID NO: 21916 - DNA, 4338 bp, DROSOPHILA
ccaaacgagtttcgcctggaatctcgagtttcacctgctggagacacgcctgcccatctcaaccccctcatcaacctaccacaacctgcgcccaatttcgcgcttcgcttgcgttgatggggtccctgagtgtgcttttccacgcccatgagtacactgtactggagtgcccccgccagttagccagcccctctcgacaatgcccaaaagattcttattgtttaattgccgcacacacacacacactcgcacggacgtcgagacgcacacgcacacctatgtataagcactgcgcactcaaggcgttctgtgtcgtcgttgtcggttttgagttacaactgccttttacctcgctactgatatcaaatttctggagcctcgctcgctgcaggcatcgtagaggcgattcgcgagatcgcagagctgcgtttttccgcttttccgtttctcgtctttattgaacgagcagacaaaatatacacatacgctcttttgcacccctggggcacacttttgctggggatggcaaggcaagtggccgtgactatcgatggcccgccagtatcgatggcacggttgaccagggctgcactagcaagttaaaaaaaagataacatacaattttagcttctaacttttttaacctaaaccactaaaaaatgtctaataccgttaatatttttcttcaccaatatttgtaccaattccaccaaacatatatcatgaacgctatcatgatcatttgattacatagttacctaataatttttgttttcaatgacttcaaatattttattaatttttataaaatatatattatatattctttcgttgcacatgtgaatatatttatttatgtatattaaaaaaatacagcaaattatttttaatttaaatcaaacatttaaagattttaactattgactccaacatacaaaatactgatatccacttctgtgtgtccattcggaatgcgctcaatttgttcttataactagttttaaagcaatattggtgaggttttgacctgtcttccaatggctgcaaagcaaacctttgcggaagattgtaatataaaaagtgtattattttattttttaattatttcatacagagataggttattgaattaagtaattattggacaatctgccgttattgcttgacgtaggaacaaagccatttttgaaggatggtcgttgttaggtttcaaatgtatcacgttcctggccggcgaactggatcgctgggaattggacgggattaagccgtttttgaattgattaaccactaattgaggaaccacaaagtccgatggtttggaaaataaatccttcttttgatgctgaagcattgtattgcaaagatttggcgtcgaaattttgacggtctgtccattcacagaaattgaatagacagatttgggtgcttggcttgtgggacgaataccattcttgggcagctgggtgccagagacaagatcgttggagccgacggatcgagatcctttccctctggagttaaggtgttctgtagccatatttttcaacttcagttctgcttccgccttggctgcagccactgcttgtttcttcgtacgcatcacggtgacgccatcgctcatcagcgtgcccaaagatccatatctctccataaactcttccggcagatcagggggttgatgtatgcccatcagcacgggagagcacatcttcatcaaccgatgacgaatgtacttaactgcttgcctgtctacgctggagctgggagagtcattactggcggccatgtgtgaatcgatgtgttcagataggtacttcaattgaggcaaaatgcatgcgcggaccgcatgattccccatctttcccaggcctatgacggccccaaacaccgttgtcagtggcttcttcaatagcgccttgttgtaaacactggaatataaatgaatattttttaatccgatagagattgcaagcaaaaatcaattgatttagcgagcagcgagatgttattttaataaacttttagcacacttctttaagcatgtggtcgcacgcaacatttgcgccatagacgttattatcgctgttatctaaaattattatcaatataaatcgaaggggtaagcaacttatttaattaatagcttggtggttatttcagatattatatgatttacaatgagttaacgtgaaacgagctacgttaggtattttgtaacgacatattaatattaattaatatgattatattcctctaccagatggatttctctctaataaaatgatatgaattcacaaataacccaaagaacccacacatgatgagtacttgcccaatgactctgggcaggatgccgttgtcggcagcgtcgaactggcgcactatgtgggccattatgtttccggagtattcccttaaggcccagtgatcctccgagttcggagatgcgcacacttgtttggccagcaggcaggatagaacggctggcaggagcaggtggagctgcaattcaacagatgcattcttcagcttatcctattcctctcagaaccaaatacttacatattgcaataggctgaagcgctggtttcccaaaagagctcggaccatgcgcataaggtaaaggagcagcggcaggttctgctgggccacgttgatagccactgcgtccgcaatgaacttggtcaacctgggcagcaactcctccagcgagggatcagtggagatggctttgagagcaagcacgcgccgggattccaagtcgcctacgcaggcctcggttaccaactcgaagaagttctgctgttccatgctcagcggatagcgcttgctgggctttagcagcacctgctccacctttagccacccggtgtgcatgggaggcggctccaatgaagtctccggcacgggttccggcacagattcctgcacggattccgggtaggaaacgagaagttcatcctttttttcggcggttacagcttcgcggacggtttttaatactttttgggaaggaggcattttgcaatcgtcgcaatggaccagcctaaaaaagatgtcatagcagaggtcgtcgtgcattcggacggcatgctggatgtgagacagttgcaatcgccgatcccggatgcgccgcatgtattttccagcctcgtttagcagatttgtaatgtcttccttaacattgatggatagccactgtgctactccgtcgtccagatgcagaccagtgctgtggaagaatatcgcggatagagaacgcggcgacaaagaatgtctgcgaaaacttttgtccttgtcgggcatttcattctgagacgttttcattttagttgcgtttttgttttcaaactgccacattttggcactagtgatgccactggtcgataggcgatgcacgacgccgttatcggtcagaaagggtcgtcactcgataccgatacccgccaattgaattttcaaaaatatcaagcgagagtttcaaatgcggcttgtttgatttttttttgaatgtcagttcaacattggcaaagcttgccacaacctatccgaggagtaatactgtttccaacaaaaacacttcataaccaattattttagcttagccggttatttaattacaaagttaattatattatatatcatatatatcatcatcacatatatgtgggttgtattacgtggtccacaatttggtagctaggttaattaggttaatcatcattgacggttgcactccggatacacttaaaaaacaatatatccctaatagcacagattcacttcccatcattgttgattttgtacaaacttacttaatataaaaataaaactgttcatttaataaaccgcgtttttagacttttttgtgtaatgtgtgccctctgggagaacttcccaggtcgagctcctttcgactactgccctttacagcatttccacaaccgactgaacctgactttgacataattgtcaagtgaaattgtagaaaccgcctagtacgaatgggaataggaaagtccgtatcagtttcatacagtttggtatatatatatatatatatatacatactatactatatttgcgattattgtttaaaatttgttttgcactgatttaaagtgtaatctccaatatttatatcaataattttactcaaaatatttcccatgctgtcgcatacgagaggtaacgccttagtcgatttttagatacccgttactcagctagtgcaagtgcgaaccaaaatttcatgtactttctctgggatatcgattgggtataaaatgagacaaaatgtgtaagaaggggcgttgccaaaatgcttttggtata

SEQ ID NO: 21917 - DNA, 1721 bp, DROSOPHILA
caactaaaatgaaaacgtctcagaatgaaatgcccgacaaggacaaaagttttcgcagacattctttgtcgccgcgttctctatccgcgatattcttccacagcactggtctgcatctggacgacggagtagcacagtggctatccatcaatgttaaggaagacattacaaatctgctaaacgaggctggaaaatacatgcggcgcatccgggatcggcgattgcaactgtctcacatccagcatgccgtccgaatgcacgacgacctctgctatgacatcttttttaggctggtccattgcgacgattgcaaaatgcctccttcccaaaaagtattaaaaaccgtccgcgaagctgtaaccgccgaaaaaaaggatgaacttctcgtttcctacccggaatccgtgcaggaatctgtgccggaacccgtgccggagacttcattggagccgcctcccatgcacaccgggtggctaaaggtggagcaggtgctgctaaagcccagcaagcgctatccgctgagcatggaacagcagaacttcttcgagttggtaaccgaggcctgcgtaggcgacttggaatcccggcgcgtgcttgctctcaaagccatctccactgatccctcgctggaggagttgctgcccaggttgaccaagttcattgcggacgcagtggctatcaacgtggcccagcagaacctgccgctgctcctttaccttatgcgcatggtccgagctcttttgggaaaccagcgcttcagcctattgcaatatctccacctgctcctgccagccgttctatcctgcctgctggccaaacaagtgtgcgcatctccgaactcggaggatcactgggccttaagggaatactccggaaacataatggcccacatagtgcgccagttcgacgctgccgacaacggcatcctgcccagagtcattgggcaagtactcatcattgtttacaacaaggcgctattgaagaagccactgacaacggtgtttggggccgtcataggcctgggaaagatggggaatcatgcggtccgcgcatgcattttgcctcaattgaagtacctatctgaacacatcgattcacacatggccgccagtaatgactctcccagctccagcgtagacaggcaagcagttaagtacattcgtcatcggttgatgaagatgtgctctcccgtgctgatgggcatacatcaaccccctgatctgccggaagagtttatggagagatatggatctttgggcacgctgatgagcgatggcgtcaccgtgatgcgtacgaagaaacaagcagtggctgcagccaaggcggaagcagaactgaagttgaaaaatatggctacagaacaccttaactccagagggaaaggatctcgatccgtcggctccaacgatcttgtctctggcacccagctgcccaagaatggtattcgtcccacaagccaagcacccaaatctgtctattcaatttctgtgaatggacagaccgtcaaaatttcgacgccaaatctttgcaatacaatgcttcagcatcaaaagaaggatttattttccaaaccatcggactttgtggttcctcaattagtggttaatcaattcaaaaacggcttaatcccgtccaattcccagcgatccagttcgccggccaggaacgtttgctttgcagccattggaagacaggtcaaaacctcaccaatattgctttaa

SEQ ID NO: 21918 - protein, 570 aa, DROSOPHILA
MKTSQNEMPDKDKSFRRHSLSPRSLSAIFFHSTGLHLDDGVAQWLSINVKEDITNLLNEAGKYMRRIRDRRLQLSHIQHAVRMHDDLCYDIFFRLVHCDDCKMPPSQKVLKTVREAVTAEKKDELLVSYPESVQESVPEPVPETSLEPPPMHTGWLKVEQVLLKPSKRYPLSMEQQNFFELVTEACVGDLESRRVLALKAISTDPSLEELLPRLTKFIADAVAINVAQQNLPLLLYLMRMVRALLGNQRFSLLQYLHLLLPAVLSCLLAKQVCASPNSEDHWALREYSGNIMAHIVRQFDAADNGILPRVIGQVLIIVYNKALLKKPLTTVFGAVIGLGKMGNHAVRACILPQLKYLSEHIDSHMAASNDSPSSSVDRQAVKYIRHRLMKMCSPVLMGIHQPPDLPEEFMERYGSLGTLMSDGVTVMRTKKQAVAAAKAEAELKLKNMATEHLNSRGKGSRSVGSNDLVSGTQLPKNGIRPTSQAPKSVYSISVNGQTVKISTPNLCNTMLQHQKKDLFSKPSDFVVPQLVVNQFKNGLIPSNSQRSSSPARNVCFAAIGRQVKTSPILL

SEQ ID NO: 21919 - DNA, 2741 bp, DROSOPHILA
tgctgtgccgttctgttgcccaaggccttcgctatcttcccgaatctgcgcatttccacttcctctggcggatactggatgagcagctgctccaagcgactctgctcttcgttggtccacaagcgattgaaattctccgaccgtccattgctcctgtcccgattcttgttcgcctcttgcgtccatgaagacgcatcggtcggtgtctcatttgtgcccccttcctcgtcattgggcgacagagttggcaagtccggtagaacggtcgtggtgatgtaattatccgctatcaaaggctcgttgtttcgcagtttgtccagcatatgttgcggattctccaagtagatattttgtgtggcttccaattcctcaatctgctgatgcacccgaatcctttgtgcctgcagcacggccaaagtgcgcagcaaattggtatagcactggttgccacgcagggccaggtgctcggtctcaaagtgaaacacatcctcatcttctgcagatatctctgctatttccattacaaagaattagcaccaaatacccgtttgtatacaaaaaatgtgtttacgcctctgcgctagagatggcagctcattaagcaaaacagttatcgaaatttagcaacatatcgatcttggatcattatcagctgttatcagcgaaaaaagaagaagcggaatacgtaacgtttatttacaaatttagcaatgataagtgcaccaattcgctctatccttgcacttacagcaaaggtaatttcacggaaaatcgaacgcacttgacaatattttaataattttaaaactaacagcgcacggcggttacaagcgcggccaatcaggtgcgaattgtggaggttggaccgcgggatggtcttcaaaacgagcccaaactcctgccggcagccaccaagatcgagctgatcaaccaattgtccgaaacaggactgcgaaccatagaagccaccagctttgtgagcgccaaatgggtgccacagatgggcgacaatgccgaagtgctgaaaggaatccgcaaagtgactggtataagctatccagtcctcacgcctaatctgaagggattcgagagtgctctggaggcgggagccgaggaggtggcagtctttggagccgcatctgatgcgttttcgctgaagaacgttaattgcacggcagctgaggccatcgaacgatttaaacctgtgctgaaagcagcccaaaagcatggtgtgcgcgtccggggctacgtttccaccgtggttggctgcccgtacgagggtgctgttgcgccgagtgctgtcgtcaaagtggtggaagccctgtaccaaatgggctgctatgagatctcattgggcgacaccattggtgtgggcactccaggcacaatgcgccgaatgctggatgaggtgaccaaggtcgtcccggctaaagatctggccgtgcactgccacgacacttatggtcaggctctgagcaacatactggtctcactggactatggcattcgggtggtggactcttccgtttctggcttgggcggatgtccttacgccaagggggcgtcaggcaacgcagccaccgaggatgtggtctacttactgcacggcatgggcctcgatactggcgtcaacctagacaaactgatccaagtggggcggtacatctgcaccgaactgggcagaacctcagagtccaaggttaatcgagcgtggaagggaccgcaggcgcgagttaagtgatgatgcaagcattgatactatcaaacgaaaacgaaggcatttactagcactagttacacaatacatttattatcgttgcaatatttagtcaaggagcgtgaagtacttttatgggccttaaaacttttgggcatctcttattgtgtataaggacacgtcgcctgaggcgagcgacagatcagccaggctgtgattggcgcgtcgtgggatatgcgaagacgacggattgcggactgcctcgccgggcattttcattttgccatcgtggcgcataacagtaggctccacggcggagttgaggtatttttgaatttgaggtaccttcggcatgggcaaaggagttcgttcatcaaccacctgttcaatggaaggtattagtttacgttcactcatcatggcttatatataaatttaaacttacatgcttgatttcggaagatatgtaagcctttttgggaagcagatcagcggctgaatcgattccattgataattaaagattccgcttcactggacttgggtgtttcgtcctttgttgcgaaaagtgctttaggatgacacaagcgagactcctgctccaactcactgatggccagtgtagatagcatatcagaactcgttggacggaatgtactcattagcggagcagtaccagacttctgggtgtaggtgcgtatgggactgactatgttggcgtatggctgctttatctgattttggcgacgctgaggaataccagaggctgcactgaaaaatttctttttggtccactccatggtgaggccgacattgagcggctttctacccgtgctagatgaacctacaactgtttgtggctgattagatgaccgcagcggaattgatggctgcaaaaaggctacagccggtgattttggttccggcttcggtgaaacaacgaacgtgctttgtttggtcttgggcagcacagggcaatctgccttgactgcggcgactgaaggagccccacctgccatgtactc

SEQ ID NO: 21920 - DNA, 741 bp, DROSOPHILA
atgggcgacaatgccgaagtgctgaaaggaatccgcaaagtgactggtataagctatccagtcctcacgcctaatctgaagggattcgagagtgctctggaggcgggagccgaggaggtggcagtctttggagccgcatctgatgcgttttcgctgaagaacgttaattgcacggcagctgaggccatcgaacgatttaaacctgtgctgaaagcagcccaaaagcatggtgtgcgcgtccggggctacgtttccaccgtggttggctgcccgtacgagggtgctgttgcgccgagtgctgtcgtcaaagtggtggaagccctgtaccaaatgggctgctatgagatctcattgggcgacaccattggtgtgggcactccaggcacaatgcgccgaatgctggatgaggtgaccaaggtcgtcccggctaaagatctggccgtgcactgccacgacacttatggtcaggctctgagcaacatactggtctcactggactatggcattcgggtggtggactcttccgtttctggcttgggcggatgtccttacgccaagggggcgtcaggcaacgcagccaccgaggatgtggtctacttactgcacggcatgggcctcgatactggcgtcaacctagacaaactgatccaagtggggcggtacatctgcaccgaactgggcagaacctcagagtccaaggttaatcgagcgtggaagggaccgcaggcgcgagttaagtga

SEQ ID NO: 21921 - protein, 246 aa, DROSOPHILA
MGDNAEVLKGIRKVTGISYPVLTPNLKGFESALEAGAEEVAVFGAASDAFSLKNVNCTAAEAIERFKPVLKAAQKHGVRVRGYVSTVVGCPYEGAVAPSAVVKVVEALYQMGCYEISLGDTIGVGTPGTMRRMLDEVTKVVPAKDLAVHCHDTYGQALSNILVSLDYGIRVVDSSVSGLGGCPYAKGASGNAATEDVVYLLHGMGLDTGVNLDKLIQVGRYICTELGRTSESKVNRAWKGPQARVK

SEQ ID NO: 21922 - DNA, 2327 bp, DROSOPHILA
taataaaacctcttcagttcaaaactaaatatcacgttttatcagcgatgttttttaaattttccgaaacatcgatgtttaatttagactatcgatgattttaggatcatcactattcgaagaacaagaagaagagctataatttcttcagctaatttaattaacttaatttcaattattagcgtgcagtatatatatatttattgctttttaattgttggtgaaagctatgcaagtcgttggagatcttcatgcaaagcaggccaagtcatttctgatcgccgaactacattgaaagcttatgctgtgaacaaacttatgttcatcgacaaaattttggacatttctacaaaaaaattatgcgataaaatgaagataaagatgctcaaattacacatatatgtacactttaaataagatatatttatgaggcgtctggtaaaaccgatctcactgatttttaaattcctattattactaatttaagatgatgcatatgaaaagaaatcgcattgtttctaagtttgtaaaattattatttgttgagttgttttatattcaatttctaatcaattgaattcaaaaatatacggatacgccaccctggatcgcgaaggaaaggggctaaccattttctagtagtaggctcattttattctgtaagaattcatggttatgacaattggaacttttttaactctaggtcaccgcagtatgtcccttagattttcgaacgacaatgaaaattttaagtttccaggctaatttccaacatggcggtggcgaaaaagcagtgtccctgcacacatttagctaagaaatcccctcacatttaaaatggttcacagcataagttaaaaatatttgctatcgattacaaatttcgatccgcgacatcgccggtccgtgaagagcagcttcactcaaatccaaaactgtaagtttagagacgggtcgaatcgttgtcctcaataggcctcgagtgaattacactcgaaacttagcgcgtctgacaactcaatctgctctgctgtagatctcctccacgatgcccttgcaccaaggcaggatcgcatcgccctggtggatgggctccgttctttgcctccacttcttgaggcgaacaagcgtagccagatacttcaggacccacctcctttctccactgctctctcgtagaaccctccttgggcagctccgcatccaaaccaggcgtcatcttcaacggcgactcatagcccgcatccacaggcaaatgagtatgcggacgcgaattcacgatattctccgcctcaatcagaagtcttgtattgacgtactgtatcatgcgctctcatactccgccctcagacgggttcactgggctatttaaaaatctaatttatccgattcataagccctagtgggattatgccttcgtactgagacaaaaacctccgtgtgctcttcagatcttgcacgacatccttcattgtaggccattgggctccttcttccaccctttagtggaattttacgacaagccgggtacgttaaggtagttttattcacccgcctccatacacgacacctgtttaggattagccacccactctgtcaattaataattagacatattaataagagtctgccctatcagtctccttgcagggtgctgctcaatggtagccaagacacctgtagcatctcgtgggcccggacgtcctgggtaatgcgacaccttgaccatccattgggacgctttccgatgcttttccctatacttcgagcaaaagctcaccttgctgcgttctctggattttgcgtacgtggctgcccagttcgcttaggctcgggtccgatcctagcttcctaagcatatctgggtacgaagcctcacccgtctctgcctttcgcctttccttctccgctgtcacccgtcgtgtgcttgctcggcttgtgcgcctggactttgggcacttgccccttgggcacctgcggactgagaggagcctttttggtaggcttgtgtacctcagcctgctcgtcactcgtagctcgctagttgcacctttattctgctctatcgagcgttatcgcgttaagggctgagagttcagaagctgcaccctttgtctctcttgtgacgtgccgttgggtctcaaatgcggatagcaggatgttaatcttgccatttatacggggtgagtattctcttcatgtcctcattctcgagagccgtggtcgggtccgaataccgatgtgatgatgcagcaggggacttcgctcccgttttttgcgatggcacggcaatgtggtccatcattttctgacttatcccggaggtt

SEQ ID NO: 21923 - DNA, 327 bp, DROSOPHILA
atgatacagtacgtcaatacaagacttctgattgaggcggagaatatcgtgaattcgcgtccgcatactcatttgcctgtggatgcgggctatgagtcgccgttgaagatgacgcctggtttggatgcggagctgcccaaggagggttctacgagagagcagtggagaaaggaggtgggtcctgaagtatctggctacgcttgttcgcctcaagaagtggaggcaaagaacggagcccatccaccagggcgatgcgatcctgccttggtgcaagggcatcgtggaggagatctacagcagagcagattgagttgtcagacgcgctaa

SEQ ID NO: 21924 - protein, 108 aa, DROSOPHILA
MIQYVNTRLLIEAENIVNSRPHTHLPVDAGYESPLKMTPGLDAELPKEGSTREQWRKEVGPEVSGYACSPQEVEAKNGAHPPGRCDPALVQGHRGGDLQQSRLSCQTR

SEQ ID NO: 21925 - DNA, 2489 bp, DROSOPHILA
cataataggatactgcgccccataccatgacaccttcaacccgactgtgtgggcggtccaaaatgtggtcctctttacgcaaatcatgatagtaatgactatagccggctggtccctccagattaaatttcttctcgtccgaaaatacgacataatgccactccttagaccaggtcatatgagctcgagcaaaactaaggttttttttttttttttgttagttcgttgtgctttaaatgtttagctttctaagtcacccttggaatcgtcgatttgctcgcgcttataccacttttttctcgaattttggcggaggagtcgtgggaattggaagcaattcgaagtatggacctgcaatctgccgcggtaacgacacggttattgccacaattatagttttttctataagattccttgtttttaataaaattttgttgtcctacctttcaaattatggacgatattcaaaactgggggcgctaatctgatgatgcaaaacacgtgttcaattttgcgccaaagttaacacaaagcagaataaaagagataactgttcttctctcaacctcttttttattctcaaagagagagggaatatcagtgaacaaaaaacaataacattgatagattttcgtgcaatggaaaatacagatcataagatgaaacggtggcatacagggaggcgctaatctgatgacgcgcagtgtacgtgtactagtcaaaggaacacaggacacgatttcaatgcttaacatatctatcgtggactaaaattacactaaattaagttgtgtctgagaatttacatacacaccctaatttcaaacgggaggaaatgctatagtcgagttacacagctagagacacaaaaatctatagatattgggtatttgcccgattcagcacgtaacgatcaaatggcaagcgactttgctgttgaattgtattttgctagttacgtttctgtacatagtttacggaaaatcatcgtgttgatgtgctacttccacttgttctctcggtagcaccatttggacgctagtccagttattgggttcatttgcagctggatgatgcgccgcaattgggccgactggcgctcatcgttaaacgtatccggcagttttccatagagaacggtcttcatagttatcgatatcgcgattccgattgacacaagccacaaagcgacgcccagacacatcttccattcgggtgtaatgtgctggaattctgcatatgtttggcagaagctatatcggtataattgcttcttttcatccagcgacagcttcttccagtcgtccaactccttttcacgtagggcacacaactctgggctaacctcccgatatcgaatagccggaaaagggcagtccggactatcgaagtatatgggtcgcccattgattccatgaccaacgacctggcgatcggcgaccataagtcgaataccatctcctccactggcaaaccgacgcctcgtcatctggaaaagtttcctcaatttcatacagggaaataagctcatttcgacggcagtgtacctgtaattatgcgcaagcacttggtcgtaactgtaccttgagtgtattttattttatactcgcttttcaattttttgttttttacttcatccggaaattcgacagttgtgttgctcgtgtcgaatgaaaatgaaatttctctagtctgtttgttgaatacaaaaaaaaatatgacagtttccttatctacaaactagatgtactttttaagttctgaattgcactcttcgttgagcactaagatagtctgaaaattttacttcttcttaaaaattgtttaaggcgtggcaaaaattatgaagatcaaattttttgtcacaaaaaaaaaaacaaacatttttaaaaatggctgtcatgtcagctcaaagaagctgggttcggaaaaatcgaatttttgaaatctagaactgtttgcccaataattattttttttgcccacgtccagttttcaatatctgaaattttgataaagtttaagaatcaactagttgacttttttcaaaaatttttaaatcgcaataacattgttggcccacccttaagaattttaaaaaaagctatactttagaaaatataagacattaaagacaatctcgctctacttagagaatgaagcatttgccaatctcttaaaagtaaatatcatgaaaaaaaaaaacacaaaaataaaacaattccgaaaacaaaaattttaaaaactttccaaataattatttaataattaaatttgtaatttgtgaaaaattgtcgagctattctttagatatttcctatttttacggttttttccccaaattgcctcttcgaagccgaaatcaaaatcaatccgtccctcagtgttaattggcaggttatcatctatattggcacgaaccagagtggctgcaagggccacgagagctatggccagcgaaaagcgacactcatccagtggcagagtaa

SEQ ID NO: 21926 - DNA, 489 bp, DROSOPHILA
atgacgaggcgtcggtttgccagtggaggagatggtattcgacttatggtcgccgatcgccaggtcgttggtcatggaatcaatgggcgacccatatacttcgatagtccggactgcccttttccggctattcgatatcgggaggttagcccagagttgtgtgccctacgtgaaaaggagttggacgactggaagaagctgtcgctggatgaaaagaagcaattataccgatatagcttctgccaaacatatgcagaattccagcacattacacccgaatggaagatgtgtctgggcgtcgctttgtggcttgtgtcaatcggaatcgcgatatcgataactatgaagaccgttctctatggaaaactgccggatacgtttaacgatgagcgccagtcggcccaattgcggcgcatcatccagctgcaaatgaacccaataactggactagcgtccaaatggtgctaccgagagaacaagtggaagtag

SEQ ID NO: 21927 - protein, 162 aa, DROSOPHILA
MTRRRFASGGDGIRLMVADRQVVGHGINGRPIYFDSPDCPFPAIRYREVSPELCALREKELDDWKKLSLDEKKQLYRYSFCQTYAEFQHITPEWKMCLGVALWLVSIGIAISITMKTVLYGKLPDTFNDERQSAQLRRIIQLQMNPITGLASKWCYRENKWK

SEQ ID NO: 21928 - DNA, 12482 bp, DROSOPHILA
ctagtctttccgttttgaagttcttaattttggccacaaaaaggtatcatttagcctatagtgcagaggtgtaggtctttacaaaaaaaataagagcttacttgctcacccagctgatatgcgatatgcatatgaatatgcaatataaaaagaaagctgaggtgccacagactaattgtgtctccaatgttggcaataattgaagacataattttaggtgctgctggagggtgcgagacccgacaatgagtatttttgtcttcaatgtgcctgcgccatgtgagtcttatgtcgaggaggttacaccttaagcccaaataaatattcatattaaataaaaagctataatcgatattcatatgattaaattcattttcattgtatataaaaaataagtcgatttccccaactatcagatactcgttactcagctagtgtgaatgcgaacgcgaaatttaataatttcataatcggggatatcgatagatattggggaataaaatgagaaaaaatttgataattgttcaatagtgtgggcgtgaccaaattggcggctttagggcgttaacgcgtgacaaaaagttttttggcaaattgatggaaatttacacgagtaatacaattatgaaaaaatttcgaaaatagttcaaaaatgtgggcatggcagttttgggcaatttgagaaagttaaagcgtggcagcatggatcaacaaacttgctctgcgtccttgtctctagaatctgtatgctaaaactcatccttctagcttttatagttcctgatgtctcggcggtaataaaataataagacagacggacatggcgagatcgactcggctattgatccttattaagaatatatatactttacatggtcggaaatgctttattcttcctgttacatacttttcaacgaatctacaatagtatacaatagtatagaaactgcctattaaaaaatcgaatatttctagtaaaaaattttggaattttgaatacttacgctcccaatactgtgtagtattccaacgtaaaatgatagtagcaaattctcggaggctcgccttcgcgacaagcgcgtgcacattcatcaggagcagatagcgcaggattgcgccgcagctcggcagttgcactagtagagaaatctaagtggcggaatggagattttgggttgggttccacgacggttcctgtgatcttattagctggataacgtgcagaggtcggtagactcccgcgtgagtttaggtaaccgcttccagcggttagggctggcttagtaccagctaggattgaggatggagctccagacccaaggctattgccatttaatggagcgggcccagagtggcttccacctatagacgggtgagtctgcacaaggccgtgtgttgccgaaaaaaatggtgaatcgaatggagttgaactactaggagtggccacatgttgctgccagaaggaccccattggtgtaagatctggttgattttctgcataaaataaaaaaaatatatataacaataaaacttagtctcgatttagcttattattatacccataaatcgtacagtaaaaaggtatactagattcgttgaaaaataggtaacatgtagaaggaagcggtataaagtatatatattcttgatcaggatcaaagcctagtcgatgtaaccctgtcctcgcctactctaacgccctaaaaccgtccaaaactgtcacgcccacgtgtttaaaattttgttgtattttttcataattttataagtcttgtaaatttctagcgatttgccaaaaaactttttgccacgccctaaacccgcccaaaatttatttatttaaatttattccccaatatctatcgatatccgagaaaactgataaaattttgggttcgcattccccctagataagtaatgggtatcagatagtcgggaaactatactatacgactatagcattctctcttgttttttctttttgtagcttactggcttcgcaacagaatttaatgtttttgaagtcgttattacagagaccaaataaaagtcgacaaagatcaatgacttgagagcaccggaactcagtcatttctcaatgaaattttcaatgttattaaattatactaggatacagtaggatattagcaaggttgtataagccgattagtttaagcttgtgtatcagtagttcataaccaaaagaatcaaaggctttcctgcagtcaaaccactttgcattgataattggaagcctaggctcataaaggttaaccagggggattataagaaagccgtgctagcaaagatgaacaatggatttaaactggtagctgatcaatgattaattttcagcctcggaatggtactgagcttacttttgttacgataactgttaatatctgacaatttatgacatgatatgcagtaaaaatttaaaggattctttctcggtggcaaaaaaccttcattgctcaatgaataacaatgtaaattgaactgttagactgaactgataacgggaccacgtaaggataccttaatttcacggaggctttcaaaacgttacatccggctataaggaacagattacagcattattatatgctgagtatgtaggggggcaatcgaggacttaacagaagctactggaacacatttaacttacagccagtataggatgtgatcgacatcattgctgctaagcaaagatttatggagatttggaaatttgtgcagatttgaagagtagtttgattaaaatcctccggaacggatcatcaagtagagcgtgtgtttcatgcaatatataaatctaatatgaaaacgaagtccaattacatctaacatttactgtgggtcccgagtgatcagtcgataagaccattcactaaatcattttgttttgctcgatacaagtgatccagaaaaaaagtgaaagattaaagtcgcgtaatagtatcaccagtgaatgcggagctaaggtggatggcaaagaaatgcttgcgaaagatgaatgagtagagcatgaagagcgaagcgcgcaaacaattttcgaatagaaatgcatatttttaaggatggtgactcaatgaccataacggagttttttaaacagcaggaaaaaagactttaaacgcctaaaaattccttttaactttaatggtattatggtattattgggtctttaaagtgaactattctgttatgaaaagagtttacaacggttgatcaacgtcacgtttgaagcacctagaatacaaattgattgaaaagttgtatttaaagcggtgacatcattatctatgatctgcgaagagtccatcggcattatataattgagtttagcttttcggtaagcgatcgatgcgacgccaatatgcaattccaactttactaactttactttgacaaaagcattcaacactacaaatagcagaacattcccaaagcgcacggctgttatgactgtcgcaggacactaaccaaggacttcttatgtagcacccttactgtatggatttcgacgatctctgatctctgtgatctctcgattcgcgtggtttcgatttcacttcttgttcactctcgatgactgttttcgcactctaataaatttttcaagttagcctcgcgtacgccattggacttcgttccgacagtctggcagcacgcaccgtcctatacttgagctgcgtttgatcgactaccccataacaaacatactccaacatataggaaagtttcatgctatattatagaccacatacagtcagaagttaaaaaatagaagcgttgtaaaaagcaaagcaaagacaaaaataacggaaaaatcgagttcgttctaagaaaaagaacaaaaaaatgtaggaaaacaaaatgtgtagagtttcttgacagtctcaaaagtgtgtaaacttggaatttgttgtgtattttcttgtataattaatattttttaaatattttttttatttataagtaaaataaatattgtttaattatattttatgaaaaaattgcgttcaattaagcaaagaacccttaatttttacctttaaagtcaaaaattcaacttatttcacagcgtgtaaacagtttcttgacaaactgtatatagctgtatatggtcgcaaagaatttgcgggatgccaaactttgaccgttactttgctgtgcacgtatcgcttgtaaataccgaaattattagctttataaggtttttttgttaagatttgttaatatggttacatattaatgtaatatcccatgcttaaaacaaaaaatttcggaagggtcgttactccaacgtagtaaataattgacatcagaatatacgagaaataaggattacagatcgacttacttaaagttttatttttgaaactctgctgaagattgctataacatgtgtaggcaaagaaacaataatattttgccaagttttatatcttttgaatacagattttatgttatatgtacatatttctcttcgcatctagtattggaattgtaaagacaaaagcttcatttaaagcaactcgtcgttatgtaaaactaaccagaaacgtacatagcgaaaaaccaatttcgccagcttggaactataaactatgtgtaagttaacacaatcacaaaacacccgaaatatagtcgtaagcctcaagtgcttttcccatctatagatcgagctttacctataagaaactgtaacttgttaagctttagagataagaactcttgctatacttaagtcagtcgattttggaagattagaagcgtcggtcatcgccacgtacttactattcgtctcattaagtgcagaccgcgcaagccctattgtaattaataaacttacgctaataaatatatggaaaatctactaaaatgataattggcgcccaaacggatataaaaacctacgataactgaataattataaataaataacaaaaggaggatccggagacaaaaccagcggctttggctaattaactctaacctaagaaataaaagtttcgtgattacataaagtataatattaattactaagaccatctaccttaaaattgtttgttaatcactattattatattgtaagtataacggcttgttgaacgaattggaaatattattattattattatattataacctatgcaaagagtattgataataaaaatacatgagtgacagtgataaccttttggacaacctagtgtcaagcttaaataaatggtcagcgcaccaggcaagtaggcaaaacagtgcagaaaaaaataataggtcatcagataattggtggtcaaaaacaaagacaactagcgaaatggaatttgaagctcagttaaaagcgatcgtagagagtgctgttgccggtgcgctcgcagtccaaaaacaatcatttgaaaagcaattgcaggagatgaatgagcgaatcgggaaattaacagtgaacaccccagaggtggaaacttatgtagatgctgaaattagaccaggtgttgtctgtagcgagcctctagatataattaaatctctgccagattttgatggcaaaagtgaaacatatgtgtcgtggagaaaagcggctcatgtcgcttttaaagttttcaaagattacgagggaagttcaacattttaccaagctcttggtattatgcgaaataaaataaaaggtccagcgaatacagtattggcttcttttaaaaaacagctaagaagagaaaatgtaacaagacgagacagaacctttgaggtgggagaaaccgtcatggtaaaacaaaacaatcgcttgggaaataaactaaccccacggtatagggaagaactaatcgaagcagacctcgggacaacggtcctcataaaagggagggtcgttcataaagataatctacgctagggtttagtatttcttttccttttgtgaccatcgccaagttagcaaaatacaaacgtgaaatctgaacactagtaaaagagtttgcaaacatttttcaattaaatatttgtcaaatccttcttatttaatctttaaacattttgtattatttccgcttcatcctctttagaaaattttaaaggtatgtgatgaaatgctagacccgaatgatttgaaaacttaaagtccacgcaaccacaaatatttcctgaaactaccatagaaaataaatgcattaccaaaacggcataataacagtatagcgcactcactctaattagatttcaaattcccgattaaaaaaaaaaaataaaacactaatgttatcaataccctttcctgattctgttcaactaaataggaaaatcaatacttgcaatcaataagcgttttactacatactttaatatcaaaaatatctgaatgaactttattataaaattataattgttatacttaattattgtcaaaactttagtattaaaactgtaactacctcttaagtagatgagaagagtagaagagggaattaagatctatcaacgtagtatctgctaaagacgtaaagatgcggcaactatttctgcgcctgggtactgaaacgacgaactgaataatatctgccatcagacgccaaccagagtgcgttcaacacatacgttttgatggtcaactagttcaaccaacatcagcatcatcgtcgtcaacaagtcgacggttacaataaagattttttccaagttcgctacgatcatctccagaaccttgttgcgaacccatgacatggagaatcagcagcatttacgaacttctcggatcatccagacacgcagagctgccttcccttcgatggtttaacgcagtaccaggttggcagtatgggaacttagtgcacaaccaatgttacccgtaagatccgctttcaaatagatttgccaattgtaaaaagtctgtggacagccttcgtcttagaaggggaggagttaacacaatcacaaaacacccgaaatatagtcgtaagcctcaagtgcttttcccatctatagatcgagctttacctataagaaactgtaacttgttaagctttagagataagaactcttgctatacttaagtcagtcgattttggaagattagaagcgtcggtcatcgccacgtacttactattcgtctcattaagtgcagaccgcgcaagccctattgtaattaataaacttacgctaataaatatatggaaaatctactaaaatgataatttgtacatacatttgtatgtatgtatgcactttttaatcaatcgttttcaatactctcctgtttatctcttaactttttctgatcttggaatcccattaaagtgaagagtttgaaataaacatatgtacatgttccaaacgcaagattaacttttctagcttagctttttgtttgattattctcgcttaaaaagaccacaagcaacaaaattattagctttttgtctgttgtcgtcgactagtttttctgttccatttcgttgggctccaaagacagcttcatacatagtataaacatttcacacagttaaatatttttgcacacatacatatatgaattacagacacagttttaaagtaaaccagaaaactggctcctcaacttagtcttgttttgtgagttattttgtgttgtatttggtccgcaatttctagccgtaatagacttaaaaatcaatgggaaatctacatacaactatacatgcaaccatatttaaaataaatttataaatatattttgataattttatggtaataaaattacgcacattgtttgtaaatttgcttaaatattatcttaagattgatgataaatttgttaattaactgaactgaaaatactttagaaagacatattttctgattttcgaaatatttacgatataaacaagatatagagtttgtgtaattcacaatttacaaaacggtcctagcacccaatattgttaatatagcctatctataatatggtaatttttaaataattcacatattactctatttatttatatttctcgaaaggggtgatatcaaagacatcagaataattattctagtgtctttggtgatatggtcgtttttaaaaatggatatggatggatatatggaacggtttagagaaggtaaaagggtatactgcggaaatagaacttgcatttctaaaaactctttaatagggttcataaaaatgtgtcactctacattgtgagatccatttgaaattatttatacaatttattttgtacgctagtgtaatcaattacgttatttcgaaacatttgcactaacggacatacatatttatatagtatacatacgtacattcatatgtttgtaggtatgtatatattgggactgtataaatgcaatcggaaaccagtcccacattccgtacgtgtcacatatgtatgttactctgttagtttgtattcatggaaatagagagatgactagcatgggtttacctaacaactttatcatattttcagcaacgataacattacaaaaaaaatgtgttgattaaaaaaagcatttctgttttgcaagttaaagtttagtaatgtaataccattgtattgtctttaacattgaataaatatgtttgggtgcccgtacatacatacacaaattttcagtttgaagtcaccttgaatcagttataatttaaggctgcaccatttaataccccttgcagaccggttttaagcttaataaatttgtattttgatgttgcattcatttcaaataaaacatttgtatttattggttaaggaccacttagaaaaatgttaattaaggaagataccaaattatactataatttatgtatattcaaatcatatctgcacatacttgaatgatcaaaaaacgagtacatcaactatcaaatacccgtttatccgttagaaaatttcgaaataataacgtatgcatgtattcctaaaatatcacaaccagcttctagatatgtcgcgtatgtcaacaagtcctttggtcagctatgagagagagcgaggcgcaaatggatggcggacattgttcttcaaagtaacttaagaaacttaaaggcgcgaccaccagctaggttaatttttgtcgaccataccacaaataattaagagtattagtaagtgtaacgtaggcaaataaagatataaatgacagaaaaataatttataaaaagtaaaaaccgcattaaatataatatatttatataaacataaactgcaaacaatgagttttaatgacgtagtctaaggctagactttccctttcacccttttcaacaaatcacaagcctaactccaagtgtaatgcacaaaatcattgtgatcacctcatttcaatcatatacaatacaatacatatacaataaattgaactggcttttcattttaggaagttatgtacatgtatttttgaaaaagggtcaaaaattcgatcaccttcctgagtttcatttttgacatattattgctaaaattggatttcaacacttaaaacgtgtgtttgattaatgacataaatcgctaacacagcttctaaaagatgtgtagattaaaattcaaaacaaaatttcgattgaaagcgaaaaaacttttttcaagtgcgtttcggatatctctttttttatctggtgtgtattctaaatcgaaaagcaatgaagcatagattatttttgtgaattaataaaaattacaatcggttacaaaaaactatggaatagtttttaagagatcataccaaaaaatgatggaaatgacgacctccgaattgaaaacaggagtcaactttcatgacaaacgtacataaatctgcgaatattattatccgaacatacatacatatctgctgatattattttccatgaaaattgcaaaaaaaaaatttttaagactcactcaaaatagttatacactattcttaaagtctaaaaattcttacttttctttctcagctaaaaaatttacaaataacttttactaaatggtctgacaaaagaaatcactagtatttatctaatatatctttatttatgttggttgttaaattcttttagttacatgcatatgtacatatgtagtaagttagaaactattagcaaagatcttaatatgtttttttaatgctttccaatttaagaccgaagtaaataaatcctgttgttttactttaatcttacagagttttcttattatcggggtttcaacgatttaaaagtttgaagcttgttgaagtgttcgcactttcgtaatttgtagggagtagcatgctaacatctgacaaggtcagcgattcagcaattaaaaagttgaagaaataccattatcagtaaaattaaaaaagtataacattattgcgcaaagtaagtggtaggctaaaccagtgtaagcttatgaaggctaaatattttgatttctttataaatttgttaactttaatatatattgatgaaaaaggcaatttaaataaaaaaagttttaataaataacaaaaataatgtcagatacaagcaaaattttgtggtataagaaatatagaaaagagcgattaatattgtagtttgtttgtttcgaaaattttacctaaagtgtaggcaattttccattccagcccgtcgtatgggaaaattttagaaagtacgtttatctatctacattgggtccaatatggccagttccctaaatctgtagacttgcactgctctttctcctaaaccattcaatttttctttagtttgaatatttattccctttcactttatttgcacatacatatgtatttaattgtgtataattttactattctacttcgtatgggttgaataggtaaagacggtatttaagttttaaaatgttttgatccatataatatatggttggccaaataatcaacctataattctaatatatatattcttatgaaaacgataacggaaagcaagtgtggcaaaacaacgttttgtcctgcaaaacattccaattaatttacagtaaagatacccaaaagatcccccaaatctttggaacaccccttggaaatatagtcatgtttagatgtatacgagtatatacgtattgcacttaaataatcattttaatgaaaggaatatgtactgtcgacaaatcacaaaatgatatttcaagacttcttaggtgaaaaaaattaccaagatgggatttccttacctttcttaggttgattttgctgtgagttggcaacacgtactgcaaatacttcaggaaaattggaaaatgcaccccatatcaggaacgaaataaaagtttggtaaaatccgttaagatccatggctttcatagttgtatgaatggcgtataattttatttttcactattcttcttgtatttttattaattcctttaagctatttaacaatactttgggtggatgttcacaacataagactatatatttttaaagtatgtgtactaagcaatagcaacaccacctgaattgattacggcttaatgaagtacgagcaacgcgtttaagcaccaaactgaagcggtagctacatacgtacgactatataaaatgtttaagtagaaaagttactgcaaaacgagcttacgaatgagccagggaaaggaatggctcagtgaatcatgacatggctcagagagcgcaagaaattgcagcagccaacttgatcacgatctcagagcaagttggtcgagtctagagctgccgcaacctcacaaaagctttaccaaagcatagaaaaagaaaatgaaacgaaatataacggatctttattgtattgttgttgcctaaatcatatgaagggaatgttttaaagttcagacaaatagatctcaaataaatgaatactaaagtgctgtgctgagatttttgcatgtagcttttacttttacttattaaaggtttacatatgtatagggcaccttcaaaaagtcagcacatatatgcaaattcttaaacacgttataatatacttgtttaaagtattactactattataaacaaatgacatgtgtacaaaaatcaattgaaaagaattgacgaaactaagaggtatgcaacacatgactacaaacataaaatgctaaataaaatagcgcaccgaaagtgtaaatataaatacatacgtagaatattaaagctagttagtcgttggagatgaatgcatgtttcatttttttttataaaaagaataagaacaatttatgatcaaatacaacaaaattataattttctctgtaatatttttaaataattgatacagtggatgcttatcaaataagaaccaaaaacatatgttatcaaaaagtgttttaaagtgaataacggcactttaaaattataaacaagaaatggaacatattttgttatgttttgttttgattattccaatggttatatcgttttcgttccgacttccaaagtatataattaataggtaagaatgtatatgtataaaatagaagaggaagcacatagatttataattatacataatatac

SEQ ID NO: 21929 - DNA, 811 bp, DROSOPHILA
cgttgctcgtacttcattaagccgtaatcaattcaggtggtgttgctattgcttagtacacatactttaaaaatatatagtcttatgttgtgaacatccacccaaagtattgttaaatagcttaaaggaattaataaaaatacaagaagaatagtgaaaaataaaattatacgccattcatacaactatgaaagccatggatcttaacggattttaccaaacttttatttcgttcctgatatggggtgcattttccaattttcctgaagtatttgcagtacgtgttgccaactcacagcaaaatcaacctaagaaagaaaatcaaccagatcttacaccaatggggtccttctggcagcaacatgtggccactcctagtagttcaactccattcgattcaccatttttttcggcaacacacggccttgtgcagactcacccgtctataggtggaagccactctgggcccgctccattaaatggcaatagccttgggtctggagctccatcctcaatcctagctggtactaagccagccctaaccgctggaagcggttacctaaactcacgcgggagtctaccgacctctgcacgttatccagctaataagatcacaggaaccgtcgtggaacccaacccaaaatctccattccgccacttagatttctctactagtgcaactgccgagctgcggcgcaatcctgcgctatctgctcctgatgaatgtgcacgcgcttgtcgcgaaggcgagcctccgagaatttgctactatcattttacgttggaatactacacagtattgggagcgtaa

SEQ ID NO: 21930 - protein, 207 aa, DROSOPHILA
MKAMDLNGFYQTFISFLIWGAFSNFPEVFAVRVANSQQNQPKKENQPDLTPMGSFWQQHVATPSSSTPFDSPFFSATHGLVQTHPSIGGSHSGPAPLNGNSLGSGAPSSILAGTKPALTAGSGYLNSRGSLPTSARYPANKITGTVVEPNPKSPFRHLDFSTSATAELRRNPALSAPDECARACREGEPPRICYYHFTLEYYTVLGA

SEQ ID NO: 21931 - DNA, 3352 bp, DROSOPHILA
catccattagacgacgtccagtggtgtcgatatccacgcccaccaggatataattaccggccggcagctcaactttatcgcccacgggcgacgaggattgatcggcgacggcaatggccactccggcatcgatgttatcggcaaccattttcttatatgatctgcgaaaagcaatctagaaaattcggataacgaaattagctgagtcactagaattttttttttttaaggaaccgatttcctttgcaaaacgcgaaccgctttcactagattttcgatatgaagtgacgggctacgaattttcaagagtctattaaacccaaagctacaactaacggttttcttccagtggcgccatcttttacacagatgtttttatgtgtatgtatgtatgttcactttcaccacactttagcacttttcttttgggctcacctttattgaactcctttttcgtgttggtttcgatgggctctttcgctttttacgaactttttcctttatttttcaaaaggttaaagcgaaatttgcttctgttcgacgagctttcacaaataagaaacaattcgtacgactaactaaaacgtaatgaataatttcctgatgcacccgacggcctaggaaaagtgcgcgaatttgacatatgcaaagcctgctaatcgaggtttttgacttaagtacgatgggttagacagctgcaactcgtccacatcttgccacaacgcccactgtgcaggtgaaaactttttgcagaatatttttaccgctgctataataaaatatagtctttcagcttgtaaataaatttttttccaattattagccggcaaaattggtgggtaaacaacaaatatttggacaaaagcgcagacaagaactgataagaggatcagggatgacgaatttcaaatggttgcgccagagatgacagggtatcgatatcactatcgatagacttatcgaagacggcttagcacttatacctactctgcagccctggtcggcagaaaaacaataatcagctgatgccatcgcttatttccaacaatttgcaccgcaaaagtgaagaattaccaagcaaatagatcgcctgccgaccgaattatgctgctgtaatcacccaagcacacaacggtaaagataaaaccaggcgagataacaccacgcacaggtgccacaacatgctgtcctacataaagcgcaagctctccgaatccgacagcggcgtcagttcggtcgcaactgtgacgtcgtcgtgcggcggcgatagtgggagagcgggcggaacgggcagcagtgaaagcggtacgggcagcagcagcgccagtatcagcggacgcagccagaacgccgacgagttagtgcgcaaaacgagccagatgtcgatggatgatgaggccattgccttcggggaggacgcactgctccatgaactgggctacaagaatcagacggaactgcaggaaaccatctacggttcgatatttaatggcattctttttcactttggcctagttatgtaatttctcttgtcgttacacagatctgttgcgcggcattcgcgatcccgagaagccgtgcactttggaggacctcaacgttgtctacgaggatggaatctttgtgatgccgcccacgcgctccaatgtctcagttgtacgttactcaatatctttataagccataagcttgagccctaatcatcatttcatcataagttaaatctgcgcgtgtgtttatttgctttcatcactattgttgcttaatatttgaaaggattaacgatttagcttcaaaatgactttaaaattgatctcatagcttaaagtacttgtattatactaaatccacacctcataaatcttttgtgtagtaaaaagttgaaatgcatggtatttgtctcttaattctttcaggttcgcatcgagtttaaccccacagtgccacattgctcgttggccacgcttattggactctgtatacgcgtgaaagtagaacgcggacttccgcacaacataaagctagacatatacatcaagaagggagcgcatcaaaccgaggaagagagtaagttggaccaaccagatactattatcatacatatgtgttctaagtaaaaatgattacgtttccccagttaacaagcaaatcaatgacaaggagcgcatcgctgcggccatggagaaccccaatctgagggatttggtcgagaactgcatcaaggatgaggagtagctctctttgccatatcttttgtacatagggaatactttgaggaatgtctaggattaagtgtaccattaagttgcatcagggagtgtgtgcttagcattaaagcccttaaaatctgttaatcgctcggccgttttgattccaccagaatatcgattgctcaacgtcctatctattttcccgcctatgctgcttactgataaggtcccccgggcccaacaactctcattgtttacattgtgccgaagcgatatggccgtcggacattcggcccaagaaaaccgtgtgcacatcggtgtcatggcgggtgaatgaatctgaatcgcaatcgtatcgatgggccggccatgttgggcaccagccagacggcgtgtacgtcacacggatttatcagcttcagaagagtagagaatgtttggggcgtaacgcagggtaatcacctgccgttggcgctgttaagttgagtgcatgacacacattcgactcaactcgactcggctaatttctttgcaactctccggtttcagtgagcactttgttgccatgactgtcgctgtttctgctccaatttgcatttccggggttttccatttgttaaattgcactgcacttccgctcatttcgctcttactgctccccccaccaaagtggcaagccataaatattaagcaatatcaattagttgcttgccatcgcgctcaaaatgctttaaactaatttccaaagacttaggcaaaaaacatccccaccagcaattaaaaccatctggcgctgcgaactttttgccatgacaccgctggccaatattcacggaatggaaaccggaccagagcagacccttcgtgcccctaaggcgtgccgcgtgcctcagaaggcgagggaaaaataataaaaatgaatgcgcagacaaaagcatattgcgaatattacgctaattggcgactgcaatcaaagcggacctcggcctggacacgtcggccgaaaggaataggagtggcagacactagcttctcccagccttccagcagccgtgtcgccagcctgaccatgaccgaagccatcggagaagcttgtgccccccagctccaccacgcggttttcaggtgaacagtaattggag

SEQ ID NO: 21932 - DNA, 955 bp, DROSOPHILA
tcggcagaaaaacaataatcagctgatgccatcgcttatttccaacaatttgcaccgcaaaagtgaagaattaccaagcaaatagatcgcctgccgaccgaattatgctgctgtaatcacccaagcacacaacggtaaagataaaaccaggcgagataacaccacgcacaggtgccacaacatgctgtcctacataaagcgcaagctctccgaatccgacagcggcgtcagttcggtcgcaactgtgacgtcgtcgtgcggcggcgatagtgggagagcgggcggaacgggcagcagtgaaagcggtacgggcagcagcagcgccagtatcagcggacgcagccagaacgccgacgagttagtgcgcaaaacgagccagatgtcgatggatgatgaggccattgccttcggggaggacgcactgctccatgaactgggctacaagaatcagacggaactgcaggaaaccatctacgatctgttgcgcggcattcgcgatcccgagaagccgtgcactttggaggacctcaacgttgtctacgaggatggaatctttgtgatgccgcccacgcgctccaatgtctcagttgttcgcatcgagtttaaccccacagtgccacattgctcgttggccacgcttattggactctgtatacgcgtgaaagtagaacgcggacttccgcacaacataaagctagacatatacatcaagaagggagcgcatcaaaccgaggaagagattaacaagcaaatcaatgacaaggagcgcatcgctgcggccatggagaaccccaatctgagggatttggtcgagaactgcatcaaggatgaggagtagctctctttgccatatcttttgtacatagggaatactttgaggaatgtctaggattaagtgtaccattaagttgcatcagggagtgtgtgcttagcattaaagcccttaaaatctgtt

SEQ ID NO: 21933 - protein, 218 aa, DROSOPHILA
MLSYIKRKLSESDSGVSSVATVTSSCGGDSGRAGGTGSSESGTGSSSASISGRSQNADELVRKTSQMSMDDEAIAFGEDALLHELGYKNQTELQETIYDLLRGIRDPEKPCTLEDLNVVYEDGIFVMPPTRSNVSVVRIEFNPTVPHCSLATLIGLCIRVKVERGLPHNIKLDIYIKKGAHQTEEEINKQINDKERIAAAMENPNLRDLVENCIKDEE

SEQ ID NO: 21934 - DNA, 6396 bp, DROSOPHILA
tgagggtgcttttaaggtctttattttaatatctcccttaaaatttctaaagtctaattacatcttacaggcgcgccaagctctatgagcaagaagacaagcccgacgaggctctggaggactacaaaaaagttactgagatcgatcccggtcagcaggaggctcgcgaggctcagattcggctgccgccaattataaacgagcgcaacgagaagctcaaaaacgagatgatgtccagcttaaaggacctgggcaacatgatactcaaaccgttcggactgtctacacagaatttccaaatgcaacaggatcccaacacgggctcgtattccatcaactttaaataaaaacctagctagctaatgctctgcagatcaacaaataaagccgtattcgtggatgatgtgtaaaataatagtcaaactgtagcaaaacgtatcaaattcagttctcgtacattttcacctctgtagaatatgcaaatgtgaacccattttcataacaaacggtaccaaaaaaatccattaattatatttaatgtaaaatgcatggtgtgatatgctattaatatatgaggtttgttccaaattttactgtctggttttacaaaattcaaacggttcttttgagaggtttttaaaagtcgtgaaccagtcgcagttctcatgcaatcacaacaaaatagccacttgtcatctctgttacttcgataccgataaccataaatatgggcggaagcaacagctgactgtgacacttgtgttccccgtgaagaagaagagcaatttgttggaaaaaatcgccattcgcaaattacaatattagattcgtgcaatcgcaggcattaggtgcccccttattgtgggccaacccagtggcgtgaccgtgagcagtagtgcatgcaaagatccaagagaacagcgctcccgcactcctccttaccctgatatgagagcagtcaggcggatcgtggccagttgattccatcctagttgccaacatgttccggagtcgcagctggtttggcggaccctggggtgggcggcccaaaaaccgcttgtcgctggagcaccttaagtacctgtacagcattctggagaagaacaccaccgtgtcggaaagtaatcgtggcctgctggtggagtcgctgcgctgcatcgcagagatcctgatttggggcgaccagcatgactcgctggtgtttgagtgagtattaagcatctcaatgtaataaaccttaatctaattatttgcaacagcttcttcttggagaagaatatgctatcgtatttcctgcacataatgcgacaaaagagtggaggctcgagtttcgtctgcgtgcagctccttcagactctcaacatcctctttgagaacatacgcaacgagacgtccctgtgtaagtacaattttcaacagtttctataatacagtagacgtaatcattcctatgacgttgcagattatctgttgagcaacaaccatgtaaattctatcatggtgcacaagtttgacttctccgacgaggatgtgatgggctattatatactttttttaaagacgctaagtctaaagttaaacactcacacaatacacttcttttacaatgaggtttgcattgcctaaaacacatatttacatccatttaatgtgacatattccttacagcacacaaatgactttcccttgtatacagaggctattaagttctttaatcatcccgagtcaatggtgagaattgcagtgcgcaccatttccttaaatgtctacaaggttcaaaatccaagcatgttgcgttttattcgagacaagtacgacctttgccttcagtcccatgagctccattaaactatttttttctccctagaacggctgctccatatttcagtaatctggtctggtttatcggcaaacacattcttgaactagacacttgtgttcgcacagatatagagtaagagttattgtaatatagtccctcgttttatagtattgatttcttaattcatccgcagccatcaatcgaatcaaaagctgtccaatttggttgccgagcatctggatcatttgcattatttgagtgacattcttctactggaaatcaaggatctgaacgcggtgttaaccgagcacttgctgcataagctattcgtgcctctgtacatattctcacttacaccagctccgcccccgccctcactggcagtggttacccagaatctagctgctgtgcttaatcgcaatgtggacatcgacatacaggagatgcacaatccgcgagtgagctccatcgtggcccttttcctgctctcattggtcttcctggtggtttcgcatgcccctctggtgcacgctctggcctgggttatcctcaatggtgaccacagcgtttttaaggagggtgcagccgagattcttaattcatacgttgagcaccgcgaggtggttgtgcctggcttcggcgagcccgacgagagtctcgaacaggccttggatacagtcaccggtcagtccagctcgtccagctatgcccttagcgaggacagtggcgtggagtcctcatccccagccaccacagaactggactctcaagcagatgcggttgaagcggagcagattaaactgcgcaacataactgacgaggaaaagcagctgctgcagaagtcatcttcctcaacgaaggctgactttgctgagatggccaaaccgtttttagacacggtcctgcatgctttggactgcaccgaaaacgattaccttgccctgctgtcgctgtgcctcatatatgctatgtcgcacaatagaggtaatattcatggatatttcccttaactcaatttgacgttttttttggctaatgttgtgtaactttccattgctctgatcaccccatttttgcttcattctaattgctttctttgtgtgtaatgaaaatgtcacattctggtacatgtcccaatccgttcagatggtatgtaactcgtccactgcccgtactaatcaatcgtatgcatctatcatagtctccttaataaatatctttatgtacctttccatataggcatcaagaatgagtggttcgagcaggttcttgcaaaatcaacccgtggcgccttcagttataagacagccttgattgagcatctgttaaacatcatcacccagtccagtcagccatgtatgtacaactgttcgaactccggttatcattagctctttaataattccatttgaattccctaaagcgtcccgcattcggttgattaccgtggagattgccttggagttactggtcactttcacccgtcccagctcggatgattcgcgctgcataaccgccgcacaacaggatctgctcttcagcgcccgcaatcagtcgatggtggtgatccgtaacttctacaagtcggaggacatcttcctagacctgttcgaagacgaatacaacgagatgcgaaaggcgcaactgaacgtggaattcctgtgcatggactccaccattctactgcctcccacgggaacgccacttactggaatcaactttacgcgacgacttccctgcggggaggtggaaaaggcacgccgagccattcgcgtttacttcctgctgcgtcgcacgtgccaaaagtttttgaatgagaaggaatcgctattgccgcttacaaatgtagtcaatctggttcaggtggagaacgtactcgatctgagtaagtatactcctcctacgatgatgtatgtatatattaaggctaaccattatccatctagacaatagtgatctaatagcctgcaccgttgtggccaaggacagcagcaagcaaagacgctttctggtcattgacgcattgcagctaattctcgtcgagccggatgcaaagctgcttggctggggcgtggcaaagttcgttggctttctgcaggacgtagaggtgcagggtgataaggatgactcgcgctgcttgcacatcaccgtgcaccggggcggagtcactcacaaccgcactccgttgctctcggctaagttcctgttcgacgatcacatccgttgcatggctgccaagcagaggttgacaaagggtcgtagcaaggcgcgacaaaagaagatgtaccagattgcgcaactcatcgagattcctggacagatggactctcccgtctacgctgttggtggcacaatggtcgcatccagtagcggcggaagtggtaacagcagtggcagcagttcgcgcagtagtcaccaccgtcccatgttctccacggccaatcgagtgccgggatttgcagcggtgctgcgtggaagcaatagcgctggggttagtcgaacccagatggccccgaatcgatccatcgaagggtaagttcacgtcggtgtgtcctcatgttcctcatttccatcctcatctgtgcgtcttcccgcagaattagaaatgaaagcgctggccgctcccgacgccgcagtcccagctcaacttcgggctcgaatcttagggccgatcactcggatcgggagcgatcgcccagtgttagcatgggcagccacagctcctcgcagtctcgggaaaactcccagcccagaagtactggaaatcggtcgcgggagagcagccctagaatgcccaggccgcggtaacaatgaaacattttcgttagctctgtagtcttagaatggtttctgttataattgagatttgtaaagtattgcagtattctaaactagtctttctattttttttaattggattacgcccaagacatcaaaaagtttattttataatttatcgagctgtttacatgattctcgaaatttgctacatttttggctccttggccaaaaaaaaatctttaagattgactaagtttgcttgtaataccaccttgtataattatgtataaagatatcgtttgtcctatatttttatatttatttgcatattattttgacaaataaacaaagaatagcatgcctttaagccctccagttttatctgtcctcgttattctatgtgtttgttaattataaaatttactaattttcacctaatcgagttataaataaatgtgtaatattttttcattctaggtcggaggagattcctctcgaggacttccagcactcacggaacaacagtccgcactctcggggaaacccctcgcctgcctcccgctcacacacacccatccgcgtgctccactacgatcagctgtccggtcatagcggctcaccacgtgaagcgtccctggggggaactaacgccctgctaagccagttaaatgggctgaaccgtgaagtgctcccaacgcagagctccgaggagacttcttttattgggagcgacggaaacgaggccactggcggatcggagggcaggcgacggggggccatagagacggtttaagatagactagaagttttagtattacattggaagcagccttatgcttagattgttgctaaaattttgttattccagttgactaataaggtggtacatactctaattccttttcattttaaataaaaactaatttgacgaatttgagctcaagtctatatatatattagtaaagaagtatgttttttgaaccttcgataatggaagccacaaattattgttctaaaatgtgggtttcttatatttcgcatatgttcatttttataacaaggttttacttttaattttactgaattgtctatagacgccagtgctgttttgtagtcagttttcaagtaaatgttctataataatctttaaaataacggtcaatacaggtttaaaatttgaggaatgtccctattgtcggccttttgtgtgaatgccaactgcacttggaaatcagctgtcgcttgtttttgtttcgtgacataaccgcaatttactaaaacttagaaacttaacttaaattatttcatgaaaagcatagcaaactaatattaactatgtcccacaagtacacggagctgattaaggtcggcacgcagtatgctcgccggatgaactacctctcaaatcgcattttcggcgaagtggctcgcaccacaaacgagaagtccatgaaggtatgttctcgaaataaatttattaattaaaatgtaaacatgttttatccgaccttccccaggtggttcgcatgttctcggaggaaccaattcacaaacgggactacgtgatcaactggtatccgcggcacgtggagacgcacttgctgatgaagaaccttcgcgactacggactgttccgcgatgagcaccaggacttcaaggaggagatgaagcgtctgcgcaagctgcgcggcaaggcgcctcccaagaagggcgagggcaagcgggcctcaaagaagtagtaaaataaatattctaacatccacttttattgaaccaaagctagtctttttagt

SEQ ID NO: 21935 - DNA, 3123 bp, DROSOPHILA
atgttccggagtcgcagctggtttggcggaccctggggtgggcggcccaaaaaccgcttgtcgctggagcaccttaagtacctgtacagcattctggagaagaacaccaccgtgtcggaaagtaatcgtggcctgctggtggagtcgctgcgctgcatcgcagagatcctgatttggggcgaccagcatgactcgctggtgtttgacttcttcttggagaagaatatgctatcgtatttcctgcacataatgcgacaaaagagtggaggctcgagtttcgtctgcgtgcagctccttcagactctcaacatcctctttgagaacatacgcaacgagacgtccctgtattatctgttgagcaacaaccatgtaaattctatcatggtgcacaagtttgacttctccgacgaggatcacacaaatgactttcccttgtatacagaggctattaagttctttaatcatcccgagtcaatggtgagaattgcagtgcgcaccatttccttaaatgtctacaaggttcaaaatccaagcatgttgcgttttattcgagacaaaacggctgctccatatttcagtaatctggtctggtttatcggcaaacacattcttgaactagacacttgtgttcgcacagatatagaccatcaatcgaatcaaaagctgtccaatttggttgccgagcatctggatcatttgcattatttgagtgacattcttctactggaaatcaaggatctgaacgcggtgttaaccgagcacttgctgcataagctattcgtgcctctgtacatattctcacttacaccagctccgcccccgccctcactggcagtggttacccagaatctagctgctgtgcttaatcgcaatgtggacatcgacatacaggagatgcacaatccgcgagtgagctccatcgtggcccttttcctgctctcattggtcttcctggtggtttcgcatgcccctctggtgcacgctctggcctgggttatcctcaatggtgaccacagcgtttttaaggagggtgcagccgagattcttaattcatacgttgagcaccgcgaggtggttgtgcctggcttcggcgagcccgacgagagtctcgaacaggccttggatacagtcaccggtcagtccagctcgtccagctatgcccttagcgaggacagtggcgtggagtcctcatccccagccaccacagaactggactctcaagcagatgcggttgaagcggagcagattaaactgcgcaacataactgacgaggaaaagcagctgctgcagaagtcatcttcctcaacgaaggctgactttgctgagatggccaaaccgtttttagacacggtcctgcatgctttggactgcaccgaaaacgattaccttgccctgctgtcgctgtgcctcatatatgctatgtcgcacaatagaggcatcaagaatgagtggttcgagcaggttcttgcaaaatcaacccgtggcgccttcagttataagacagccttgattgagcatctgttaaacatcatcacccagtccagtcagccatcgtcccgcattcggttgattaccgtggagattgccttggagttactggtcactttcacccgtcccagctcggatgattcgcgctgcataaccgccgcacaacaggatctgctcttcagcgcccgcaatcagtcgatggtggtgatccgtaacttctacaagtcggaggacatcttcctagacctgttcgaagacgaatacaacgagatgcgaaaggcgcaactgaacgtggaattcctgtgcatggactccaccattctactgcctcccacgggaacgccacttactggaatcaactttacgcgacgacttccctgcggggaggtggaaaaggcacgccgagccattcgcgtttacttcctgctgcgtcgcacgtgccaaaagtttttgaatgagaaggaatcgctattgccgcttacaaatgtagtcaatctggttcaggtggagaacgtactcgatctgaacaatagtgatctaatagcctgcaccgttgtggccaaggacagcagcaagcaaagacgctttctggtcattgacgcattgcagctaattctcgtcgagccggatgcaaagctgcttggctggggcgtggcaaagttcgttggctttctgcaggacgtagaggtgcagggtgataaggatgactcgcgctgcttgcacatcaccgtgcaccggggcggagtcactcacaaccgcactccgttgctctcggctaagttcctgttcgacgatcacatccgttgcatggctgccaagcagaggttgacaaagggtcgtagcaaggcgcgacaaaagaagatgtaccagattgcgcaactcatcgagattcctggacagatggactctcccgtctacgctgttggtggcacaatggtcgcatccagtagcggcggaagtggtaacagcagtggcagcagttcgcgcagtagtcaccaccgtcccatgttctccacggccaatcgagtgccgggatttgcagcggtgctgcgtggaagcaatagcgctggggttagtcgaacccagatggccccgaatcgatccatcgaaggaattagaaatgaaagcgctggccgctcccgacgccgcagtcccagctcaacttcgggctcgaatcttagggccgatcactcggatcgggagcgatcgcccagtgttagcatgggcagccacagctcctcgcagtctcgggaaaactcccagcccagaagtactggaaatcggtcgcgggagagcagccctagaatgcccaggccgcggtcggaggagattcctctcgaggacttccagcactcacggaacaacagtccgcactctcggggaaacccctcgcctgcctcccgctcacacacacccatccgcgtgctccactacgatcagctgtccggtcatagcggctcaccacgtgaagcgtccctggggggaactaacgccctgctaagccagttaaatgggctgaaccgtgaagtgctcccaacgcagagctccgaggagacttcttttattgggagcgacggaaacgaggccactggcggatcggagggcaggcgacggggggccatagagacggtttaa

SEQ ID NO: 21936 - protein, 1040 aa, DROSOPHILA
MFRSRSWFGGPWGGRPKNRLSLEHLKYLYSILEKNTTVSESNRGLLVESLRCIAEILIWGDQHDSLVFDFFLEKNMLSYFLHIMRQKSGGSSFVCVQLLQTLNILFENIRNETSLYYLLSNNHVNSIMVHKFDFSDEDHTNDFPLYTEAIKFFNHPESMVRIAVRTISLNVYKVQNPSMLRFIRDKTAAPYFSNLVWFIGKHILELDTCVRTDIDHQSNQKLSNLVAEHLDHLHYLSDILLLEIKDLNAVLTEHLLHKLFVPLYIFSLTPAPPPPSLAVVTQNLAAVLNRNVDIDIQEMHNPRVSSIVALFLLSLVFLVVSHAPLVHALAWVILNGDHSVFKEGAAEILNSYVEHREVVVPGFGEPDESLEQALDTVTGQSSSSSYALSEDSGVESSSPATTELDSQADAVEAEQIKLRNITDEEKQLLQKSSSSTKADFAEMAKPFLDTVLHALDCTENDYLALLSLCLIYAMSHNRGIKNEWFEQVLAKSTRGAFSYKTALIEHLLNIITQSSQPSSRIRLITVEIALELLVTFTRPSSDDSRCITAAQQDLLFSARNQSMVVIRNFYKSEDIFLDLFEDEYNEMRKAQLNVEFLCMDSTILLPPTGTPLTGINFTRRLPCGEVEKARRAIRVYFLLRRTCQKFLNEKESLLPLTNVVNLVQVENVLDLNNSDLIACTVVAKDSSKQRRFLVIDALQLILVEPDAKLLGWGVAKFVGFLQDVEVQGDKDDSRCLHITVHRGGVTHNRTPLLSAKFLFDDHIRCMAAKQRLTKGRSKARQKKMYQIAQLIEIPGQMDSPVYAVGGTMVASSSGGSGNSSGSSSRSSHHRPMFSTANRVPGFAAVLRGSNSAGVSRTQMAPNRSIEGIRNESAGRSRRRSPSSTSGSNLRADHSDRERSPSVSMGSHSSSQSRENSQPRSTGNRSRESSPRMPRPRSEEIPLEDFQHSRNNSPHSRGNPSPASRSHTPIRVLHYDQLSGHSGSPREASLGGTNALLSQLNGLNREVLPTQSSEETSFIGSDGNEATGGSEGRRRGAIETV

SEQ ID NO: 21937 - DNA, 5153 bp, DROSOPHILA
cgatcccaacaacgctgaatagcttcaaattgtttacgagttctagcttcatagtaattacaagtttctcataaatcgtcaactagttaaatactaaaaggcaacgcagtttgaagttgtaaatcgtctagacgtgatgttttcccatgatgactacgcaatttaaatccatgatcaccgaacacaagtccatcaatgcgttgatttcaaagccaaggcatatattaactgcattaactaaatttagaaaacttccactgatataaaaatgttctctaatcactgacaaattatttgagtgccataaaaactgattcacagtcgaatcgaaatcacctcaaacccacgaaaacctgtttaaaattaaagaattagcattgaaaagtatagatgttctttctccgaattattcaaataaactaaaaaaatactacaaataaattttattcgaattaaatgttgtatcatttggaaaaccgaaaggcaatggaaattttccactaatcattaatcaacgtgcaactcgaaataaaataaaagtgattgaaaataagcaaaattgataaaacgctgttcaaaaagactaacaatggtgaataaaaataaagaaatttacatttatcttaggataccctgtgaaaagttgcacattttaagtaaataactataaaagcctagccttaataacttacttgaccaacttataaccaaatgactgaaactataaataactagggtcaatattacttttttaatgttaaacgcatagaaacgcacatagacgttcgactgtactggtcggtggtaaaaaaaaagtactccatgttcataccatgggaagcttgaataaaacaaagtttttgttagaaattatccaaccgtataacatccggacatctttcaatgcgctaatactcatccgctaatcggtttgcatctccacagcttcaaatcgattccacccaacttgatggtgcgatggcggaacaacactgacgccatgatcgaagcccagtacccgaccgctggagaattcgaatacatggagtgtggaccgtcgccgccggcggagagtgcgccgagcatgtacgacagcttcgaggagccgaccagcgagctgagcgtccagatatgcaacgatacgctgcggataagcctgatcgaccagatgaagagcgcagcggggcgcgtcaagctcttcgaggacatcgagcagagcaacgtggtggccgagggcatacggacgcactttgagtccgcctcaaagctggagaagaatctctgctacctgtgggccgcgtacctcaagcgctgggatctgatcgagagtctgctggaggcgggagccgacctgcacttctgcgatcagaacggaatatcagccttgcaccttagcgccttcagtggctgcttggccaccttgggccttctggtcgccaagggtttgaatgtcaatctgcagtccaagtgctacacccctctgcactgcgcagcctttggaaatgctgcggaggcagcaaagctactgatcaacaatggggcggacatatccaaggacaccagcaagccaaactgcgaggagagcctgctgcactgcgccgtgcgttccaatgccctggagtgtctgcagatcttcattgccgaaggcgccgacgtcaactcgctcaaaccgaatggcaccaatgccattcacctggcagctgatctgggcaatattcagtgtctggaagccttactgaatgctcccaatgcagatgccaatgtgcgtatctgcatccgcgaaaaggagtccacagccttgcatctggcagcagatgagggcaacgtggagtgtgtggacttactcctggccaaaggtgctgatgcgaagttgaagaaccatcgcggtttcacaccgctccacctggcagctagaacttccagtctggactgcgtagaatcgttgctgaggaatggcaatgccgacgccaatgccgaggacttcgatcaccgtactccgcttcacgcggcggtgggaaaatcggagaacgcctatgacatcatggaaacgctcatccagtggggtgccaatgtcaatcataaggacatttacgggtttacagctcttcacctggctgcgttggatgggctggtgcagtgcgtcgagatgctgatattccacggagcggatgtgaccaccaaatcgaagaaaggtacctccgcgttgaacgttatcacccggaagaccccggcttcagtggccatgatcagacagaaactggacgcagctattacgctgcaccactcgcaggtaaatagtcttatttcttttcccattggaattccgcatattatcccttcctttatctccctaacaggaccccgtgaaccgtgaggtggaattggagctggacttccgtcagctgctacagcactgtcatccgcgcgagatcagctacctaaacacgttcgtcgacgagggtcagaaggagatactggagcacccgctctgctcctcgtttctgtacatcaagtggggcaagatccgcaagtactacattggcaggctcatcttctgcttcagcttcgtgcttttcctcacgctttacgtgctgactgctttggcccacaactgctacaatgggagcaagaacgacaacacgaccattccagcgcaggagttgtgccagaagcaatccatcctgggagatatgctcagaaacaacccctttgtgatggagatgcaatggtgggttctggttgccatcaccatagtggagatttttcgaaagctatatggcattacgggctactcctcatttcggcactacgtaacgcaagtggagaacataatggagtggttcgtgataaccagcgtgtttgttatatcctacatctacaccaacaagacgtacacgtttcaaaaccacataggcgccttcgccgtgctgctcggttggacaaatctcatgttgatgataggtcagctgccggtcttcgatgtctatgtggccatgtacacgagagtccagggggaattcgcaaagctatttatggcctattcctgcatgctgattggttttaccatcagtttctgtgttatcttcccatcgtcgtcgtcgtttgccaatccgtttatgggcttcataacagtgctggtgatgatgattggtgaacaggatttatcgctgctcatcaacgatcccgaaggcaaggatccacctttcctgctagaagtcagcgcacaaatcacttttgttctgttcctgctgttcgtgaccatcattctgatgaacctgctcgtgggcattgcagtgcatgatatccaaggattgaagaagacggcggggttgtctaagctcgtgcgtcaaacgaagctgataagctacatagagtcggcgctattcaacggctaccttccgacatggctgcgcaacttgctccattacaccgcgctggtctctccccaagcttatagagtggttctgtgcgtcaagccactgaatcccagcgagaaacgcttgccccgggaaatcctaatgaaggcttatgaagtaggaaaaatgcgcaagcatttcggtcatactatctcgtcaaagaactcagccgaaaactatttgtcgtacaagaacaagtataacaacaataatggcgccacgaccggatatgtactacccgattcggacccggatgccgggcaattcaccacactaaccacaaagatcgatgacaatgctgatcggatcgagttcctcacccaggagatccaggagctaaagcaggcgctcatctcgcagcaacagcaagccagcaaggtgatcgacaagctgctgattgtgatctccaatcagcagaaacagaatctgcgcaagtagcaggagcatttactgcaccccattcggaatatttatagatcacagtttgaccttttttagacgtaagggggtcgtgtaggccccaaagaatccagaacattgttgatattatcgtagcagcgagttgtagttaaaccaattttgatatcgatgcgccaggcgcaatatgcatacgctatatagccatatatcctacatacactacactattgatacaaatactataactagcgtttagttgaactagaggcgagcagttggcaggattgatttgtggctggttccaggctgtgtctttgttgttttggcgttgtcgtcagagaatcgtttatatagtaatttaatgcaaattattactcttaataaagtatatgctatatatctattgttatgaaaagagacgttcttatttgcagctgtcggccaaattgagcgatgtcaaggtaactgatataaactgatataaattttataatatatcatttcaattgaataaagtctcaagaataaacttttcgtaatattaattcaataggattttcaattgctcttaactgcagttgtgaattcatatttcaacaaggaacctatcctcagcagaagcttaagctgtacatgacttcactcacctgttctctgcagttttcgtcctcaaagtatgagatatcctttccattaatgctgatttttcctgttccgggtagccgcactgtgacatcggctctagcagttttgcgcaggcactcgtaggtggtgatgtactggcgaccctcttcatcgatccttggtttgggcacctccagctgcttggactggtccatcagcggtttcatgtatcgctcgatgaatgctttgctcttgtaagcatatggcgatgcgatcaggcgatccatggagttggtaaagttggagtattcgatatcggcaatgctctcaactagcaaaagttccaactggtccttgggcagcagctgaaagccggcaatctcactaaaataaaatatataaaacaaggtcaaagtacttaattttcaaaaaatgcatagcttgtttacagtttttggttctcatcgggtttattgccgcgccgtagcatgcgctcctccagatccgccagcttgttagtttcttctacaatgtcctggtaattaaaaaggaaaagtagttaatacctttctaccaaaccacttaaaattaattcatcattcttctttcttaagtaatgaagttcccaagttgcgcaattactcacatgaagcagttggaagaagttgggtttgccggtgtagaacatgctgt

SEQ ID NO: 21938 - DNA, 3086 bp, DROSOPHILA
atgatcgaagcccagtacccgaccgctggagaattcgaatacatggagtgtggaccgtcgccgccggcggagagtgcgccgagcatgtacgacagcttcgaggagccgaccagcgagctgagcgtccagatatgcaacgatacgctgcggataagcctgatcgaccagatgaagagcgcagcggggcgcgtcaagctcttcgaggacatcgagcagagcaacgtggtggccgagggcatacggacgcactttgagtccgcctcaaagctggagaagaatctctgctacctgtgggccgcgtacctcaagcgctgggatctgatcgagagtctgctggaggcgggagccgacctgcacttctgcgatcagaacggaatatcagccttgcaccttagcgccttcagtggctgcttggccaccttgggccttctggtcgccaagggtttgaatgtcaatctgcagtccaagtgctacacccctctgcactgcgcagcctttggaaatgctgcggaggcagcaaagctactgatcaacaatggggcggacatatccaaggacaccagcaagccaaactgcgaggagagcctgctgcactgcgccgtgcgttccaatgccctggagtgtctgcagatcttcattgccgaaggcgccgacgtcaactcgctcaaaccgaatggcaccaatgccattcacctggcagctgatctgggcaatattcagtgtctggaagccttactgaatgctcccaatgcagatgccaatgtgcgtatctgcatccgcgaaaaggagtccacagccttgcatctggcagcagatgagggcaacgtggagtgtgtggacttactcctggccaaaggtgctgatgcgaagttgaagaaccatcgcggtttcacaccgctccacctggcagctagaacttccagtctggactgcgtagaatcgttgctgaggaatggcaatgccgacgccaatgccgaggacttcgatcaccgtactccgcttcacgcggcggtgggaaaatcggagaacgcctatgacatcatggaaacgctcatccagtggggtgccaatgtcaatcataaggacatttacgggtttacagctcttcacctggctgcgttggatgggctggtgcagtgcgtcgagatgctgatattccacggagcggatgtgaccaccaaatcgaagaaaggtacctccgcgttgaacgttatcacccggaagaccccggcttcagtggccatgatcagacagaaactggacgcagctattacgctgcaccactcgcaggaccccgtgaaccgtgaggtggaattggagctggacttccgtcagctgctacagcactgtcatccgcgcgagatcagctacctaaacacgttcgtcgacgagggtcagaaggagatactggagcacccgctctgctcctcgtttctgtacatcaagtggggcaagatccgcaagtactacattggcaggctcatcttctgcttcagcttcgtgcttttcctcacgctttacgtgctgactgctttggcccacaactgctacaatgggagcaagaacgacaacacgaccattccagcgcaggagttgtgccagaagcaatccatcctgggagatatgctcagaaacaacccctttgtgatggagatgcaatggtgggttctggttgccatcaccatagtggagatttttcgaaagctatatggcattacgggctactcctcatttcggcactacgtaacgcaagtggagaacataatggagtggttcgtgataaccagcgtgtttgttatatcctacatctacaccaacaagacgtacacgtttcaaaaccacataggcgccttcgccgtgctgctcggttggacaaatctcatgttgatgataggtcagctgccggtcttcgatgtctatgtggccatgtacacgagagtccagggggaattcgcaaagctatttatggcctattcctgcatgctgattggttttaccatcagtttctgtgttatcttcccatcgtcgtcgtcgtttgccaatccgtttatgggcttcataacagtgctggtgatgatgattggtgaacaggatttatcgctgctcatcaacgatcccgaaggcaaggatccacctttcctgctagaagtcagcgcacaaatcacttttgttctgttcctgctgttcgtgaccatcattctgatgaacctgctcgtgggcattgcagtgcatgatatccaaggattgaagaagacggcggggttgtctaagctcgtgcgtcaaacgaagctgataagctacatagagtcggcgctattcaacggctaccttccgacatggctgcgcaacttgctccattacaccgcgctggtctctccccaagcttatagagtggttctgtgcgtcaagccactgaatcccagcgagaaacgcttgccccgggaaatcctaatgaaggcttatgaagtaggaaaaatgcgcaagcatttcggtcatactatctcgtcaaagaactcagccgaaaactatttgtcgtacaagaacaagtataacaacaataatggcgccacgaccggatatgtactacccgattcggacccggatgccgggcaattcaccacactaaccacaaagatcgatgacaatgctgatcggatcgagttcctcacccaggagatccaggagctaaagcaggcgctcatctcgcagcaacagcaagccagcaaggtgatcgacaagctgctgattgtgatctccaatcagcagaaacagaatctgcgcaagtagcaggagcatttactgcaccccattcggaatatttatagatcacagtttgaccttttttagacgtaagggggtcgtgtaggccccaaagaatccagaacattgttgatattatcgtagcagcgagttgtagttaaaccaattttgatatcgatgcgccaggcgcaatatgcatacgctatatagccatatatcctacatacactacactattgatacaaatactataactagcgtttagttgaactagaggcgagcagttggcaggattgatttgtggctggttccaggctgtgtctttg

SEQ ID NO: 21939 - protein, 914 aa, DROSOPHILA
MECGPSPPAESAPSMYDSFEEPTSELSVQICNDTLRISLIDQMKSAAGRVKLFEDIEQSNVVAEGIRTHFESASKLEKNLCYLWAAYLKRWDLIESLLEAGADLHFCDQNGISALHLSAFSGCLATLGLLVAKGLNVNLQSKCYTPLHCAAFGNAAEAAKLLINNGADISKDTSKPNCEESLLHCAVRSNALECLQIFIAEGADVNSLKPNGTNAIHLAADLGNIQCLEALLNAPNADANVRICIREKESTALHLAADEGNVECVDLLLAKGADAKLKNHRGFTPLHLAARTSSLDCVESLLRNGNADANAEDFDHRTPLHAAVGKSENAYDIMETLIQWGANVNHKDIYGFTALHLAALDGLVQCVEMLIFHGADVTTKSKKGTSALNVITRKTPASVAMIRQKLDAAITLHHSQDPVNREVELELDFRQLLQHCHPREISYLNTFVDEGQKEILEHPLCSSFLYIKWGKIRKYYIGRLIFCFSFVLFLTLYVLTALAHNCYNGSKNDNTTIPAQELCQKQSILGDMLRNNPFVMEMQWWVLVAITIVEIFRKLYGITGYSSFRHYVTQVENIMEWFVITSVFVISYIYTNKTYTFQNHIGAFAVLLGWTNLMLMIGQLPVFDVYVAMYTRVQGEFAKLFMAYSCMLIGFTISFCVIFPSSSSFANPFMGFITVLVMMIGEQDLSLLINDPEGKDPPFLLEVSAQITFVLFLLFVTIILMNLLVGIAVHDIQGLKKTAGLSKLVRQTKLISYIESALFNGYLPTWLRNLLHYTALVSPQAYRVVLCVKPLNPSEKRLPREILMKAYEVGKMRKHFGHTISSKNSAENYLSYKNKYNNNNGATTGYVLPDSDPDAGQFTTLTTKIDDNADRIEFLTQEIQELKQALISQQQQASKVIDKLLIVISNQQKQNLRK

SEQ ID NO: 21940 - DNA, 7485 bp, DROSOPHILA
ataactaacaagaattgttatcttagacgccattcacttagtatgtttggaaataaatcggtcaagttgtctgttacactcggtcagttttcttttaatgaataattcaaaatttactatttttttgtcaatctcttctgtctttttcgatcccagatcgtaaacgtaatctaaaacataacttatttgatgatttttacgcctccaaatgtccaggaggtcgctatgtctgaactcgaacttgcctatatataaaatcaagtttttagaaaacgaacaaaaatgggcaaaagataatagttaaaggtacaaactgacatttttaattttagtcagaaattgtcagaaaatgagttatactccgcgaaacacaggggacacgttagaattttctgttcaaatacacataaattagatgttataaaaaacaaaaacagtacaactacacatatattaactacatacttacgttaaaaacaacataccttggcttttattttccatattttactataattcatggatgcgtattatcaatcgtaccatgtgcaaacgtaagcaaataatttggaattgccttctctcaattaactgtttaacactcagttaatagcttataaaatgctttagtgaagccttcggtaatttcgttcttgttttttatttatatgatcaattttctttaagaaaataattgataaaggacgatatatggacataaaaatttagactttatgccaactttatggaccacagtgcaatggagcgaaatagttttaaactacaaaaatatttggtttattaacataataacttaatacatataaagaagaactactatatattcgctgtcttttcattcttgggattcctgtaccttggattaaactcattcgttttaatttaatcgaagtagtgcaaaaaatcagcaactgtatattaaatggtattcattacatatctttaatttatttaaaattatactttttaggacccagaaatgcaacgacacagacgtggtcatattttaaaggaactttttgaaacggagaaaatctacgttaatgaaatagcgtcaatcttaaaggtaagaaatacaatatattggttaaaaacgcattataagtaaaacaagagagaatgctatagttgatgaaaaaatataaaaacattttgcaaaagggtgggcgtggctgttttgggcgtggcaaaaagtttttgtcaaatcgaacgaactttacaagtctaacaaaaatatgaaaaaagtttataaaaaaaaaataaaagtgagggcgttgtagttttatatcgcattataacgaaaatattgaagccaggaatttttttccattaatgagctaataattttccgacttttcttatgtcagctatttgatttagttgtcctacttttatgaaaaaagaacataaaaaatatatatccaaaagaaaaagatgtacatcgtactgattttgtattatttatatttggtttttggtaaaattactggcacttacgggcaaataactggacatgacggaatacaggaattcctaaagtgaattactctccggtaaatcccttcgtaacgaaggttaagttcctatgaaattataaaggctactttctgtcttctggttcttgaacgttggcgaactgttagaattaaatgtatgttactttgcaaacagaaccaaaaattgcaaagcgtgccctcaaagtaacaatattttaattatttgattcatatgatgcctagccaataaatataatttgaatgctttacagtacttatccctgtgttcatgacgcaagctgggatctattcggtttgtatttaatctatgtgcatgttaccacttttgattgtgatttagaatactaaatacgttatagcatcttaagagcactattctgttgatgagtgctcttaaatatgtcgcttccttggctgcggtagacatgcattatagtgcaacggttctaaaaaaattttcaatcaggattgttaactataaaccataaaagctagaaatgtgggacatagatgcagcgcatgtttatttcctgatgttgctacgcccacaagtctcccaagcattttttttttttttttcaaaaaaagtttaaatattctctttgcactccaactacgaagaggaactcgactatagcaatctcacttgatttgtcctgaaggattaaacgaaatcaatgccatagtattcgtgttttgctaattttaaagttcatagctcataaaagtcagaaaaaataaatttaaaattactaattatttttagggctactatgatcgcttgaaatcggatgaaagtgctcctgccagtctgcaaggtaaagcgaatgtgctgttcggaaaccttaatgagatctactcattccataatgatgtttttcttaaggatcttgaaaactgtatatccgtcactgaacgcgttgcattatgctttgttaaaagggtacgattaatcaaattatgcaaagacattttaaaatcatttacttttcagcgtgacaaattttatcaattatactcattttattgtcaaaatatacaacgctcagagaaattacgtgaaaccttagtggatactcatatgttcttcaaagaatgtcaaataggacttggtcataaacttcctctgggtgcatatttgcttaagccagttcaaagaattacaaagtaccaacttcttttaaaggacttgctgctcttcactgacaacgatagctgcagaaatgaacttaaaaatgcactggactgtatgttaatcgttttgaagtgcgtaaacgattcgatgcaccaaatttcaataacagggttttcggtaggtattcattattcaaataaataatatatcatatcataaataaaaaattaattgcgtttttaagggtgatttagcgaaacagggtgaacttttgatgcaagactcattccaggtgtggatagagtctaaaaaggacattcgtcttcgaatgaagccaaaacggcggcatatctttttatatcaaaagtctttgctgctttgtaagcaaacatcaaaatcgggatataacaaaagcagttatcaatttaaaagcgatgtaaaggtaagtcatatcttttgtaatttatttgcatatcattggagagggtattataatttttcgacgcatgcctaaaaaacgaatgatagatcatacgtcagtaaattaaatctatgcaagacggaacgctatagttgagttccctgatacttagatacccattaattagcaagagggaggtgcgtattaatattattctcagagctccggaaaaaaatattgaagaaagtagaggtttttcgtttttaagtggagttttctacagctgtcaagtgtaaaagtgaaaaagttaaaaaaaaaaaaaattaatcattaacggaaaatggaaaataatggcctacctcataagtggaggtaggactttacgccgatgaagcaatttgctggctgttgccgttgctgaagatcctgccaaattatgactctgccttgactacgacgagtgtttcaaatacaatttgcagtactaccctcacaataacatcatcaagttcaaccatctcgtccccgtgcatctccactttctcgctaaaagaaggcaaagaaggcgacatctgatcagcctttaatcaactccacaaatcgcttccaacgcctaagtaaagatgaagattttgatatggacgtcgtatcctcgagtgacgatgatgagccttgttaatcgaaagaagcccttattcgtgcctcaaggaaaacaatacggaacaaacagccggctagtgttaaccaagctgccccgcaccctgaagccaatccatcactctaaggtacccagaatgatttttcacaatgtggtgaacttcacagcttttcgcagcgaactggacgcccttgtaggagattcctacaccatcaggcactaaattcaggtgactgcgctgttcaatgcaacgcctcggatacctacaggcaggtggctcggcattttctaaagaaaggatccttatttcatcatcaccagctccccgaggaccgaccatatagaatcgtgttgcgtagcatacaccatgaagtttcatcgaaggacatcatcgcatgcctacagaatgaaggccatagccttgtacgtgtatatactccacgcaataagtcgatctcactccctcttaatatgatttatattgatctcaaaaaatacaacactgtggagcggcgatccttgttagatcaaatgtctctcatcaaccattcgccactctatcgaaaaatcatatccagtaactattgagctgattgcaagcagaggaaactttaatgctgcctcagtatactgccctccgacttttagatggacagatgctattgctaggcagtttatcacacaatttggcacggagttccttgcggcaggtgactggaacgcaaaacacagatggtggggaaattacaggatgcgtaccagaggtagggtgctgtattctgcacttgcagaaaatcgaatcgacatcgttgacactggagaagccactgttacccctatcgcgcaaatgtctctctaagtgccattgatttcgggatctccgaaggctttagacagcaacaaatcagggttaatgtgctgacagtactgtcatctgatctgatcatggttgagctagatgaggacgcccaatcatttagaagtgttacaaaaaatgctgtctcaacaagcgaactttcggatattcaaagaacacatcgacgctactgtagaactcagcattcccattgacacttgcagtaggctggaagcatacgtcgactattttacatctgcaatcatagaagctgcaaggcaggctacaccaacccctcaccaagttggtctcacggccataaggaggcctcccattttaagcatagaggctagtgacttgctcagccacaaaagacgcctcagaggacaatacatcgcgacaggagatcctagcatttatcagcaatattcaagtactactaatagtactgcgccgtctgctagccaataaccgtaaagcaaacctggataccttattggagagtgctggtccagatagtaatagtggactctcaatatggaaactcacgagaggcatcaagagacagcctttctttcaatcaccaattcaggatcgaggtggcatgtggcttaagacggattatgaaaaagcaactgctttcgcttttcacctgtcctccactttcatgcccttcaatttaacagacgcgcattgtaatgatccccaaacctggaaagtcaccaacacagatcgactcataccgcccgataagcctgctaccagctttctccaaagtttttgagagaattttgcttacccgcttgatggaactaccgcaggtaacagaacacatcacacaacaccagttcggtttctggaagtctcatggttgccccgaacaaatccatcgccttgtaaagcacatcacgcatggctttgagcacaagctttacacagcaaagcttcacggccacaccgcggggagtcctggatggtataatgttattttataaataactaaaaagttaatcttaatggttcaataaacgaattaaaaaaaaaaaacaagctttacacagtcggcgtattttcggacgtgaaataagcgttttataaggtgtggctgaaggtctactatataaaattaaagatctcctcccagcagcccattatgccatcctcagctccttcatcgctgtcaagcatggaacacattcatgcaggggctccacagtgtgcttgtgctcagcagtgtacagggtatacaggaaggggtataccctgtacactgctgacatgccaacaccgatgaagcgccccctgctcagctgatcatggccacctacgctgatgacaccgccatgcttgcgtcgcactcatccttgcaagtcgcttccaatgcagttcaggaatggctgcatgcaatcgaccgatggactaccaaatggaacatagccattacctgcactaagtctgcctgtgtcacatttactctgcgacctcaaacctgcctaggtcttcttttcgacggaaataccattgactacgtctcattccactgctacctcggaattcaccttgatcggacgttgagttgtaaagcccatatcacggcagttagagccaaatcctcttggaaactgaaaaagctggactggcttttccactcaagcaaactccatatggcaactaaggctcttttaataaaagccatattaggtccaaccgtaccaaaaaaaaaaagcaacgtacaagctaggagcaccaatgacaaccgattttgcatcttagcagaactcgagaaccaccaagcagagctggggcaagagacccgaaagaaaccaaagcccccacctatttccatgttgttcgacttattaacagaactaccttaaagacaagggcttctgtgccaaaaatgtcagcatcataataagcaaaaacaaaacgccgcaaccacttttcaagatcgggctcgaaccagatagcaaacacctaaagaataaggaagtgcacccgatctacaacctgcagttcttactgcgtggaagaatcacacaaacgcaacggacctatacaatgcactaactgccagaagtatggtcacaccaagacatactgcatacttcggtcagtctgcgctaacaaaaatgactaccaaaagaaaaagatgtggaaactgcgggggaaaccatacggcaaactacagaactcatgttccactagaatatggtgatttagttgctcttagcacaacgatccaaataataaatgtctaacctacgtatatccatgtggaaggcaaatcgtaaatgtaaaccacatcgacggcatgctgctggttgaaacgaacctcacagggaggtttatatataataaagaactttaaaaccaacctgaaaattgaacagatatttctggcaaagaggcgtctgcaacaggcgagccaaaccagcaaatcgctatgatcaaagcaccgccacgcgcagactaaaccgggctctgaagcaagatgccgaaaatgcacaactgaaatatatcgaaaaacagttacacatccaaatctaagctctccgattgaaaccgtcacccctataagaaatcccgtaggtttgctgggtccgcagtgacatagacagagccgaagcatttgcctaacatctcagggatgtcttccagtgaaaccctgctaaaaatgcttatgatcttccgaaaatccagtctgatcacaaaactcatcagggagctaaagccagaaagagtttcaggaaaattcgaactgtgctattgagttcatcggcaaactcttcaatggaatagtaagtctccgctagtacccaagtaaatggaagaaatctattatcataataatactgaagcccgttaaagatcaca

SEQ ID NO: 21941 - DNA, 1026 bp, DROSOPHILA
atgcaacgacacagacgtggtcatattttaaaggaactttttgaaacggagaaaatctacgttaatgaaatagcgtcaatcttaaagggtgatttagcgaaacagggtgaacttttgatgcaagactcattccaggtgtggatagagtctaaaaaggacattcgtcttcgaatgaagccaaaacggcggcatatctttttatatcaaaagtctttgctgctttgtaagcaaacatcaaaatcgggatataacaaaagcagttatcaatttaaaagcgatgtaaaggcactaaattcaggtgactgcgctgttcaatgcaacgcctcggatacctacaggcaggtggctcggcattttctaaagaaaggatccttatttcatcatcaccagctccccgaggaccgaccatatagaatcgtgttgcgtagcatacaccatgaagtttcatcgaaggacatcatcgcatgcctacagaatgaaggccatagccttgtacgtgtatatactccacgcaataagtcgatctcactccctcttaatatgatttatattgatctcaaaaaatacaacactgtggagcggcgatccttgttagatcaaatgtctctcatcaaccattcgccactctatcgaaaaatcatatccagtcttcttttcgacggaaataccattgactacgtctcattccactgctacctcggaattcaccttgatcggacgttgagttgtaaagcccatatcacggcagttagagccaaatcctcttggaaactgaaaaagctggactggcttttccactcaagcaaactccatatggcaactaaggctcttttaataaaagccatattaggtccaaccgtaccaaaaaaaaaaagcaacgtacaagctaggagcaccaatgacaaccgattttgcatcttagcagaactcgagaaccaccaagcagagctggggcaagagacccgaaagaaaccaaagcccccacctatttccatgttgttcgacttattaacagaactaccttaa

SEQ ID NO: 21942 - protein, 341 aa, DROSOPHILA
MQRHRRGHILKELFETEKIYVNEIASILKGDLAKQGELLMQDSFQVWIESKKDIRLRMKPKRRHIFLYQKSLLLCKQTSKSGYNKSSYQFKSDVKALNSGDCAVQCNASDTYRQVARHFLKKGSLFHHHQLPEDRPYRIVLRSIHHEVSSKDIIACLQNEGHSLVRVYTPRNKSISLPLNMIYIDLKKYNTVERRSLLDQMSLINHSPLYRKIISSLLFDGNTIDYVSFHCYLGIHLDRTLSCKAHITAVRAKSSWKLKKLDWLFHSSKLHMATKALLIKAILGPTVPKKKSNVQARSTNDNRFCILAELENHQAELGQETRKKPKPPPISMLFDLLTELP

SEQ ID NO: 21943 - DNA, 3447 bp, DROSOPHILA
cagcaattagcatatactacatatatacatatgtatatgtatatttggtgtgtgattggcatgaaaccggcattctgtttatttacccatccaattggcgccaggtgagtccaaatatttcacttttgtccactttgatgtgtttgcgcagccaattcctagacgctgtcgtagacatcgagattacaacggattttcgggggcgaaatatggtaatatatgcaaacacgcttttattttattacgtcgggcttgcctgcaaataatttggcatttcaattttgagttggttgattcatctgcgcgtaaacatgatttcgtttttctttgtaaactcagtaaatacgtttagtttataactagtttagctacgttgtaacgaagtggaaagcttatgaatggcggttacttttcaatttttaatgaattcacgatgagtttgggaatttttggtggcattctggtttgatgtggtttaatcgttctgaatggcattaactttttctggttcttaaatattaatttcaagtctggaaatttctagcaatgcttgtttttcacaacaaactaaggtttaaaaatattaatatttgtgttcgttagggataaaaattaatttgttagcgaaataatgtttgaaatcatttaaagtttccaactattccggactaagagcaaaaattaaccataaaaatttttacttaatttttgtattacttatttatataagatttggcttggaatgtccaacagcacaatctaataaatataaagaaagattataaagcatacatatagtttacactttttcaatactttaatatattctattgtttataacgaatttattgattacaaatattttcaaatttgaaattgaattgtaaccgcctttgactggttccgaatcgactggctctccacggaacatatcgccacatgcggtataatcaatgcagctccctacggtcatactattaaccacatccacatcagaagtctgaaatctgatttaaaaactctcacgaaacttacttaaaaccaggtgaaataaagactgaatacattctggaggcaagacaagctgaagcagtatgagtggcaagcaggtagtcatccttctgggcagtgtcctgatcctgggatgcttacaagtggcagcggcaacggaaacggataacaaaaccaacgatttcgtggccaccgacgaatggcagacgattgcggaaggttaatggctagccaggctaactctcggatgacgtgtactaagtgagcactctatatttccaggtcaagctattccaaggggcctgcacgtgcgcatcaacctacaaacggggctcaaggaagccaaactcttagacgaaagcgaacgtggcacgtcgctgcagagtcaaccggatgatcagaatgctcgggaatctcacgatgacaacgaacccctggctctggactataaaccggacataatcgaggagtctatacggcgggtcaaggagcagaagaagagctatgccgagctacgcaaagcgtacaaagagttccagaagaactttcgcaccgacggagaactgatcgtccagttaatcgatcagtttcggaacttcagcagaacgccgctagagtcagagatgcgctccaagctggactgcctggaaaatctggagtatttgctccatcagatagacaatgccttgatgttcattgataatgggggattggatgatgtactactgcccattgttgtgaacgataccagtacatccctgagagtgtcggccatgcgtgtgttgggctcgctggcgagcaacaatcccaaggcccagatcaaggtgttcgaaaagaatttcgggtctcatctggctcagattctgaccagttccggaaatgtcggtgagatctccgctgcattgcacgcctttggagccttgttgcggaaatttccgctagcccagcagcgagtgctttccacctcgggtacacaggctctgatcaaggtgctccagagtccggatgtggagctgcggagcaaggcgaaggtagtgactctcataagcgacctagtgctggagaagcggtcagtgctggatgtcagcaaagatgatcccgaagcctcatccacaatggcgcaatatgtgctcttggacttcgagtcgtggctgaaaacgccgggctactgcgcggcggtggacactgtgctaaccaaggagttcctgctcctcctagagcaaccggaggtggtggaacagtttgccaccgcattggagaccaccgaagatatgtgcaccagcacgtggtcgcaaagttccggtctcaggcatgcactattaaccgttcgcaatcggtatgccaacagcacggacgagtaccgactggaggtgtcccagattttggccaaactgtgcgagagattgttcaacaagcccaagcacaccgaactgtaatcctagccaatttactatgttatttatgttaatttcatttaattgtaagctgagttggaatgaaattcgcagccaaaccatagaatacgatagctaagatgccaagtacttgtgatgcaaaaataatgctctttgtcattaacttaggatagcaatcaatcatgccaaacatctacaggattttcgttatcaaatatagtctcttacttaagattattttaagtgtgatttttttttaataggcagacgattcaccaacgagcacatcaaaataattatgttgttacacgtcattaaactagcaaaaatttgtatgctacagaattgttctccaaacagattatgaatccttaaagccttaagttcttgtttattgtagctacaataataaagcaatgacctaatgtttaatttagaaattctttcttaaatcagttgacttcttttcagtggcatattcttaaaatgtagtgctaaattatgaaaggaaatgtattttcaatcaagaaatcgcattaggagattggatattccacccctatagaactacagacccatttaaagcccgataaggcgagcataatcgaccgggccataaagtaagtcaaaagtgtcggaaggaaagcaaaaacgccgaggaaagcatgtcccaaaaaaccacttgaagtttgaatgtgagccaaacgaagccacaagaacagggaaaacctggcacggaactgtacaggaggagaaaggacatcggagcaggagagtgcaattatgtgccggcaaagttggaagttggagtcgaagtccagcgcgggaattacagcaattagcggcagtcacatgcaaatgcaatgtcactggggctgagtcacgacggtggatggtcggataggtggagtggtaaaggtgaagcagcgcctggaagggagccggctaggacgccgccttggttcccatggctactccatgcaatgtaaacagagaaaaggggttgcaaagccggctcagt

SEQ ID NO: 21944 - DNA, 1384 bp, DROSOPHILA
ctgaaatctgatttaaaaactctcacgaaacttacttaaaaccaggtgaaataaagactgaatacattctggaggcaagacaagctgaagcagtatgagtggcaagcaggtagtcatccttctgggcagtgtcctgatcctgggatgcttacaagtggcagcggcaacggaaacggataacaaaaccaacgatttcgtggccaccgacgaatggcagacgattgcggaaggtcaagctattccaaggggcctgcacgtgcgcatcaacctacaaacggggctcaaggaagccaaactcttagacgaaagcgaacgtggcacgtcgctgcagagtcaaccggatgatcagaatgctcgggaatctcacgatgacaacgaacccctggctctggactataaaccggacataatcgaggagtctatacggcgggtcaaggagcagaagaagagctatgccgagctacgcaaagcgtacaaagagttccagaagaactttcgcaccgacggagaactgatcgtccagttaatcgatcagtttcggaacttcagcagaacgccgctagagtcagagatgcgctccaagctggactgcctggaaaatctggagtatttgctccatcagatagacaatgccttgatgttcattgataatgggggattggatgatgtactactgcccattgttgtgaacgataccagtacatccctgagagtgtcggccatgcgtgtgttgggctcgctggcgagcaacaatcccaaggcccagatcaaggtgttcgaaaagaatttcgggtctcatctggctcagattctgaccagttccggaaatgtcggtgagatctccgctgcattgcacgcctttggagccttgttgcggaaatttccgctagcccagcagcgagtgctttccacctcgggtacacaggctctgatcaaggtgctccagagtccggatgtggagctgcggagcaaggcgaaggtagtgactctcataagcgacctagtgctggagaagcggtcagtgctggatgtcagcaaagatgatcccgaagcctcatccacaatggcgcaatatgtgctcttggacttcgagtcgtggctgaaaacgccgggctactgcgcggcggtggacactgtgctaaccaaggagttcctgctcctcctagagcaaccggaggtggtggaacagtttgccaccgcattggagaccaccgaagatatgtgcaccagcacgtggtcgcaaagttccggtctcaggcatgcactattaaccgttcgcaatcggtatgccaacagcacggacgagtaccgactggaggtgtcccagattttggccaaactgtgcgagagattgttcaacaagcccaagcacaccgaactgtaa

SEQ ID NO: 21945 - protein, 429 aa, DROSOPHILA
MSGKQVVILLGSVLILGCLQVAAATETDNKTNDFVATDEWQTIAEGQAIPRGLHVRINLQTGLKEAKLLDESERGTSLQSQPDDQNARESHDDNEPLALDYKPDIIEESIRRVKEQKKSYAELRKAYKEFQKNFRTDGELIVQLIDQFRNFSRTPLESEMRSKLDCLENLEYLLHQIDNALMFIDNGGLDDVLLPIVVNDTSTSLRVSAMRVLGSLASNNPKAQIKVFEKNFGSHLAQILTSSGNVGEISAALHAFGALLRKFPLAQQRVLSTSGTQALIKVLQSPDVELRSKAKVVTLISDLVLEKRSVLDVSKDDPEASSTMAQYVLLDFESWLKTPGYCAAVDTVLTKEFLLLLEQPEVVEQFATALETTEDMCTSTWSQSSGLRHALLTVRNRYANSTDEYRLEVSQILAKLCERLFNKPKHTEL

SEQ ID NO: 21946 - DNA, 9360 bp, DROSOPHILA
tattatcatgcctgcctaaattattcgaagtatgccttctttttttatggaagcacacaatattatcccagcccatcaatttgtcttcaaagaaaaatatggaactatcgagaaagttaacaaagaatattggcgcacgatattcctcaatgtatatcaagcattcgaccgcttctggctcaaaggtctcatgcataagattaaaacacatttacctgtcctctaattcagcacacttagcccaactcttagtctttttcacagcgcatattcccacttgtgaatgactaactataaccacccttgccgacgacactgcgatcctcagccgctccagatggccactccgtgcaacaacccaaatagccaataataaaataaacgaacaaaagtgtaatcgtttactcttaacagacaaacttggcctccgttctgactgaatagcacccttatccccgaagtcaacaaaataacgtacctcggcgtcaacctaaacagacgtctaacattgcgtatatcgtgcgttttgggcgactttagggcgtaaaagtgggtttggcaacgtgggtaaacaaacttgcgctgcgtctatgtctctagaatctgtatgccgaatctcaaccttctaccttttatactgttcatacggacagacgaacatgaccagatcgactcggctattgatcctgatcaagaatatatatacaatattttatatggtcggaaacgcttccttctgcctgttacactcctactattactacttttcaacgaatctagtaaactcttttagtaacggatataaaaatatggacatttatgttgtctgtcttttaataagcttaatgttagtctcgaagttaagaaaattcaataaataaaaccaaagcaggagacgagcaggtgtcaggttctaaaatatctacatctatctagaatatctagctattctttaatccacaagtgatctcgttcgtcttgttatcgcgagttcggtttacaaatctatttttagtcatattcggtgaatattaagctcagttattttacttctctctccttagggctagagcctagttctctctcgctggcttgagttaagtaaaaataaactcagaaactaaaaataatttctgagtttctttttagtttctgagtttctttttacttaacttaagtaaaagtaaaaaaaacaagtaactcaagacagcgagagagtgaactgtggtgattaacctttttttcgtaattgaatttgaaattgaaataatcaaaaatggacagaaaaacatcttctagctcagagcccttagaaggcgcatttgatgctaaaaggatgaaagttgttagtaaaacgccagctgaaatatgcgctataatcgcaagggacatagccttaaatctgaaaatgccgccgagggaattaaataattcatatgcagatttgaccagttttgccacttctgttactggcacaatcacaacaaccgtcgtgattactaccatatacatatacaaatacagtgcactcccgaactggagtttgttcttcactagagtgtctctggaaacttatagtatattaattccatctcttcaaggttgatcgttttaaatgactcctgtctctctgcagcaaaggcttgcgaaggaagctcaggaagttctgccaatgggcacagtggagatgatgacatccctgctccaagctcacgtatgcatcaaggtcaaatgcagcagtaacagcattggtaacttaaaaagagcactcaatgaagttattcttgagagttaaattctgcacctctaaatcgggcatctttcgcatatatacaactgacgcaatgtcatttagaatggtagtcagaacattatttgtcttgaattgttagttttggcaccgccaattaagggaggacaagccaaaaaacacatccaaaagatttaactgaacatgcattcaccgaaaaggaatttaatgttcttactgcatgatgagacctgactggcgaaaaatttaagatggatctaacgaggaagtcgtcaatgctaagactaggcaaaacctgttttatgttaatcttatgcaagcaccaaaggtgcctgatgcattagaaataacaaatgtaggcaggcgcagggttagtttagagcgtgctctatgacttcttagaagatacgttcagcctaaagttttccttggtgccaattcactgtatataaagtgtagaaagaagaaagtgtacttttcaggatatgaggtaactgtacagggagagcagtaatgctggcaaaatctggtacagcctacatggtatcctggaagatgcaaaaagcttcctcatatctgcccccaactgaaccctgtttatttcgtttggcaatattttgattaggaggccactttgacgcgaaacaccaatggtggggtggtatcagatcgtgttcttgcggcaacttcaggaagcttttgccaataatttatgccaggtccaagccacaggctaaccaacattctagtcgtattatactcagatcgtatggtcttcttgacaacaaactgcttgtcgtcaagtgatgctgcactgcatcattcttctcaactcaaaacacgtagacaacaattacttacacatggcttctctgttggtatttttgaagttgatatgagaattaattttaaacttcgacctgagtagcgctgaggatattgaggacgcaatctcaatattcatgagcaaattacaaatagctgccgctagcttacagacctttcaacactctagtcaacataaaagagggcaattgtccccagatacagctgaacgcttgatatgcgttgatatatatgatacgaatgcataataaatctactccctctggaaactaaccaggcgacttaagaggtggctgatgaagcattcgcagacaatttgcactcgaacacttgacattgcatcagaatctcgaaaaagccaccgttgttgattcgcactggaggtcatcaaagaaatgaaatactctgtggcgggttttagcaagcctttgctgatgttgcacaaaggggtacaatgtaagctaaagcctttgcttaccccacaactacataagcttgtcaccagctctctaaaggaaaggtcgatctgtttggtatcaatacatagaaagaccaatttgcgcaggtgtcccccaaagcagcgccctctgccctacattgtgttctttgtatactgctgacatgccaactccaggatcagtccaaactgtgaacactgatgaatcagatactcctccctggtcaaagctctccttaaagaacaaggtcgccatatataaaacaatcctcagctcgatggatatatgatcttcaagtttatggaatttctgctaaatcgcacataagcaaaatctgtataacttagattgaaaccctgagaggaatggggaacgctccctggtacatgtgtactacaaacacagaaagagatttgactatagagtaggttggtggcctcattcaaaaactagcctcagaagtacgaagacatgttgaaccatcatccatgttctatctagaacccttttatggcagaaagtaaggagaagactaaaaagactctaccgacaggacctataatttagaacactgttgcaataaatatcctaattgttaatataagttgtcaataaatatatatccttgtaaaaatgtaaaaattcgttacgaataacaacaattcgttaaatacaatagaattaataattcccctccataaatatataaatgtttaagctgcctgataattaaactttacatgtactatacattttttgaatacaaaaatatacaatttacgtggagtccagaagactcaaaaataaataaaataaaagaggttgcattgtttttttttttttttttttggtttgttattttacatccattttggtcaaagaaaactggatcatctccttaaggcgtttttcgcacatttagaagaaaaatattgcctgcagccgttattacactattttttgttgcatacttgttatcccacgttcaataaacctgtttggaaattagaaaaaaaaaatgttaaaataatttaataccaaaaaacaaattaaaagggatttagacagaaagtacacaagtatgtaagtacaatactttgggtggcactggtaaaaagattttaaatgagcactctaaattgtgaatatctccggcgctacacacagagggtataacttgtttaatatgaccaataataacatataactttccttaaatatgtatgaagttgattaccattaccattgtattacattgtagatgtctcaaattggcttaacagagtccgtaagcggcgatgcaaaacgatttgaagtttggctcaaagggcgccaggaagtttatacgttgcaagcatcgacaatcggtgtaaaagaaatgtgggttgccgagattaaaagggtgctatttaaccaactcgaaaagctcaaaggcgatcaaatagcgaggtacaacatacggcatcaaagcctatggcaaaaaagttcttgtgaagcccccaacattacccactgttcattgaggcgcacggaatgctttgaattgcctcttaatgattccaaccggaatacgaatatcagaagcgagaaaacgtgcttatcagatcaaaatattgtaaatggtccatctgttcaggatcaacacgaaaaaaacagttggagctctgattgttccgacattgatgaagatgaaacaattaacccggtaagtaatgcaattaaactcaaaaaaaaaatacattctttttagctaacatggtgaaactaattaggaagaatttaattgtttaatcggttgtacgatccaaatcgtaaaaatcacttctttctactcctcacttagtttctaatatgcagcggtaacattagataatgcaatctaatgccgatctatttacccaaacaatatattcttcgtttcctcattctggacagctagatatcgtttattccttttcacaaagaggtaacaaattcaatgcaagcaattatttaggtgtctgttatatgtcggctatacttaaggtttattgaagaacctacagcacatttgtagatcaattataacaaaatgtcagtacggtcttgaaaaatggagatcaacaacaagaatttcggagcttgcatacctacatcgccggtgtcatctacacaaactttagtactgcaaacaccttcatttgttatacccgttactcgtagagtaaaaggatatacacgattcgttgaaaaatgtaataggcagaaggaatcgattccgaccatataaagtatatatattcttgatcaggatcaatagccgagtcgatccggccatgtctgtccgaatgaacgtcgagatctcaggaactatgaaagctagaaggttgagattcagaattcagattctagagacaaagacgcagcgcaagtttgttgtcccatgttgccacgcccactctgacgcccacaaagcgcacaaaactgccacgcacacacttttgaaaatgttttggtattttttcattttgttattagtcttgtaaatttctaaccatttgccgaaaaactttggccaccttagcattttatcttgttattttttatacgagaacacagtggatgattaaagtgggtttgctatgcgagaactacaagtactgtactctatgaatgtattttttattttttaccaaacagcctagtcttgtgctttagatggaactttttttatcacctcatgcatagagttgttgtatctgtcgacaacaatatgtgttttggaatgcagcgtattcggttgtatagagttcaattcctagggttcgtaaacagttacgggacataataatcagtaatgtcagcaatgttacgcaagcaaatgtaaagtacaggttaacgaaagcgaatgataacgagcgacttaagtgcagagcgaacagagaacgcaaagccaaaggtataggttcgagagtacaagagtaagcctgcgaaagaggagagcttagataatggagatatttctgcacagctgaggagccgcagaggagcctccaaagatgccatatttacaaagtatacaatttcgaatggctggtggctgcgtgaccctaccgttggaagagtggctttcaacgaaattgcttaaggggtagcagacacagtttattcactgcttgcttcgtctatactgttgttgttcccagcacaggaactactgatgcacacattgatatttgccgccagatggtccgccactttaggcacatcatagtgccgctgtccgcatcgtcaaggattgaaggtaggatttcgcattttttatcccgttttttaacgacagttttaggttttgagtgacggaataaaataaattggattgtaggtatgaaatcgaaggtagttgccgtgtcagagaccaattggttgacgtacgttgcgacacgtaaaagtgcgtcggccactgcatttcacttggcgggcttttaaattaaatcgcaatcgtcctcttcttcgtctggcgttaaagttgctgttctctaatgcgaacgtcaaaggctgatgatcgatgttaattttgatggatgctacaccatataggtatggtttttcgaagcccttgctatcgcgagcatttcttttttatttgtggcgtaacattcatttgtttaatataatgacttggaaacttttcagtttccttacgttgacagagggcttcattttcataacgtcttaacatagcctctgttgatacgatgtgagtcttttctcgttaggttgtcgaagacagcccgtatggctttccagtggctttcataatcttcactaaagatggcccaatatttttgaatactcggctattaacgcggttagtgtctctctttcacatttagagcgcatcggatccagttttaggtgcacgttcagagaattcctatcgtgtatcttgatccccggtgtgatgtcagcgtatttttttttctgtagatcacggcgtttaatggagtctgggaaggacgaagaatgtgaaccaagtgctttaaaaagttgttcggtgaagcgatgcgtgattttggtattgcccgaagcgcgattaaggttaagggtgttgtttttggggcttaaaaagtttatgttaggaattgtaacctggtcccaattttcgtaccatattctatgtatggtacgctaaagaggcactgattttcaacagagctattaatgcactctacctcttcgacaagggaactttaatctttttctgaaagtttcggttccgttgcctttttcggaataattgtcgtgatactccctcgatgataatcttgatgtcgccgcccttattcctgcctgtcttacagttagatttgtatcttggcccggattgatttgtctcgattttgattccaggtctgatccctaggaatagagacacaattcggttcggaccgtaattgtaccaggagccctatagccaggaagagggacctgaggaaatcgtgcaatcggtgcatcgcaccccgcagctaggaaaaagtgaccagctctccattctgtatacccggcccagatgtcgtgtgagttttctcccacgaagcgtctccagctgttctccttagcctttagaatacgatttttgtacccggctgaggtacgcatcacttcaaccacaatcagctcatttggcaacattatcacattatgtctggcatcctgtgggatgcgcctaagtctcctgaaaagagcaagttcgcacacgccatttacaatcctgcgcagggtagagacatgttggttcagcgaggataacgataattctcccggaaggtcggctgccctactcactatttcctgttcgaatcgtggccaacgtgcattggagaagttccagcacggtaccggagcaaagctctcaacggtactcgcagttctcggatttgccacaacagtaatcatgttgttgtcactcgactcccactcgcccactcaccactcgtatgtgacccacatagatgatgccgagttgacgatcgtcacgtcgatatcgctgtgggatctacagttgtcgaacgcgtacacctcgcttggctggtttaggagatcagctatgtgcgcctacatacaaaacgtctaaagcctcggcgttgacattaagcgtcacgttgacagtggcctcatcaacctgcgactatgactgccatgtccatcctgtccgcaatattgttcttgaacaagtcactcatgaaggcttccggcgtctaggctgtatcaacgttgatgaagatgttcttagctttctgtgatgcgatctgctgcacttcgaggcccacttcaccaaactttctgtgtgccaccactttcttaatttcgctcgccgtccttgcggactttttccgccatattcttcccagagacattcggatccttgctgtggatcccagccgaccaggtctcccttggcttgctgcctccccagcaagggcggtattggttgcagctgtggcggtggtagcagcgatagtaacggcggtgacagcagcagtggcaccgggaacctccagcgacgaaaacgcctcctccagtgcacaaccaatcagcttattgctggtagcgcagtcacgaaccgaatgccctgctgttacacagctgacccaaaagctcacctggcaaaacgtgttctctacaatgctcactggcccagatttgttggcctttttttggcataaagtcacataataaagctagagagctaaatttttgtagaattggaacatctgacatttaaaataatttcaagtaagtcagaccacgcccatccatgccgctcatattaggatataaagttaaggagtagatttggcatgattatttctttttattaattaatataataaatttaagctgaatttttcttatgtatcttatcttatgtatctatttaatacacatataattatactattatattaatcaaaattttctacgtcgaaatgcatagaaaatggaaaatcgtgatccgaatccgagtcgctatcatcgtttcccaaaaaatgttcattattaatatgttctacatttggttcatctacaagattgacgacttctttcggcaaaacgattttttttctattggccgactggccatatgattcagcaaattttggaaagatactctgtcacataaactcccgcaggtctacacgctaatttagcttctctgactttattatacgatggataaatgttgctaaattgtgttttgttcaaagctcttatgtcgttgtattttgctttggatagaga

SEQ ID NO: 21947 - DNA, 1195 bp, DROSOPHILA
caaatctatttttagtcatattcggtgaatattaagctcaatggacagaaaaacatcttctagctcagagcccttagaaggcgcatttgatgctaaaaggatgaaagttgttagtaaaacgccagctgaaatatgcgctataatcgcaagggacatagccttaaatctgaaaatgccgccgagggaattaaataattcatatgcagatttgaccagttttgccacttctgttactggcacaatcacaacaaccgtccaaaggcttgcgaaggaagctcaggaagttctgccaatgggcacagtggagatgatgacatccctgctccaagctcacgtatgcatcaagatgtctcaaattggcttaacagagtccgtaagcggcgatgcaaaacgatttgaagtttggctcaaagggcgccaggaagtttatacgttgcaagcatcgacaatcggtgtaaaagaaatgtgggttgccgagattaaaagggtgctatttaaccaactcgaaaagctcaaaggcgatcaaatagcgaggtacaacatacggcatcaaagcctatggcaaaaaagttcttgtgaagcccccaacattacccactgttcattgaggcgcacggaatgctttgaattgcctcttaatgattccaaccggaatacgaatatcagaagcgagaaaacgtgcttatcagatcaaaatattgtaaatggtccatctgttcaggatcaacacgaaaaaaacagttggagctctgattgttccgacattgatgaagatgaaacaattaacccgagttcaattcctagggttcgtaaacagttacgggacataataatcagtaatgtcagcaatgttacgcaagcaaatgtaaagtacaggttaacgaaagcgaatgataacgagcgacttaagtgcagagcgaacagagaacgcaaagccaaaggtataggttcgagagtacaagacacaggaactactgatgcacacattgatatttgccgccagatggtccgccactttaggcacatcatagtgccgctgtccgcatcgtcaaggattgaagtggcctcatcaacctgcgactatgactgccatgtccatcctgtccgcaatattgttcttgaacaagtcactcatgaaggcttccggcgtctaggctgtatcaacgttgatgaagatgttcttagctttctgtga

SEQ ID NO: 21948 - protein, 384 aa, DROSOPHILA
MDRKTSSSSEPLEGAFDAKRMKVVSKTPAEICAIIARDIALNLKMPPRELNNSYADLTSFATSVTGTITTTVQRLAKEAQEVLPMGTVEMMTSLLQAHVCIKMSQIGLTESVSGDAKRFEVWLKGRQEVYTLQASTIGVKEMWVAEIKRVLFNQLEKLKGDQIARYNIRHQSLWQKSSCEAPNITHCSLRRTECFELPLNDSNRNTNIRSEKTCLSDQNIVNGPSVQDQHEKNSWSSDCSDIDEDETINPSSIPRVRKQLRDIIISNVSNVTQANVKYRLTKANDNERLKCRANRERKAKGIGSRVQDTGTTDAHIDICRQMVRHFRHIIVPLSASSRIEVASSTCDYDCHVHPVRNIVLEQVTHEGFRRLGCINVDEDVLSFL

SEQ ID NO: 21949 - DNA, 3766 bp, DROSOPHILA
aatgtatgtacatatggatgtacgtacacacactcatatacatatatatacatatatgcagcacgtgcgtgcctctgaaaacgagaaaacattatcggctgatgtaagcgatgcgcggtgcttaacttaatggttttgctaggtatggggaaggggtacttgccggcgttgaagagaaagtagtgcgccttcatgggcagcagctccttatcgatggtggccttcatttcggcgtaattacgttgacccgcggcacaaagatcaatactatcggtgctaaactagcgcgtttttcagttcattcacaaaaaatgcgagggcaagcagaaagagcatgtgcctgcacactcacacagccagcaggtgttgttatttattttgcatgtgtgtttttgcacgcgggatcacgtttctgctccaattggaatccgctgagttggtttaatccgttttcctttcaaagaatcaacacttttgctcgttggctattcgaagtgcaagggaacttgtcgcacttttagcacgaattgagtgccgcaccacgcacagtccgcggaaatcgagggctccggctagatggacatccaaaacacgactgaatggagccgctggcgttacgagccgagtgtcaacatgtttggttgtgtttgccgtcgtttgtttacgaatccgccttatctgcggcacaccaattattataaactgaatacgcccaccgacgaacaagaagaggcgcccggccgctcggttttttattagcaacacttaaataaacctaagaaaaaaaaaaaacaataatggcaaacacagctgattggaccgactagggatgggagttggtccagctagagatggcacttgcttacaagcgaaaataacgagctttaatgtattttaaaatatttgtctatttagaagattattgaaaacgtccaatagcttctataaattataatacacaattttttgctcaaaatatttcccagtatcaaactcggtctttgtttatgcacatttttatacgcatttcatttgtacacattcgctcgaactagtgggtaacttaaattacaatgactctatgcgtgagatgggaaactcgtggaaaacgtagaaatcgtggctaattgcagacgccctcattcgaatatatggctgtagtgctgctggtatacgtgtatgtagttctccttctcctgcggcgtcatctgggctatcaggttgtcgtccagttggtcgagcggatgcggtcgtccagccactagcacagtgggcacatcgtcgtcctcctccgcggaatctgagttgatataattgtcgaagtcgacatcagctgcaagtacaaaaacgtatattagaacccataaaagatgagatcgagaaatggttggtgcttcttacgaatcttggaattttcgatgtccttttcgtcgtcgctggaatcgctagagttggcgttcgatgagcccactcgcatacccttcatatgcggctccttctggcccggctgcttctcatgctgcagcagcacggacatgatgtcctcgttttcctttcggttgcgatgcccagatccgcttgccgtctgcaccgcatcggccgcgccatcggcagcatccgtgtcggttatcacagtgctctctgtcatccaaatggggcgcgacttgcgctcaatcaccgcatccgaggtgtcgtcgccgccaatggtgacgtccacacgagtttcctccacggcaaagccctggtttctcgtcgcctcacccgaccacgccatgccgtccggtcgcgtggcgttgggtttgttcagtcctcgaatggtgtcgatgtccacgggctccggttcgagcacctctggcgccagcttgatgccctccacctcacggagcaggtcgtacagtggctgcagctgctcgttgaagtgcgctagcattaggcgggagtctttcttgggcatggcggcgctgtcctcctccacggaactgccgcagaaggtgcaccggaactccagcgtggccatgtcgaacagctggtccgcttcgaggtccgtgaatgttttggaacacgaagagcacttaaaacttgctctactggtggcatcacgctcctccgtctccatacgcttgcgcatgagatccagcttgtacttcaccacgttcacgaaggtcttgtagttgatgaagtagtaattgaccttctgcgccttaccatccggccccgtttccattttaagcctgatctggatgaacttgtcggtgcgcagcgtggttatccgggcccttaactgcttcttctcgaagcgcaacagctcgccgatgtcgtcctccttcatgcagggattccgcaccagcatgtcgatgataagcgcatcctccagggaatagaatccacggaccacgaggcgcgccagttgcttcagactgctgggcacctcggtcacgtaccgcacctccgtcttcgctggcgctgcgttcgctgcagccgtcgatgtcgacgacattgtgtgtttatctggaggatcggcattattaagatatatataaactgattttttccttttgttgcgagtgctctcctcacgccacttaccagactctcgaaaccggaactccggaagcagagcactttgcggttattcaatgcaggcagtgggtccgtggatcttcatgggtctaccggcagtcatctgctcgctgtttgcccgtatttcgtatgattttccacggcaaaaataaaatttccaccgccaaattcttctttgtgcagcaatgtggccaaagaaattccttcgaaagtcctcgaagcaacgcgaaaacccctaaataagcctcgcctttaggtgaaacacttggatagaagggtagctacgcttcaaaccgatttttagcccgcacaatttagggcattgccacaccaaacttttgaaaaactcatttcaaaaacgtagcgttgaaaaacattttattagagacattaatttagcgaagaatttaataatacgaaaataatttagctatatttactttaaaccaataatgttgttgttaactcgaaagcattttgtagaaatgtgtttatacatttaacaatttttttagaaaccaaataaccttttaacaactttttactactacggaatttgccagatttgaacgcactacatttacatgtttgtgcaatggctttactaacaacttcgcatctgagcgctgtttgctttgaatgtttttgaccgcagaaatgagtgaaaataatccaacaagtcgtcctctcgccgcctttgtttatccgctcgaagtgcttaatatttcatgctccgctgtctagggtcgtctattttttaatgcgaacttcgccttgcgttcgagtgcattccggtgtaatcccccggaacgaggctcgcccacataaaaaataccatggctacaggagcagaagccaagcagaagccaagcagccgccgcgggggtggactttccacgggatcagaggtcgggggcgcagacgtctccttgcgtgtttatttggcagccaacacacttctgttgtcctcgatgaatgtcatggatataattggacgcacaatgcgaagtccgaatcagctgctccatgtttacaaatgccaattcaacagacagaaaataggcaaatttatggaacacgacgaatcagtttccaaagaaattatttttgcaaaaaaaaaactcgtgtttaactggaaatcctatcaaaaagattctttcattgactaatgatcaaattagcattt

SEQ ID NO: 21950 - DNA, 1620 bp, DROSOPHILA
ttgctgcacaaagaagaatttggcggtggaaattttatttttgccgtggaaaatcatacgaaatacgggcaaacagcgagcagatgactgccggtagacccatgaagatccacggacccactgcctgcattgaataaccgcaaagtgctctgcttccggagttccggtttcgagagtctgataaacacacaatgtcgtcgacatcgacggctgcagcgaacgcagcgccagcgaagacggaggtgcggtacgtgaccgaggtgcccagcagtctgaagcaactggcgcgcctcgtggtccgtggattctattccctggaggatgcgcttatcatcgacatgctggtgcggaatccctgcatgaaggaggacgacatcggcgagctgttgcgcttcgagaagaagcagttaagggcccggataaccacgctgcgcaccgacaagttcatccagatcaggcttaaaatggaaacggggccggatggtaaggcgcagaaggtcaattactacttcatcaactacaagaccttcgtgaacgtggtgaagtacaagctggatctcatgcgcaagcgtatggagacggaggagcgtgatgccaccagtagagcaagttttaagtgctcttcgtgttccaaaacattcacggacctcgaagcggaccagctgttcgacatggccacgctggagttccggtgcaccttctgcggcagttccgtggaggaggacagcgccgccatgcccaagaaagactcccgcctaatgctagcgcacttcaacgagcagctgcagccactgtacgacctgctccgtgaggtggagggcatcaagctggcgccagaggtgctcgaaccggagcccgtggacatcgacaccattcgaggactgaacaaacccaacgccacgcgaccggacggcatggcgtggtcgggtgaggcgacgagaaaccagggctttgccgtggaggaaactcgtgtggacgtcaccattggcggcgacgacacctcggatgcggtgattgagcgcaagtcgcgccccatttggatgacagagagcactgtgataaccgacacggatgctgccgatggcgcggccgatgcggtgcagacggcaagcggatctgggcatcgcaaccgaaaggaaaacgaggacatcatgtccgtgctgctgcagcatgagaagcagccgggccagaaggagccgcatatgaagggtatgcgagtgggctcatcgaacgccaactctagcgattccagcgacgacgaaaaggacatcgaaaattccaagattcctgatgtcgacttcgacaattatatcaactcagattccgcggaggaggacgacgatgtgcccactgtgctagtggctggacgaccgcatccgctcgaccaactggacgacaacctgatagcccagatgacgccgcaggagaaggagaactacatacacgtataccagcagcactacagccatatattcgaatgagggcgtctgcaattagccacgatttctacgttttccacgagtttcccatctcacgcatagagtcattgtaatttaagttacccactagttcgagcgaatgtgtacaaatgaaatgcgtataaaaatgtgcataaacaaa

SEQ ID NO: 21951 - protein, 429 aa, DROSOPHILA
MSSTSTAAANAAPAKTEVRYVTEVPSSLKQLARLVVRGFYSLEDALIIDMLVRNPCMKEDDIGELLRFEKKQLRARITTLRTDKFIQIRLKMETGPDGKAQKVNYYFINYKTFVNVVKYKLDLMRKRMETEERDATSRASFKCSSCSKTFTDLEADQLFDMATLEFRCTFCGSSVEEDSAAMPKKDSRLMLAHFNEQLQPLYDLLREVEGIKLAPEVLEPEPVDIDTIRGLNKPNATRPDGMAWSGEATRNQGFAVEETRVDVTIGGDDTSDAVIERKSRPIWMTESTVITDTDAADGAADAVQTASGSGHRNRKENEDIMSVLLQHEKQPGQKEPHMKGMRVGSSNANSSDSSDDEKDIENSKIPDVDFDNYINSDSAEEDDDVPTVLVAGRPHPLDQLDDNLIAQMTPQEKENYIHVYQQHYSHIFE

SEQ ID NO: 21952 - DNA, 5304 bp, DROSOPHILA
gtactcctctacaataccgtgctgaaacccctctggacatacggctgtgaactatggggaaacgcttcaaaaaccaacattgaaatcatacagcgagctcagtccacgattctgcgaactatcactggggcaccatggtccctacgcagcgaaagcatccatagagacctccacataaatcttgtcaatgaggaaattcagatgaaaaaaagtaaacatcaagcaaagctcgccgcacacgaacatcctctcgcgaagtcgcttacgcgagtctacagtcagagccgactgaagcccaaagattctccagcccagcaaagaaatcctagggccgtctctaactaatacaattacttcatattgtaattaatataagttatataataagatttgaataattattgttagtctcacaaaaagagaagatccaataaataacgcaataagttaaaaaaaaaaacttacaatagttaagatcaaaatcattttgcaaatatgtatgttggaaattataagccctccttcaaagattgaaaattacctgttgctctttgtgcgtattaaatttattgaaaattttgtatcatgtatgtttagctaataagcctttttattagctattttaaagaaatgaaaagaccatgcttatgtagcgatttcgaagagggagagcttagataacgaagatattgttgcacaactgaggcgccgtaaagattaactgtgtcttcaaagttggcttgtaagcaaaaaacaattttaggaagtgctcttttttattcggagatgcagactgactaaacagaaaaaaagcacacagtatcttaggcatacagtaaagtatcatagctgaacagtcaacccaacaattttagcgacagtagaaatatgtatttagagacccgaagtgcgctgcaggaggtgttacataggaagggtacaagggacaacagtttcagtgcacgaagtaaaaataaaggatgatcaatcagtcaaacagcggtattacatgaagaacccgaagtacaggtagtattcaaggccaaagtctacgagctattacaaaaaggatgtatcgagccgtccagaagcccgtacagctcaccaattgtgattgtggaaaagaagacgggacaatggaggttgtgtgtggatttccggcagataaacgcaaggtccgtgaaggacgcgtacccgatcccgatcctggaccagttactggcaacgtttcaaagagcattggacgaaataatagggcccgaaatgatgccgttggccttcgcatatcagtacgatatcatagtgatcggacggacgttgcaggagcacatgcgcaacttgaaagaagcgtttcggagtctaatgccggctgaaagtacatgcggataagtgcaaaatctttaagagaaagccacaatacttgggtcaccgcgtgacaaatcaaggtattgggacggatacggagaaggtagcggaaatagcgcaggtgaagcctccacgaaacgtgaaggagctgagacagtacttgggagtggcgtcgtggtacatatgtttcgtacccgattacgcgacgctagtacagaccctgattgcgctcctggagaagcaggcaaagtgggagtgaaccgacgcccaccaagacgcattcgaggccgtccaggctggtcggcttcgctgggcgcgatccgcatacagcagtgcgatcaaggcaagcggtcgacccgactcctgtaaaacgctgcacgcagcagaaagtaactactctgcaacggaaaaagaacgaccccaactcacagctccatatacctcgcaagagaaccccacggaaagggctaaccggaccgtaaaaacaataatcgcgcagttcacaggtgccgatcagagaaaatgagacgagaactggctggagctgcagctggcggtaaacacatgtgtgtcggagaccacgtgatactcggcggcattcatcacacagggaagggagccgaggctgtcgaacgagttattcgacgagcaggagaccgggacgagcaggtgtacacagacacctgggaagaatgcggaaggacatctttgatctgcggagaaacatggagagggcggcgcaggatcaggcgcgccactatcattttcgaagatggtcgtggaaacgcaaggtgggggacacagtgtgggccaaagagcaccatctgtcgaaggcagttgacggcttcgcggcgaagttggtgccgaggtttgatgggccgttagatatttcataagaagtatttacgcattttgcgacttaataagcgaattaagagttctttatgcagtacaattatctgcaatatttacaggcttttgttggtgatttaacatatctttaatgtcatcattacttaacatttttgtgttaactgcatacaattttgccagagtaatagtttccatttagggtttcaagtcaaatgttaacaatcataacctatttacctgcattggttctggtgggggttgtaccttgcaattgttatttaaattcaaattaattcttttgtccaaagttcccgcttaccggccaattattatgctgattaatattctgattatggttctgattattattccaattattattcattctatttgatgtttagatgatgttagtttcttattctgacactttgccaaaacatttggcaagtctagtaggtttagagaaaagagtaaaataaggaattaagaattctaagagcgttactcctaattgttctattcatttccttggttatttctctgtcatttgcatatgtcattaaaatttttgttatgagtaaagcaattttcttgttaactttgttgtagaattctgtaatgctttagcgcccctgtctaaggatgcataattcagattcgagaatatggattggcctttaatctttataaacaaaatccaatctggaaagaattgcgttaaagtttaaaactgtatcatggttagttagagcatcatgtgttgctcccatgattttataacgtagtattggtaaacagataagatattgttcacttcgaattttatatagacccatgacagtttctgccgcttcttacttgcctagaactctcaactttggtaaagatttaattacctaagcggtagtgtcgcactttatagttgggtcaattgtttgcattttataaactctactacatttctgctagcgtttaactgcccttctgtcccttcaatttttttggtcacttctcccaattgtacattttttaatcgggtaattaattccattttcagattcatggcgctggttggtgctgaacctccggttaccattattaaatttaattttcaaaactattaaattttccagattgttttctttaattaattgatacatttgatgttgaaatgtttaattttaaaactctatggtattccttatagctttctctaattttattaatttcttttaaagacttaatattaatttctggtcacgatacattttgttggagtcttattaggtcctttaggttaattgtcctgattatttactgtcaattgtttgtatttagctggggcgggggattaccatcaggtcatcctttcttcttgttgatttttttatttttgggatattttcggtaatagtttttggctttttgtttcaattgtctttcttgctgagtctgattattattattcttgtgttctcgtagtttgtattaagaatttagtccacatttttaaatataatattcttagttggattattgcatttataatttccaattaagtttttccacgatcactgccacagtagttagatgtcgttggattaatgtggatgttttaagaatgtgagtggttagcggcgcgagtttcgttttatatttaacttattattgttaatatttttttagaacttttgaactacaccgctatacgttgggcgctaattaatcgtcccgattcagtctgatttttaaatcttaatcctaatccactcaacctcggccagaagcttttatttagaattctcttgaactttatactgaaattatttcacagcattatgaaattgaaatttgctgactggtgtttacgttaagtttggtcatttatcggatggttaagtgctggcgacaaaaacaaaaacaaaggaaatgctgctgagatcggggtatgaaatttgtttatcaacagagcagggtgctatatttacgggtgggataacttatatgtattgtaattaatcgcacatggggcggttatatatacatacaacttttattttaataaaattgagtttcacgttatcagatgcgctgagctgatatcttacttgtaatctcaggtatgcaacataaaataaataaaataaatagctattagataatgaatatattctgattcactcaaaattactttaatatggcaacttttgaaaatttgattataactagaaaaaatagcgctaaaatttggcattgttaagatttcaatattttagcgacagtccctctcttgtatagttgttgtgttatctaacaggagcattctaattttcagcaaaactgtggacggtatgcatatttaaaatcacgttgttctatggtataccatgtggtatagacccactcttgtccaaacaggcccttaaaatataaattgaaatcgatgggtcgtttccatatcgatattttctcaaatttttgagctgtccaaaacaataaatacatacattaaatatacctttaatacaatacattgaagtcaaaatacaattttaaattgctaatcactatttcgccgaatttgcataaacgcatgagaactatgaccgactaagcaagttatctgaatgcagtagctgaaccccgaaagctagagaacaaaaagtataaatgtcggaatcaatgtcaggtgatcacaaaattttattaaaaggacattcctcccaatatttaaaacttaatgttggtggtcatttatattataccacaattggaacactgacgaaaaacaatgacacaatgctgagcgcaatgtttagtggtagaatggaagtgctgactgattcggaaggtttgttacatgttcttatacggaataatattaatatacaaaattctaggatggattttaatcgatcgctgtggaaatcattttggtatcattcttaattatttaagagatggcactgttccattaccagaaactaacaaggaaattgcagaattgcttgccgaagccaaatactactgcattaccgagttagctatttcttgtgaacgggcact

SEQ ID NO: 21953 - DNA, 1184 bp, DROSOPHILA
cggtattacatgaagaacccgaagtacaggtagtattcaaggccaaagtctacgagctattacaaaaaggatgtatcgagccgtccagaagcccgtacagctcaccaattgtgattgtggaaaagaagacgggacaatggaggttgtgtgtggatttccggcagataaacgcaaggtccgtgaaggacgcgtacccgatcccgatcctggaccagttactggcaacgtttcaaagagcattggacgaaataatagggcccgaaatgatgccgttggccttcgcatatcagtacgatatcatagtgatcggacggacgttgcaggagcacatgcgcaacttgaaagaagcgtttcggagtctaatgccggctgaaaagaaagccacaatacttgggtcaccgcgtgacaaatcaaggtattgggacggatacggagaaggtagcggaaatagcgcaggtgaagcctccacgaaacgtgaaggagctgagacagtacttgggagtggcgtcgtggtacatatgtttcgtacccgattacgcgacgctagtacagaccctgattgcgctcctggagaagcaggcaaagtgggagtgaaccgacgcccaccaagacgcattcgaggccgtccaggctgcagtgcgatcaaggcaagcggtcgacccgactcctgtaaaacgctgcacgcagcagaaagtaactactctgcaacggaaaaagaacgaccccaactcacagctccatatacctcgcaagagaaccccacggaaagggctaaccggaccgtaaaaacaataatcgcgcagttcacagagaaaatgagacgagaactggctggagctgcagctggcggtaaacacatgtgtgtcggagaccacgtgatactcggcggcattcatcacacagggaagggagccgaggctgtcgaacgagttattcgacgagcaggagaccgggacgagcaggtgtacacagacacctgggaagaatgcggaaggacatctttgatctgcggagaaacatggagagggcggcgcaggatcaggcgcgccactatcattttcgaagatggtcgtggaaacgcaaggtgggggacacagtgtgggccaaagagcaccatctgtcgaaggcagttgacggcttcgcggcgaagttggtgccgaggtttgatgggccgttagaataaa

SEQ ID NO: 21954 - protein, 303 aa, DROSOPHILA
MPLAFAYQYDIIVIGRTLQEHMRNLKEAFRSLMPAEKKATILGSPRDKSRYWDGYGEGSGNSAGEASTKREGAETVLGSGVVVHMFRTRLRDASTDPDCAPGEAGKVGVNRRPPRRIRGRPGCSAIKASGRPDSCKTLHAAESNYSATEKERPQLTAPYTSQENPTERANRTVKTIIAQFTEKMRRELAGAAAGGKHMCVGDHVILGGIHHTGKGAEAVERVIRRAGDRDEQVYTDTWEECGRTSLICGETWRGRRRIRRATIIFEDGRGNARWGTQCGPKSTICRRQLTASRRSWCRGLMGR

SEQ ID NO: 21955 - DNA, 2854 bp, DROSOPHILA
cctctgctccttgtgggctattttacggcctcaaggatccaacacaaaagctgcacacgcacacacctgaggctggaactgaagcttaacctgaaatcggccccgattcccagtcactgtcccgactcccgactgcccgcccactcttgtaagacaattatgaaatgccttttttatagtcctattattgccggggtcctgggacttgcaggactcgcagaaggacatcgtgctgccggataagtgcggcgtacaatcgggctttgttatatggccaagatcgctttgtcttggcctgccgtttattaaaaataaacgtgcgtgaggcttgtgtaagaatgtccttttttgcagcgagaaaacaaattttccactcctccaagtgattaaatttaaaatgtttagaaaaaacgaacgcacaaagtgtttcgtgaaaggtaattgctcctaagaagcttaagtatctctttcttttagcatacaatttttcagcgaattaaagctcactccttttatgaccatttcgggttaccaatttaagcttgtacagcaaaatatatataatgttgtcgactggcaacatgtatgaaacgaagaacaacttcgggggaaacacaaaaattgagttttaaaaacttttgttttacaaaagttaaataatattatagtttaagggtatgtaacacaaagaatatatgtaacaaacaccaattcacccacttgtttttctggctgtatgaaaatatgctttgattaattcctcataaaaaaaacttccaaaattgttcaacataaaacaagcactgaaaaaaaagagcaaagcgatgattttgaaatatttctcacatattctaaacataattcacttaaaaataaattaaaaatagttgtaagtttattatgaacctcattccaatttgaaattaccgttatcccactttttgatgttggcaaccctagaacactactcggtattccaggggcacattgcgtacggtcacactgcttggcggctttgagtttgcacgactaattcaacacaaatttattaaatacagtgtaaacatgcagcatgagcccgaagatcagacttttcaactccaggcactggagatctgtgagccggatagcagttttgacccccagaagccgccagagtccggggaagagtacctaatgcacatgttctacgagaggaagcgatgtccagctgtggtgaccaaaagatcatccaaaatcaggaataacacgggaaataccactttagagatgttggacaatgtaagttcggcttactctccactgaacagttactaactaactatgttttagcccgagttgcctccgttcaagtgcctgctgcccacgcccgaatggcgggatgagcaagttaaatccttccaagcagcccgctcccaggtcctagttcttcgtaaggagttggccaacaacaactacgaccagtccggggaaccacctttgacttccgaccaggagaaatggaaggaattctgccggaatcagcagcccctcctgagcaccctgctccatttgacccaaaacgacttggagctcttgctggaaatgctcagcaagtggctgcaggatcccaacaccacggtagaccttctccacgatgtctggctggctcgctggctgtatgccaccttggtctgcctccaccttccactggaacctcacgtgttcagcacccttcgatacatcgcccgaacctgcatccatctgagaaatcaacttaaggaggacgaagtgcaacgggcagctccctacaacctactactaacgctcaccgttcaggttttcgcacagaatgatttcaaggattacatataggtatcatattcccagtttagaaaccactaatttaagcgcaaattcgactattttgttaactaaaaagccaaaagctacgctggtaattttgtttatataattactctacgtttagatactatttttatagttttctgtggctgaattatattcttttggttagaaaacagatttatttatgcatatcaatcaagagacaacatattgttaatgaacctaaaaattagatcgtaaaacataaaagtttaaatataaaagtaatgataatatcttaatttgaatgaagaagttacccatttaacccatgtacacaagtcaattatttctggaaaatgtactgaaatgtgaccatttattgaaaatatccattgttttccgggttgcaacataagtcttttaacaccaaaggttttcttaaaacataagacacaaataattttgctaatttattcagtaagaaggaaacatgcgcctgtaggcctggcatatatcgcagctgttgtgatgctcatccaaaggagaactacagctggacaagtggctgcactgcgtcagcgaggaactctggctaaggctacttaattgcgttgtgctggagcaggaggacaatcgccgttcctgctgtttctgttgggcaggagagccagctctccaagcggcgtaactgccacttggacaacaattggattgcctcccatgacacacggtttgctgctttcgaggctgatccaaatggcccaggcaacggctctcaacgtggcgattgacaggaggagcagagtactccctggaactggagcagctgcacacctttttccgatcctgcgtggtcaactgcgcagatagctccaccttgggcgccaggatacccggaaaagcaggcgtcgccttcatcaacagctgaacattggagctgtgggcacagctcaggcgcggaaaagtgggttgcatcacatccgaaagactgcccacgaagtaggccaaccttcggccattctgc

SEQ ID NO: 21956 - DNA, 803 bp, DROSOPHILA
cactgcttggcggctttgagtttgcacgactaattcaacacaaatttattaaatacagtgtaaacatgcagcatgagcccgaagatcagacttttcaactccaggcactggagatctgtgagccggatagcagttttgacccccagaagccgccagagtccggggaagagtacctaatgcacatgttctacgagaggaagcgatgtccagctgtggtgaccaaaagatcatccaaaatcaggaataacacgggaaataccactttagagatgttggacaatcccgagttgcctccgttcaagtgcctgctgcccacgcccgaatggcgggatgagcaagttaaatccttccaagcagcccgctcccaggtcctagttcttcgtaaggagttggccaacaacaactacgaccagtccggggaaccacctttgacttccgaccaggagaaatggaaggaattctgccggaatcagcagcccctcctgagcaccctgctccatttgacccaaaacgacttggagctcttgctggaaatgctcagcaagtggctgcaggatcccaacaccacggtagaccttctccacgatgtctggctggctcgctggctgtatgccaccttggtctgcctccaccttccactggaacctcacgtgttcagcacccttcgatacatcgcccgaacctgcatccatctgagaaatcaacttaaggaggacgaagtgcaacgggcagctccctacaacctactactaacgctcaccgttcaggttttcgcacagaatgatttcaaggattacatatag

SEQ ID NO: 21957 - protein, 245 aa, DROSOPHILA
MQHEPEDQTFQLQALEICEPDSSFDPQKPPESGEEYLMHMFYERKRCPAVVTKRSSKIRNNTGNTTLEMLDNPELPPFKCLLPTPEWRDEQVKSFQAARSQVLVLRKELANNNYDQSGEPPLTSDQEKWKEFCRNQQPLLSTLLHLTQNDLELLLEMLSKWLQDPNTTVDLLHDVWLARWLYATLVCLHLPLEPHVFSTLRYIARTCIHLRNQLKEDEVQRAAPYNLLLTLTVQVFAQNDFKDYI

SEQ ID NO: 21958 - DNA, 4356 bp, DROSOPHILA
aatacagtgcgctggatcccgtggagcagttgttgttcacgttatagaccggaatgccggtcattccgacctcgtagatggcccgctgtccgcaggtggagtctccataaacgtagccggccaccgcctgctgcacttcctcgaacttgattcccgcatcctggagagctttggtgatggcttctttggcgaagtccgggtagcaagcatcagctcggcgaccgggcttctcaaactgcaggaaattggaaggagatggtcggatagatattaacacccaaggcggcacaaaggtcaatcattcgcagacgaaccttggtcatgccaactccgataacgtaaactctggtcttggtcatttttcggctgttggttctttgcgggatcacggattggactttctgtatcgactgaagtggatcaacaggttgcggacttatatacgatagatatgataaggctagatctgtcggttcagcttgtttcccgttaaatttgttgttcaccttctatgcagttcataaatatgcatctgtaaacgagaaacgtgcatacaacataagcatttggtgggaatctctatcttttagaaagtctaataataatgtaataatgcttataagagcactttccttgtttgtttataagtttaaaagcgctaaatatgacagcactatcaacagggctaccagctatgatacaccgctttgatatttttcaatgcctccaaaactgtggactcaaataagaggccatgagcgttgcaaaaaataactcatttaatggtcgaatttttccattgacttggtttttatggctatttcaatttcttatagatatttatttgtataaaaaaaataaactgcattcactttattcagggctgcacatatgtacgcagggcgcgtacttgaatattcgcttccctaaattttttgttatggcaatgtggtcaccctgtggaaatcggtatcgatagcccgataggttcagtcgtatgaaggcttaagcctcctaatatcgccaacaatcgccattcattttaacatttagttaattgctcttgagcactagttgtggtattacctgttttactcgcgatcctgtagctgcaaaatgtcgaagacccgtgtgtacgttgtcggtgtgggcatgaccaaggtgtgtgttccacgaattagccatctgagaggataaacataaacaaaaccaagacaaagaattcaaagagcagctttggtaacttgcaattagctttaatattgagcaatcttaagcgattgccggactttgaactgcgctgcacttcgtacgctaatctgctctcgaatgattttgtccccatgctattatcataaatataattattataacgactatcagaatcagtcctttgccccctggagtggcacgattaggattttattacactgggctgaccatgtcaatctctgagaatctggtaacaaaaaccctgctttcgtgttccctctgcagttcgagaagcccggtcgccaagctgatgtgtgctacccggatttcgctagggaggccatcacaaaagctctccaggatgcgggcatcaagtacgaggaagtgcagcaggcggtggccggctacgtttatggagactccacctgcggacagcgggccatctacgaggtcggaatgaccggcattccggtctataacgtcaacaacaactgctccacgggatccagtgctttgtatttggccaagcagatcgtggagagcggaaacgcagattgcgtcctggctttgggatttgaaaagatggagcgtggatccctgtcctccaaggtacaagattgcattccttaaaaaaccgattactaatccaatattttactctctaatagtactttgatcgcgccaatcccatggagcgtcacatcaccgagatgggtgagctggccgagatcggagctggcccaatggctgcccagatcttcggcaatgccggcaaggagcacatgaagaagtatggcactaagcccgagcatttcggcaagatcgcttggaagaaccacaagcactccgtcaataatccgtaagagttaactataatcattgcaatgccttatctaatcttcggacatatttcatccgcttagctactcgcagttccgcgatgaatacaccctggagcagattatgaagtcgccccaggttgtggagggagtgctgaccaagctgcagtgttgtcccacttccgatggatctggagctgccattctcgcctccgaggccttcgtgcgtcgccacggattggaaaagcaggctgtcgaaattgtaggcatggagatggccagtgacccggcgtccacctttgccgacaagagcttgatgaagattgctggaaccgatatgacccgtctggccacccagcgtctgttcgcaaagagtgggtacaagccccaggatgtccaggttgtggaactgcacgattgcttctcggccaacgagttgatcacgtatgaggcacttggactgtgtggagagggcaacgccggcgagttcatcgacgctggagacaacacctacggtggcaagttcgtggtcaaccccagtggtggtctgatctcgaagggccatcctctgggcgccacgggtctggcacaatgtgctgagctctgctggcagctccgtggattggctgagaagcgccaggtgcccaatgctcagttggctttgcagcacaatctgggactgggtggtgccgttgtggttgccttgtatcgtctgggtttcccagctgccaacagcgtggttcgcaatctgaccgctgcgggcaaggctgctaccagtgaggatggctttaaggttgcgcccctgctgaaactattggagcaggccatgcaggaggataaggacaatctgatcgaaaaggtgcgcgccatttacggctttaaggtcaacaacggacccaatggacagaccggtttctgggtaattgatgccaagcagggcaagggaaagatcatcttcaatggaacacgtgagcacattccactttataaagcaaattactgatactgtgttcggttttctattgcagaaaaatgtgacgttacctttatcattagcgacgatgatgtctttgagctgctaacaggaaagctgccaccacagaaggcctttttccagggcaagatcaagatccagggcaacatgggctttgccatgaaactgatggacctgcagcgatccgcccaaggcaggatcgaggagctgcgctccaagctataggctcctcttcttgtgcaatgcagcatcttggtggctttggatctgttaaacctagttatatgaatatatccagcatacgctttttatacgacttttgtattatttctctagattaaactgttattttcgtaatcgaaagattaattttttttttggggtttgccaaattaatttaatcaaaagcattttctaattttgtacgatccgaatctttattgtttcttcaacgtgtaagctgtcttagtcctaaagttatatatggtatatatatatatagtaattatcaatgtgtgtattgttctacgcacttttaaaacacttttcaaaaaagttgttgagaaggaaatcaaactgggacctttaaatgtattgttataaggagaacgagtgtctctggccaataggtgcatgccttttaaaaatacacactataacagctcagtgtaccagcctgcattaaaaaactttcaattgttgtatctaaaaagtgcttgcggtgtggttggtggtgtaaataaattaaaaaactacatttctatcaagtgccgcatatttagcttataaacctatgtttcgttatcaaatataagggtgtttgtatgtgaagtttaggactacatataagcttttggctatatacaaaggaagatctctgggcactggatgagatttcactcagttcgcacaaaactgtggctgctcaatatcgcagaacaaggaataacaattttcaaaataaatggtataatagcgactcctgcagaatgtaaaacatgatatacggaagtttggcgcaccacttaaaaatatataattgtatggccaaccttcagtaagtattgaaatccctttcagagttgagatcttcctttaaaggattcagctactcgaaatccgtttaacgtaataacgagtgcttttaaatttacaaaatatatagtttcacataaagtccaaataggagcctctactctcgctttccgtccatttcttttcccagtttcaaaagctattgttggaaccggcgtaagaggagagcgaactattcgttgttgccgaggatgtcgatgatgaggagttgctatt

SEQ ID NO: 21959 - DNA, 1837 bp, DROSOPHILA
aaggcttaagcctcctaatatcgccaacaatcgccattcattttaacatttagttaattgctcttgagcactagttgtggtattacctgttttactcgcgatcctgtagctgcaaaatgtcgaagacccgtgtgtacgttgtcggtgtgggcatgaccaagttcgagaagcccggtcgccaagctgatgtgtgctacccggatttcgctagggaggccatcacaaaagctctccaggatgcgggcatcaagtacgaggaagtgcagcaggcggtggccggctacgtttatggagactccacctgcggacagcgggccatctacgaggtcggaatgaccggcattccggtctataacgtcaacaacaactgctccacgggatccagtgctttgtatttggccaagcagatcgtggagagcggaaacgcagattgcgtcctggctttgggatttgaaaagatggagcgtggatccctgtcctccaagtactttgatcgcgccaatcccatggagcgtcacatcaccgagatgggtgagctggccgagatcggagctggcccaatggctgcccagatcttcggcaatgccggcaaggagcacatgaagaagtatggcactaagcccgagcatttcggcaagatcgcttggaagaaccacaagcactccgtcaataatccctactcgcagttccgcgatgaatacaccctggagcagattatgaagtcgccccaggttgtggagggagtgctgaccaagctgcagtgttgtcccacttccgatggatctggagctgccattctcgcctccgaggccttcgtgcgtcgccacggattggaaaagcaggctgtcgaaattgtaggcatggagatggccagtgacccggcgtccacctttgccgacaagagcttgatgaagattgctggaaccgatatgacccgtctggccacccagcgtctgttcgcaaagagtgggtacaagccccaggatgtccaggttgtggaactgcacgattgcttctcggccaacgagttgatcacgtatgaggcacttggactgtgtggagagggcaacgccggcgagttcatcgacgctggagacaacacctacggtggcaagttcgtggtcaaccccagtggtggtctgatctcgaagggccatcctctgggcgccacgggtctggcacaatgtgctgagctctgctggcagctccgtggattggctgagaagcgccaggtgcccaatgctcagttggctttgcagcacaatctgggactgggtggtgccgttgtggttgccttgtatcgtctgggtttcccagctgccaacagcgtggttcgcaatctgaccgctgcgggcaaggctgctaccagtgaggatggctttaaggttgcgcccctgctgaaactattggagcaggccatgcaggaggataaggacaatctgatcgaaaaggtgcgcgccatttacggctttaaggtcaacaacggacccaatggacagaccggtttctgggtaattgatgccaagcagggcaagggaaagatcatcttcaatggaacacaaaaatgtgacgttacctttatcattagcgacgatgatgtctttgagctgctaacaggaaagctgccaccacagaaggcctttttccagggcaagatcaagatccagggcaacatgggctttgccatgaaactgatggacctgcagcgatccgcccaaggcaggatcgaggagctgcgctccaagctataggctcctcttcttgtgcaatgcagcatcttggtggctttggatctgttaaacctagttatatgaatatatccagcatacgcttttta

SEQ ID NO: 21960 - protein, 544 aa, DROSOPHILA
MSKTRVYVVGVGMTKFEKPGRQADVCYPDFAREAITKALQDAGIKYEEVQQAVAGYVYGDSTCGQRAIYEVGMTGIPVYNVNNNCSTGSSALYLAKQIVESGNADCVLALGFEKMERGSLSSKYFDRANPMERHITEMGELAEIGAGPMAAQIFGNAGKEHMKKYGTKPEHFGKIAWKNHKHSVNNPYSQFRDEYTLEQIMKSPQVVEGVLTKLQCCPTSDGSGAAILASEAFVRRHGLEKQAVEIVGMEMASDPASTFADKSLMKIAGTDMTRLATQRLFAKSGYKPQDVQVVELHDCFSANELITYEALGLCGEGNAGEFIDAGDNTYGGKFVVNPSGGLISKGHPLGATGLAQCAELCWQLRGLAEKRQVPNAQLALQHNLGLGGAVVVALYRLGFPAANSVVRNLTAAGKAATSEDGFKVAPLLKLLEQAMQEDKDNLIEKVRAIYGFKVNNGPNGQTGFWVIDAKQGKGKIIFNGTQKCDVTFIISDDDVFELLTGKLPPQKAFFQGKIKIQGNMGFAMKLMDLQRSAQGRIEELRSKL

SEQ ID NO: 21961 - DNA, 4528 bp, DROSOPHILA
ggtgtgagaggaccatcgtccatttacgtgaatgtgatctgcatacgacggcattcaacggatccggtaagcactttatccctttatcccagtgatatagactaatggtctttccttgagagaaaaccccaggaaactagggtggatagaaactagttagtgctaccataatgggaaactatatagccagcatttcgaataaaactatcgaaagtggtggctaagaacttgccgatcaggctaacgccgcaattaatcagacgtcctggtcgttgacccacatcgtgcacatttccttggagctcttcctgtcgcccacttcggaaccgcattccgcacctgcgaaggacccgttcgtgcaattcaatgggcaaccaattaacctatatacagcaagtggccaccttcttgagcccatgccaactcctccagccccacctccacctcctccaggtagtgcgtgttcccttgggctagctaagctttgttaaatttcggtaaacacggttcccggcgttgcggcttttcgaagcactctataaacaattgaaaacttgccagacacaacgcccatttcaattttagaatcaacaaagcgctagttcctacttcaacagcaacgactgctgcaagtccatttaaacgcgaaggagccatcgaaggtggaatcaagatctgaaatagattaacaaagcattcatttctagcgaatatctgctgatttccgttggagctattacatatatttatcatcaaattttgccactcaagcgaacatctcaagatcgcagactttggtctagtcaccactagtttcctggtcctgcagtccgacaggaacgcttctgtccaacccctttggcgcctgcggttagccccaacttcgtggccataaattagccattaaggcttccgtttgcgggtagaaatctagttgggtggttgaaggtagcggggatgtcctggtttggggagcgaggtccgctaaacatgcaaatgtatgcaggacatttggcggcgtggttgggctttgaactcctgcgaggtcagtgaccaggatacgtgtgctaaaaagaaggtgtttgtcttgaagtgcacacactcgaaaatggattcttctacacaggcagaaaaggggtattagttcgttaagatgtaatataatatacaaaataactaagtaatagccaaattccatagtatgagtacgagtagtcaattatggttttgcattttttttttagtgtataccttgctcaatttccacctcaatcaatttctccacagagcttcgtcattcccgttaacgtgcgagtaactgatgtgaatgacaatgccccccagtggatcggaacgccctacactctaactctttcggaggtgaccgttccgggcactagaatcctgcagggcgcccgtgccgaggatgccgaccaaccgggtcccttctctacggtggagtaccaggtgctgccaggaccgtactcggagtacgtgcagtttctcaatcctctggaaggcacgctggtgctaaagaaagccctcgactacgaacagcttcagaatttcacggtgaagctgagggcgcaggatcagggaacaccgccacgtcactcggacacgttgctgcgggtggtcatcacggatgcggatgatcagaacccaaagttccagcgagagtcctacagcgctgagataccagcggatggtaggccaggagagctgcgcatgcggccggagcccctgaaggcggtggatcaggacgagggtatttgtgcgcccattcagtacacgatagtccagtcgcaggatgccaagtacttccgcatccatccgcacaatggagctattagcctgctgacacccatcggatatgcggatgtggccaatggggcaacgttggtggtgaaggccacgcagatcgacaatccagatcgttatgccttgaccactgtccagttgacgcgacctggaagtcacagtgatttgagcactctggccttcgtccagaagcgattcgtgatgcgcattcgcgaggatacggcagttgggaatcggattctagcactgcccaccaataagcccggcaaacatctcaagtacgtcattcccgatcccgtaaattcgcagttctttagcgtaggatcgctgggagaacttgtgctagccaagccactcgactacgagaagatgaccaagcacgagttccaggtcctagccaccgatggcatgaccaacagcaccgcggaacttacactggaggtgattgacgtaaatgactgggaacctcggttccgggaaacgcactacgagttcatggtgcccaaaagcgtaagtctttgaaaagtgttattttacttcttaatcttaccttcaaaattactcacctccagcagtccctgcaatctcgagcggattcctttgagggcgtgctcatcggcaaggttgaggctgctgatggggatcgtaatgacaaactggaactctcgctgcgtggtcagcacgctggactgtttgaaattgattccactggaaatatctacatgcgtccggagcagctacagagtctcaacgagtccacggtccatctgatagccatcgccacggacacgggcgttccacccaggagcacttccgttccggtcagtgtcaccatggagggtctgacgctggcccggtccggatggaacagcaacatgttgggcatgttcggcatgataatgggcctctttctgatgatcatagtggcgttaagctgctacatagtccgatcgaagaagcaaggcaagagtgcatccagcggattgggactcggtcggaatcgggtgcacagccaggcgcacagcagcgtgtcgtctgccaatctcgttacccacgaaaagctagcggggaatggcaacggcaacggagccagcgtaacgagcggcggagtctccgtgctgcacatgaagcacggcggtaacattaccatggccaatccgatgaacaatggcttgcatcacgtggccagtggagccagtagtagcatggccctcggtagttccgccgccttgctggagcgggaacgagagagggagcgggaccgggagcgccagcgggagagctatgcggctacagtgcgcagtaagtggaagtcaatcattatcattaccaagggtgccagtcgataacttagttcatccaatttcaaaattaataacgtacaaaaacatgaaattaataagatttgcatctttgatccttcccaacattccgttcccccattctcacccgaaacattcactattaaaagtcttcttgccaggcatagtttcgcgcgcctccgccaatggccagctcttcgaggaggatgagatcgagcacgactcactgcagacggagaacaacaatcggaaagtggcagccacgggagtggcaagcggtggggttaccaccatcagtaccacacccgccaacgcgggctccaatcttctatccgccaccgatgccatgggttcctctgagaacaacttgacggtctacttctagagcgcaggaggggaggcagctactcccggagagcttgtaaatatcgctgctaagtcagtttaggattaggtttaggccccgcacacgtgtatgtacattgagtagaccaaatatagcattgtaaacagacccagcaccagatctaggctaagtccaagcgatttccattgtaaagttttgcttcccagattgtaagaggatccgtccaataaagttttcaactattcaatcacgttggccccttccatgcaaacagtttaccatacgaatctcgttgtttatattcttgacgcttatgttctacttcgattctggtgatcttcacaactttggcatggacaaaacgaaaataacgtgaattaaaaacgcttcactgacttagaacagatattaggatattacaaattcaatgctgggtacgaaagattatttggaatacagacagaggctctcaggggtgtaagatacttggaaatcactataaattcaatatgaattgaagctatagtttcttaagcatatttgcttggcattactttaagattaatgcgttttttttgttttgaaagaataagagagccaccccatatgcattggagtttttgtggcatgaatccagactctttctatctgggcctgcctttacctgccatttcgtttcgtctttcgcttgagcagattaaagtctccgtactgaatgtgattgtcggtcaggaatggcacatagaaggcacgtaacactttgtgcgacttctccggaatgaggaagggcagactcttcatcaccgaccaatctttggatcgttttgaataattgggttccagagccgtatacttgccttcatcaaagtcgacgaggaaatcgcaacggtcgtagtcaaagtacatgtgctcattttcctggttgagatcgttaaaatacggttgcactaccttagtagcattttgaccttcgtcatagtacgcgggcagcatgcctcggaattcggatttcagaaaa

SEQ ID NO: 21962 - DNA, 2037 bp, DROSOPHILA
atgcaggacatttggcggcgtggttgggctttgaactcctgcgagagcttcgtcattcccgttaacgtgcgagtaactgatgtgaatgacaatgccccccagtggatcggaacgccctacactctaactctttcggaggtgaccgttccgggcactagaatcctgcagggcgcccgtgccgaggatgccgaccaaccgggtcccttctctacggtggagtaccaggtgctgccaggaccgtactcggagtacgtgcagtttctcaatcctctggaaggcacgctggtgctaaagaaagccctcgactacgaacagcttcagaatttcacggtgaagctgagggcgcaggatcagggaacaccgccacgtcactcggacacgttgctgcgggtggtcatcacggatgcggatgatcagaacccaaagttccagcgagagtcctacagcgctgagataccagcggatggtaggccaggagagctgcgcatgcggccggagcccctgaaggcggtggatcaggacgagggtatttgtgcgcccattcagtacacgatagtccagtcgcaggatgccaagtacttccgcatccatccgcacaatggagctattagcctgctgacacccatcggatatgcggatgtggccaatggggcaacgttggtggtgaaggccacgcagatcgacaatccagatcgttatgccttgaccactgtccagttgacgcgacctggaagtcacagtgatttgagcactctggccttcgtccagaagcgattcgtgatgcgcattcgcgaggatacggcagttgggaatcggattctagcactgcccaccaataagcccggcaaacatctcaagtacgtcattcccgatcccgtaaattcgcagttctttagcgtaggatcgctgggagaacttgtgctagccaagccactcgactacgagaagatgaccaagcacgagttccaggtcctagccaccgatggcatgaccaacagcaccgcggaacttacactggaggtgattgacgtaaatgactgggaacctcggttccgggaaacgcactacgagttcatggtgcccaaaagccagtccctgcaatctcgagcggattcctttgagggcgtgctcatcggcaaggttgaggctgctgatggggatcgtaatgacaaactggaactctcgctgcgtggtcagcacgctggactgtttgaaattgattccactggaaatatctacatgcgtccggagcagctacagagtctcaacgagtccacggtccatctgatagccatcgccacggacacgggcgttccacccaggagcacttccgttccggtcagtgtcaccatggagggtctgacgctggcccggtccggatggaacagcaacatgttgggcatgttcggcatgataatgggcctctttctgatgatcatagtggcgttaagctgctacatagtccgatcgaagaagcaaggcaagagtgcatccagcggattgggactcggtcggaatcgggtgcacagccaggcgcacagcagcgtgtcgtctgccaatctcgttacccacgaaaagctagcggggaatggcaacggcaacggagccagcgtaacgagcggcggagtctccgtgctgcacatgaagcacggcggtaacattaccatggccaatccgatgaacaatggcttgcatcacgtggccagtggagccagtagtagcatggccctcggtagttccgccgccttgctggagcgggaacgagagagggagcgggaccgggagcgccagcgggagagctatgcggctacagtgcgcatttcgcgcgcctccgccaatggccagctcttcgaggaggatgagatcgagcacgactcactgcagacggagaacaacaatcggaaagtggcagccacgggagtggcaagcggtggggttaccaccatcagtaccacacccgccaacgcgggctccaatcttctatccgccaccgatgccatgggttcctctgagaacaacttgacggtctacttctag

SEQ ID NO: 21963 - protein, 678 aa, DROSOPHILA
MQDIWRRGWALNSCESFVIPVNVRVTDVNDNAPQWIGTPYTLTLSEVTVPGTRILQGARAEDADQPGPFSTVEYQVLPGPYSEYVQFLNPLEGTLVLKKALDYEQLQNFTVKLRAQDQGTPPRHSDTLLRVVITDADDQNPKFQRESYSAEIPADGRPGELRMRPEPLKAVDQDEGICAPIQYTIVQSQDAKYFRIHPHNGAISLLTPIGYADVANGATLVVKATQIDNPDRYALTTVQLTRPGSHSDLSTLAFVQKRFVMRIREDTAVGNRILALPTNKPGKHLKYVIPDPVNSQFFSVGSLGELVLAKPLDYEKMTKHEFQVLATDGMTNSTAELTLEVIDVNDWEPRFRETHYEFMVPKSQSLQSRADSFEGVLIGKVEAADGDRNDKLELSLRGQHAGLFEIDSTGNIYMRPEQLQSLNESTVHLIAIATDTGVPPRSTSVPVSVTMEGLTLARSGWNSNMLGMFGMIMGLFLMIIVALSCYIVRSKKQGKSASSGLGLGRNRVHSQAHSSVSSANLVTHEKLAGNGNGNGASVTSGGVSVLHMKHGGNITMANPMNNGLHHVASGASSSMALGSSAALLERERERERDRERQRESYAATVRISRASANGQLFEEDEIEHDSLQTENNNRKVAATGVASGGVTTISTTPANAGSNLLSATDAMGSSENNLTVYF

SEQ ID NO: 21964 - DNA, 3274 bp, DROSOPHILA
cctttttccgatcctgcgtggtcaactgcgcagatagctccaccttgggcgccaggatacccggaaaagcaggcgtcgccttcatcaacagctgaacattggagctgtgggcacagctcaggcgcggaaaagtgggttgcatcacatccgaaagactgcccacgaagtaggccaaccttcggccattctgccagacggttatctccagctgttcagctttcagtagctcgtgcatctcctccaggcagcccacgctcttgaagtatccctccatcgtgaactgatcgtggcacagcatcggaaagcgaggctccatgggtccagttcgaaagtagtagcccaaggtcttgatggtggcctccaaatatccgtgtgaacaaagccaaacaccgggacaagtgagctgaaaatggaaggagccttgatgtcacaggtacacttcaatcgacatagccacaaaccgcatggagctgcagatctaactttacgtagaatctcttgtgggacatttgctgcctgatcctaagtgaaagtctgccggaaaatagccaactgcttggggcgggaatcgagaattggggggcgaaagcgcatggttctttgttttggagcccactggttgccggggcagcggttgaaagtgaatttcaaagtcgattactggtcgataacgcagggaattttgattgataagcaaaagagttgaaagtgatgtgtatagaatgtatagtgtaactatacaatgtgaagagtacttaaagaattgaatagtttttgaattaattaagaaataatacaaaaatatgatagtaaaatactaaaaaaaatctattttagaataattagctaactcacatttttccatgttttcattttctatagctttaactactgataatacggcttccgtgggaacaaagtatttctcacagtgatagcagcaacccgataggaaatcccgaccacaatgtgcatcactagtcacagcaatagtaaacagcgggcacagtccacaaagaaaaccattgccgccggtagagatggctgcagtttcggatattccagtgcacctgcccaagctgctggctctgttcaagacggtggtgcccaagctggtgaacaacaagcacaagggacagtacggacgcattggagtgatcggtgggtccctggagtacaccggagcgccgtacttcgcggccatttcctcgataagagtgggcgctgacctggcgcatgtgttctgccattcaaatgcgtcggccattatcaagtcctacagtcccgatcttatcgtgcatccagtgctagactgtgtggatgcagtggagagaatagcgccctggttagagcgacttcacgtcgttgtgagtagccccccccccccacctacatacgtatatgctacatttatacaattaaatgctaaatttagaatcgttaaggttattggacctggactgggtcgggagccgggcatcctgaagacggcatccaacgtactcaagctgtgcatggacaccaagaaaccagttgtcatagacgccgatggactgtttctgctcaacgacaatctgaatctgatctgtggacagccgaatgtcatactcacgccaaatgtcatggagttccagagactgtttggcgaggatgaccaggcggcgcgccagaaaatgtccctcctgggagccggagtaactgtcctggagaagggcgccaacgacaagatctatctccctcactgcaacgaagttcactcaatgcctagcggcggttccggtcgcaggtgcggtggacaaggtgacctgctctccggatctttggccaccttcttctcgtggtcactgcagtcgggtgaacccaatcccgccctggtagctgcatgtgcctctagttactttgtgaaaaagttaaacgcggctgcatttcaaaagtttggccgcagcctactggccagtgacatggtcaatcaaatacccagcgtatttcagaccgagttcgaaaacagcgatcctcaatagtcatttactggactttgaactaattccagctgtttgttttttaaaacaaggcgaccattaaccgaattttcaattatcgtgggatttttaatgtctttaacagagaacatattggaatggatagaaatgttatgggaattttttaattgcatttaaacaacgtaagaacatctggttcgttaatttgaaagctgcatcttgttacagataaaatgtttcggcattcataataaaaccatattgattcaattttaataaaccgtttaagcatgacttctgttttaataaacaaataaaataaaataaaagttttttttaaatgtatgtaggataataaatcataaaaaagaaaatagatttgatatagattattttaaaggtattggcgggaaaaagctaagtcgtcggttccgttcggttgttggtgttttgcagcactggtcttctcgcgagcggcatttccacgtcaggtttattattgtttttttggaatttatcaagcagtgaaaatgctcctcaaaagactgcctggctttgtaacactctgggtcgtcctgcagttagccggagctgattcgcccgaggaggagcaaggcgttcgctacgcaaaccgctgcgaagcctgcaaaatcctggccaccgaattggaagctcgacttggagagaccggcaagtcgcacgacgtcatcgaaatcggatactccgttgacgatgtgaagcccaagaagcgcactgaataccggcgcagcgaactgcgactgctcgagtccctggagaacgtgtgcgagcgagtgttggagtacaatctgcacaaggaacgctctgacagcacgagattcgccaaaggtatgtcccagaccttccagacgctccatggccttgtggacaagggcgtcaaggtggatctgggaataccctacgagctgtgggacaagcccccggtggaggtcacccaaatgaagacccagtgcgaaaacctactggaggagtacgaggaaaccatcagcgaatggtactttaagcaccaggatgagaagtcactgaagaagcatctctgcgaggaccatgtgctcaagaaaaaggccgaaagggaatgcctcaaggagcagcttgctcctccggaggctaaaaaggccaaaagggaaaaagccaagggcgacaaggaggagctgtgagccaaataatccaagtatatcctaggaatccctaccatattgtaattccatgtcgaaaaatgtagatgtagtgcagct

SEQ ID NO: 21965 - DNA, 1196 bp, DROSOPHILA
cgggcacagtccacaaagaaaaccattgccgccggtagagatggctgcagtttcggatattccagtgcacctgcccaagctgctggctctgttcaagacggtggtgcccaagctggtgaacaacaagcacaagggacagtacggacgcattggagtgatcggtgggtccctggagtacaccggagcgccgtacttcgcggccatttcctcgataagagtgggcgctgacctggcgcatgtgttctgccattcaaatgcgtcggccattatcaagtcctacagtcccgatcttatcgtgcatccagtgctagactgtgtggatgcagtggagagaatagcgccctggttagagcgacttcacgtcgttgttattggacctggactgggtcgggagccgggcatcctgaagacggcatccaacgtactcaagctgtgcatggacaccaagaaaccagttgtcatagacgccgatggactgtttctgctcaacgacaatctgaatctgatctgtggacagccgaatgtcatactcacgccaaatgtcatggagttccagagactgtttggcgaggatgaccaggcggcgcgccagaaaatgtccctcctgggagccggagtaactgtcctggagaagggcgccaacgacaagatctatctccctcactgcaacgaagttcactcaatgcctagcggcggttccggtcgcaggtgcggtggacaaggtgacctgctctccggatctttggccaccttcttctcgtggtcactgcagtcgggtgaacccaatcccgccctggtagctgcatgtgcctctagttactttgtgaaaaagttaaacgcggctgcatttcaaaagtttggccgcagcctactggccagtgacatggtcaatcaaatacccagcgtatttcagaccgagttcgaaaacagcgatcctcaatagtcatttactggactttgaactaattccagctgtttgttttttaaaacaaggcgaccattaaccgaattttcaattatcgtgggatttttaatgtctttaacagagaacatattggaatggatagaaatgttatgggaattttttaattgcatttaaacaacgtaagaacatctggttcgttaatttgaaagctgcatcttgttacagataaaatgtttcggcattcataataaaaccatattgattcaatttt

SEQ ID NO: 21966 - protein, 300 aa, DROSOPHILA
MAAVSDIPVHLPKLLALFKTVVPKLVNNKHKGQYGRIGVIGGSLEYTGAPYFAAISSIRVGADLAHVFCHSNASAIIKSYSPDLIVHPVLDCVDAVERIAPWLERLHVVVIGPGLGREPGILKTASNVLKLCMDTKKPVVIDADGLFLLNDNLNLICGQPNVILTPNVMEFQRLFGEDDQAARQKMSLLGAGVTVLEKGANDKIYLPHCNEVHSMPSGGSGRRCGGQGDLLSGSLATFFSWSLQSGEPNPALVAACASSYFVKKLNAAAFQKFGRSLLASDMVNQIPSVFQTEFENSDPQ

SEQ ID NO: 21967 - DNA, 2750 bp, DROSOPHILA
ttattggacctggactgggtcgggagccgggcatcctgaagacggcatccaacgtactcaagctgtgcatggacaccaagaaaccagttgtcatagacgccgatggactgtttctgctcaacgacaatctgaatctgatctgtggacagccgaatgtcatactcacgccaaatgtcatggagttccagagactgtttggcgaggatgaccaggcggcgcgccagaaaatgtccctcctgggagccggagtaactgtcctggagaagggcgccaacgacaagatctatctccctcactgcaacgaagttcactcaatgcctagcggcggttccggtcgcaggtgcggtggacaaggtgacctgctctccggatctttggccaccttcttctcgtggtcactgcagtcgggtgaacccaatcccgccctggtagctgcatgtgcctctagttactttgtgaaaaagttaaacgcggctgcatttcaaaagtttggccgcagcctactggccagtgacatggtcaatcaaatacccagcgtatttcagaccgagttcgaaaacagcgatcctcaatagtcatttactggactttgaactaattccagctgtttgttttttaaaacaaggcgaccattaaccgaattttcaattatcgtgggatttttaatgtctttaacagagaacatattggaatggatagaaatgttatgggaattttttaattgcatttaaacaacgtaagaacatctggttcgttaatttgaaagctgcatcttgttacagataaaatgtttcggcattcataataaaaccatattgattcaattttaataaaccgtttaagcatgacttctgttttaataaacaaataaaataaaataaaagttttttttaaatgtatgtaggataataaatcataaaaaagaaaatagatttgatatagattattttaaaggtattggcgggaaaaagctaagtcgtcggttccgttcggttgttggtgttttgcagcactggtcttctcgcgagcggcatttccacgtcaggtttattattgtttttttggaatttatcaagcagtgaaaatgctcctcaaaagactgcctggctttgtaacactctgggtcgtcctgcagttagccggagctgattcgcccgaggaggagcaaggcgttcgctacgcaaaccgctgcgaagcctgcaaaatcctggccaccgaattggaagctcgacttggagagaccggcaagtcgcacgacgtcatcgaaatcggatactccgttgacgatgtgaagcccaagaagcgcactgaataccggcgcagcgaactgcgactgctcgagtccctggagaacgtgtgcgagcgagtgttggagtacaatctgcacaaggaacgctctgacagcacgagattcgccaaaggtatgtcccagaccttccagacgctccatggccttgtggacaagggcgtcaaggtggatctgggaataccctacgagctgtgggacaagcccccggtggaggtcacccaaatgaagacccagtgcgaaaacctactggaggagtacgaggaaaccatcagcgaatggtactttaagcaccaggatgagaagtcactgaagaagcatctctgcgaggaccatgtgctcaagaaaaaggccgaaagggaatgcctcaaggagcagcttgctcctccggaggctaaaaaggccaaaagggaaaaagccaagggcgacaaggaggagctgtgagccaaataatccaagtatatcctaggaatccctaccatattgtaattccatgtcgaaaaatgtagatgtagtgcagctgttgtcgatgcaatttttaaaagtaacacaaattttagtttttgaatgaactcaagcattgacaaactaaatgtagtagttacttaaattccaatgatcttactttttttcgaaatggaaatcattttaagttttaccacctatagaacaaagcgaaaagtgtttaattagcttaagtgaactcactatgtctctcaagctaatctgtataacttccacaacgactgagccacagaatgctactgaaagtttcgcctggggccattggcttattgatttcggccacgaattggggtcgacaattaaaagttgactgccctcaatgaggtggccagtcataacccccagccagaaattcaggtgttcatgccatgtccatgtcaataaatgagattttgcgcattttctaggaacctacggcactgaatggaagagagttatccttaaatacatgtacattttataactaacatttagtatttacgattaaatatagattatctgtgcatacacattttgattttactggggcacctaatatgtcgtttaaaaggtatctcgtcgcgaaacctttcaaagtttaaaaacaaattattttgaatatacccaatttgcattaaatgagtttgtttaattgtctgtaataaatacttcgcgtatatttcaaagtaaaaaatattattataattagtattggattttccatcattaggttctaattcgaaatcactacgggtatcttttagtcgtggagttttcccgcccaaacgagttttgtaaattcagaatctaattcgcagtggcgggcgaaagaacccctagttatccataagcttagagcttcatcacatcccaaggatcgtccatatagtgcaggatggctttgtcgtgcagtctttcgccaaaaacctccttaagcagg

SEQ ID NO: 21968 - DNA, 750 bp, DROSOPHILA
tgttttgcagcactggtcttctcgcgagcggcatttccacgtcaggtttattattgtttttttggaatttatcaagcagtgaaaatgctcctcaaaagactgcctggctttgtaacactctgggtcgtcctgcagttagccggagctgattcgcccgaggaggagcaaggcgttcgctacgcaaaccgctgcgaagcctgcaaaatcctggccaccgaattggaagctcgacttggagagaccggcaagtcgcacgacgtcatcgaaatcggatactccgttgacgatgtgaagcccaagaagcgcactgaataccggcgcagcgaactgcgactgctcgagtccctggagaacgtgtgcgagcgagtgttggagtacaatctgcacaaggaacgctctgacagcacgagattcgccaaaggtatgtcccagaccttccagacgctccatggccttgtggacaagggcgtcaaggtggatctgggaataccctacgagctgtgggacaagcccccggtggaggtcacccaaatgaagacccagtgcgaaaacctactggaggagtacgaggaaaccatcagcgaatggtactttaagcaccaggatgagaagtcactgaagaagcatctctgcgaggaccatgtgctcaagaaaaaggccgaaagggaatgcctcaaggagcagcttgctcctccggaggctaaaaaggccaaaagggaaaaagccaagggcgacaaggaggagctgtga

SEQ ID NO: 21969 - protein, 221 aa, DROSOPHILA
MLLKRLPGFVTLWVVLQLAGADSPEEEQGVRYANRCEACKILATELEARLGETGKSHDVIEIGYSVDDVKPKKRTEYRRSELRLLESLENVCERVLEYNLHKERSDSTRFAKGMSQTFQTLHGLVDKGVKVDLGIPYELWDKPPVEVTQMKTQCENLLEEYEETISEWYFKHQDEKSLKKHLCEDHVLKKKAERECLKEQLAPPEAKKAKREKAKGDKEEL

SEQ ID NO: 21970 - DNA, 3454 bp, DROSOPHILA
taaagaatgtttcataggctctaaatcgagattttgtgaggcttctaatgattgggcattcagcattttttcaagaattttgtaaccgactcaaaaaatctttagaatggttggttattcggatcgcatatacttagcttgtttgtcttatttttatttggatgagcgccaaaattttgctgcgtcagtctggaaaaaattgaatcaaatgtgtatagttttatagaagttgggaagcggaatttatttatttatttaaatatttataattaaaaaaatgaaaatagtcacgttgtttaactagtcagtattcgaaccaacaaatgtaaaatgtatactggtttgtgtctaagctaagcttgtcatattaacggagctgccagatgttaggaagtggggatgccatacattattctaaatttgcgcgcaattttagaagcttatcgtcgtcagaattacaaaaacaaattgaatatgaaaatgggttattgctacttcattattattgtcacgatatatgataatttatacaaaatgtgataaatcccaaattgttaaataatgctttggcttgctttatacaaaaccactagataattaaaatataggtggcctaaattgttgcatgttgttttataattaatcagcaatttgatttggttgtgatcgaccaaatcagtgtgtataattgtagttaaaatgtaaagttcgtaatggattattgaatcgcatttcaaatttctttaaatgcgcccgggtcaatgaccttttgaggtgaccataaattgaaacttatttgtgcgacggcaaccctgttctgggactcgacatgatatcgatacgttaacaacaaagagtctggacgccatcattcttcctctttctcctgaattcgcagacagcgtggcgtcaggcatttcaaacggtaaaaagaacctggcgataaggaaagatttaaaaggcaaaaatcgagtgatttgtgtgatttaacttaagaataatgcttaatgcacgtgacgtgtgtcctgagggcaacgacgaccagcagttggaccacaattttaagcagatggaggagcatttggccttaatggtggaaggcaatgaaaacgaagatccgaggaaagccacttgtgagtacgaggatacgaacgaagatggtgcaacctgcacatcgggcgttttatccgaaatccaggagaacttcggtagactccggttgtgtgacgttactgcaccactcctcgaattccacggtttggattgcttgcaacagattcaaaagcgctcgcgccattttgcattcgacggttctccggccaagaagtcgcgatccggaggcgtgttggtcaccgggccaaagcagaagcaactgcagaaggaaaatgtgtggaaccggaagagtaaaggctctgcgtccgcggataatattgagaaactgcccataactattgagaaactgcatatgattggtctgcacggcgattggtgagtcttctggagtatatcccaaatatatcacataataaaaagctccttatctaaacaatagcttagagcacaacgccgtgctgcgtttgatgaatctgttcagatccctgcatgatcacctgaccgccgatttgggcttctcgcgccaaaactcaatgccctcggactatctgttcgatatgccggtgaagagcacgatgcctaagagcttgaatgtgcgctaccaactgcaggtgctgtgcaccaaagtagagcgcttccttgtccagcagcgccgcaccttggaggcgaatcgccacttcgatttcgagaaatacgacgagtgtgacaagttgcttaagggtttcgcatcctatttggacaacttcaaactgcttttaaagcccaaaatgcgcaatcgaaacggaaactcggggagcaatgcggacaagtgtaagctgtagatttgcaagcaaccattcagctattcctgcaacgattttattatttacagtccatactcagcgcatggagagattgctaattggtctgcgcgattggatcaaggctgcgcatctcagtgtgcacgtatttaactgggaaatggatctggagcaccgctactccggggccatgaccgaaagccacaagtcgttgaacgagcgggccatccttttgtccggtgccgagctaagggcggccgaagcgcgtggaatcagtgcggaggatctgttcatcgcccagagatacaaactgggaggtccgatctattgcgttctggagcagcatgagttcctctccgctctgatcgccaatccagagacctatttcccgcccagtgttgtcgccatttgcgggccacagaagcttggcgcagtgagcatggagcagccgtcagcgtcggaggaggagtttgaggagaccgaggaagtgccatcatcgccacctcgtcacaccggacgtgtacctcgcttcagaagctaaactaatgctgtgcacatcgataaaagaatgacagcaaatatgcaatttaaaaaagctactcttctcatgggaagcaataatttcgtaaagtaaacatatctatagtgtaagatatatttgtccaatagtgcggactccatatttgtattcgtgaataagcttatataagctttttaaaaatatttatcaaatcgatacaaacaaaatcaaaatgaaaacgatttattacccctgttttgagattgataacaaatttatataagtttaactgtgtttacatttatttggcaaaactacaaatgtgtttgcttttcacttttataaatctgtattttacttaaactttagaaataagaaatcctttagtgcctgaatttattttgcaactacgttttatttgtatgaggaacttaccagtttttcttatttgctttgcatttgtattttgaaagtcaaataaatatttacgatttgtgtttggactaattagggtgtttgtactaaggtcttagactacaaagagctgttcgagcggcagtttgccaaagatcctgtccaccaccgacttggctatcagtccgaaggcctcgccaatgcccggtttcagttcattgaagatgtccttccagttctcattgataagcgcgtgcatgttctcgctgagatctttctggccgttgaacagattttccagctggtaggtcacatgggatggatccagctcaacctttatgttcatcacctcggcgtaggtttgatgatcgcccttggagacgcgcttcaatttgatctgtgcacgtacctttgttctagctgcgaattccagaaacacattaaaaattttagatttcaaagctgtgggaggcaaatcttactgaggcgtatgtcagcaatgccatttccggtgatgggcagaatgagtattcttccgtccaccgagtagggtcctctgactcctatttctggaacttccatgaccagctcgatggagcggctgaga

SEQ ID NO: 21971 - DNA, 1329 bp, DROSOPHILA
atgcttaatgcacgtgacgtgtgtcctgagggcaacgacgaccagcagttggaccacaattttaagcagatggaggagcatttggccttaatggtggaaggcaatgaaaacgaagatccgaggaaagccacttgtgagtacgaggatacgaacgaagatggtgcaacctgcacatcgggcgttttatccgaaatccaggagaacttcggtagactccggttgtgtgacgttactgcaccactcctcgaattccacggtttggattgcttgcaacagattcaaaagcgctcgcgccattttgcattcgacggttctccggccaagaagtcgcgatccggaggcgtgttggtcaccgggccaaagcagaagcaactgcagaaggaaaatgtgtggaaccggaagagtaaaggctctgcgtccgcggataatattgagaaactgcccataactattgagaaactgcatatgattggtctgcacggcgattgcttagagcacaacgccgtgctgcgtttgatgaatctgttcagatccctgcatgatcacctgaccgccgatttgggcttctcgcgccaaaactcaatgccctcggactatctgttcgatatgccggtgaagagcacgatgcctaagagcttgaatgtgcgctaccaactgcaggtgctgtgcaccaaagtagagcgcttccttgtccagcagcgccgcaccttggaggcgaatcgccacttcgatttcgagaaatacgacgagtgtgacaagttgcttaagggtttcgcatcctatttggacaacttcaaactgcttttaaagcccaaaatgcgcaatcgaaacggaaactcggggagcaatgcggacaagttccatactcagcgcatggagagattgctaattggtctgcgcgattggatcaaggctgcgcatctcagtgtgcacgtatttaactgggaaatggatctggagcaccgctactccggggccatgaccgaaagccacaagtcgttgaacgagcgggccatccttttgtccggtgccgagctaagggcggccgaagcgcgtggaatcagtgcggaggatctgttcatcgcccagagatacaaactgggaggtccgatctattgcgttctggagcagcatgagttcctctccgctctgatcgccaatccagagacctatttcccgcccagtgttgtcgccatttgcgggccacagaagcttggcgcagtgagcatggagcagccgtcagcgtcggaggaggagtttgaggagaccgaggaagtgccatcatcgccacctcgtcacaccggacgtgtacctcgcttcagaagctaa

SEQ ID NO: 21972 - protein, 442 aa, DROSOPHILA
MLNARDVCPEGNDDQQLDHNFKQMEEHLALMVEGNENEDPRKATCEYEDTNEDGATCTSGVLSEIQENFGRLRLCDVTAPLLEFHGLDCLQQIQKRSRHFAFDGSPAKKSRSGGVLVTGPKQKQLQKENVWNRKSKGSASADNIEKLPITIEKLHMIGLHGDCLEHNAVLRLMNLFRSLHDHLTADLGFSRQNSMPSDYLFDMPVKSTMPKSLNVRYQLQVLCTKVERFLVQQRRTLEANRHFDFEKYDECDKLLKGFASYLDNFKLLLKPKMRNRNGNSGSNADKFHTQRMERLLIGLRDWIKAAHLSVHVFNWEMDLEHRYSGAMTESHKSLNERAILLSGAELRAAEARGISAEDLFIAQRYKLGGPIYCVLEQHEFLSALIANPETYFPPSVVAICGPQKLGAVSMEQPSASEEEFEETEEVPSSPPRHTGRVPRFRS

SEQ ID NO: 21973 - DNA, 3546 bp, DROSOPHILA
ttatgacattctccccgccgcctgtcgtcgtccagaatctgcaggtgaagtcatcgctaacggaggccagcagttcgccgtcgcaaacccaggatacatcgttgacgtagtccccatgcccacggagcacctggagcgaggtgaactggcccagatcggtgcggtatagtttaagctggctgccgttggccgcgcacaaagtcacattgttgggcgtgcagttgagcgaggtgtccggcgagaaggccagtgcgctcacgctccgctgctccttttcgcccaggtccatgtcctgcaggcgtgtgtacccgaactcgccgctctcctcctgcggattaagggttaaccattcaaaatcattcaaccttcactggtcttatgcatggaaacccaccggcagtccaacgagcagcagactcaagtgtttcctgaaggccactgcgattaggttgtaggcaaagtcattggtgcatatatcgtagcagtagatggcttcattaagctggatgctgtggtcgggctcgatgacagatcgcatctttctataaatattgtttgttattcgcgggatatatgcaacaattagccggcgccaaaaaaatgtttattttagtatgaccaaaaatcagtggaagaattttccaagattttacacttttaaaaaacagaatacgcaaagaaatgttattcgaaaatatattcgttattatgtttaatgcttacattattgtgcctcaagttttaataaaaatggctagtcttaaaaagaaacataacaatatttaagtagtcatacgtcggcgaactttttaatgatagtaatagtagtaatgcctaatatcgactgtgtagcgtttgctttttataaaatttattgctaatacacgaataaagtcagaataaattttgaactcaagcaacacacactccagtattggaaagcgtgagcagcagagttgccatcgcccagctgttcagcattatttagtgcattctcgggcaagttaagttggctgcgatttaccccacttccttttccgtgttagctgtgaaagaaaaaacatgccggtgggttccgaattgcgttaaaattgaatttaaacacagaaaactcaaccgaatgataaccaaaaacggccgcttattaccgccaaagtgtccagtgtaaacggagcaagtgtcggccgataataacggccctgaaagactgtaaaacaaatgtctggcccgcttccattgaatgtgtgcgatacaagccacgcatggcgtgcgccagtgaaattgcaaacagttgtgaaatggccaaatgagatttaaatggaatcttgggacttacaggaggaattgattgcactgtcatgtgaaatcgacggatatccttgcacataacctagaacacgcatttgcgaatttatgttgttgttgcctggagtctgctctgcatttgttgatacaccgagagaaaatgtgccaattgtctggcttagaatcgtcaagtggcctgataacattgtattcaattctattgttatctatttcccaaatgaattgttaattgagaacttaaagatcaaagtagttatactttaaaatatattttcaagtatttaaattggtagaaagttacttcttcgttaattaataaagaattggttttcctattggatcaaagttggaccaacacgtttggcgccaaagaaatttcgacttataactaagatttagaggattatctaggcttgaagtaatccaacacatttggccgtaatcatatagtataatatatacattaaatgaatttatactaattttgaaactattttcaccttgcagctagcaaaagatcttctgcaccctctgcccgccgaggagaagcgcaagcacaagctgaagcgcctggtccagcaccccaactcgtacttcatggacgtgaagtgccccggctgctacaggatcaccaccgtcttcagccacgcccaaggcgtcgtggtctgcgctggatgcgctaccattttgtgccagccgactggaggacgcgccaagctgacagaaggtatgctccaaatgctcactgtccaatgttccttcgcaattaacccaaacgatgtctttctttcaggctgctccttccgcaggaagccacagtaaaatgggactcgcgatgaaccacaaattattaattttttaataaaaactctaaaacgtaaagaaaccacagaacccatacgagagaaagcttgtaattcaattgctgcggtcctttggttcattgtgctttgtgaattaaagaattaacgatgttgtggtcggctaagtgaaaaaaaaaacagttcttgtcgtatttgtttatagaaagtggataattgccaacaggatagatagtggagctcaatcgctggggttccccgataagaaaccgcccataatggaagctcttgtgtgtgcaaatacccttgtgcggcaaaacttcaggaatttttcactagttatgcttagatctaaccattgattaacttcacaacaataaagaatgtttcataggctctaaatcgagattttgtgaggcttctaatgattgggcattcagcattttttcaagaattttgtaaccgactcaaaaaatctttagaatggttggttattcggatcgcatatacttagcttgtttgtcttatttttatttggatgagcgccaaaattttgctgcgtcagtctggaaaaaattgaatcaaatgtgtatagttttatagaagttgggaagcggaatttatttatttatttaaatatttataattaaaaaaatgaaaatagtcacgttgtttaactagtcagtattcgaaccaacaaatgtaaaatgtatactggtttgtgtctaagctaagcttgtcatattaacggagctgccagatgttaggaagtggggatgccatacattattctaaatttgcgcgcaattttagaagcttatcgtcgtcagaattacaaaaacaaattgaatatgaaaatgggttattgctacttcattattattgtcacgatatatgataatttatacaaaatgtgataaatcccaaattgttaaataatgctttggcttgctttatacaaaaccactagataattaaaatataggtggcctaaattgttgcatgttgttttataattaatcagcaatttgatttggttgtgatcgaccaaatcagtgtgtataattgtagttaaaatgtaaagttcgtaatggattattgaatcgcatttcaaatttctttaaatgcgcccgggtcaatgaccttttgaggtgaccataaattgaaacttatttgtgcgacggcaaccctgttctgggactcgacatgatatcgatacgttaacaacaaagagtctggacgccatcattcttcctctttctcctgaattcgcagacagcgtggcgtcaggcatttcaaacggtaaaaagaacctggcgataaggaaagatttaaaaggcaaaaatcgagtgatttgtgtgatttaacttaagaataatgcttaatgcacgtgacgtgt

SEQ ID NO: 21974 - DNA, 715 bp, DROSOPHILA
caagttaagttggctgcgatttaccccacttccttttccgtgttagctgtgaaagaaaaaacatgccgctagcaaaagatcttctgcaccctctgcccgccgaggagaagcgcaagcacaagctgaagcgcctggtccagcaccccaactcgtacttcatggacgtgaagtgccccggctgctacaggatcaccaccgtcttcagccacgcccaaggcgtcgtggtctgcgctggatgcgctaccattttgtgccagccgactggaggacgcgccaagctgacagaaggctgctccttccgcaggaagccacagtaaaatgggactcgcgatgaaccacaaattattaattttttaataaaaactctaaaacgtaaagaaaccacagaacccatacgagagaaagcttgtaattcaattgctgcggtcctttggttcattgtgctttgtgaattaaagaattaacgatgttgtggtcggctaagtgaaaaaaaaaacagttcttgtcgtatttgtttatagaaagtggataattgccaacaggatagatagtggagctcaatcgctggggttccccgataagaaaccgcccataatggaagctcttgtgtgtgcaaatacccttgtgcggcaaaacttcaggaatttttcactagttatgcttagatctaaccattgattaacttcacaacaataaagaatgtttcataggctct

SEQ ID NO: 21975 - protein, 84 aa, DROSOPHILA
MPLAKDLLHPLPAEEKRKHKLKRLVQHPNSYFMDVKCPGCYRITTVFSHAQGVVVCAGCATILCQPTGGRAKLTEGCSFRRKPQ

SEQ ID NO: 21976 - DNA, 3191 bp, DROSOPHILA
gttccagttcgagaggattggcttcttctccgtagatcctgacaccagtgcgaaccacctagtgttcaaccgcactgtgggattgaaggaagatgcgggcaagaagtgaacgggatttcgggaacccacaaatgaaaagaaacaaaatccgtatcacattaaaattcgatttataaaatcaatgttcatttctttccctccaccatgatgatgtggtagccaaacttggtcttaatcgggggatctgtgtacacgggattgttgacagtggagatgggcaatgcgaaggcggcgtcctgaaatgggcccaccatcgctcctcggatctgccatccgagatcgccgccttgtcgcgccttgtcctcgctgtaagcagccgctacctcggggaatttttggcctgcctttagcttctccatcgcttcggtgatcttgccctgcttctcgcacaagatgtgacgaacctttacagcattgcctcccttcttctccttaccggcagctgcagatggcaaaattcatttgaaggataggatttttgctttagtcgtaagcacttacacttgtcttcggcggctggctttttgccacctttccctgcatcctttccactcttcgcatcctttttcggtggcattttcgttcaatgtttttaaattgcaaattcgaaacaagtaaacagtttggttggagcagacacatgcggtcagtgctgcgcactaagatctaaccttttttatcaaaccactttatttcaagatctagtaaatatttatgttgttgattcatatgggtagccattgcacatttaatttattatgaataaaattaaacaaaaagttttgaagaacaaaatatttgcttggccgcttatagccacatttgcatctctgatgtgcgtcgaaagctttcgatagaaatccggtttgcgtcaacggtcacacttagatgcactttctaatcagacgtttaactttgggtgcagataagccagcgtaagagattagagaatccgggaattatcgcaccctcttgaaattgtcatcatggaactgagctgggagatagtgttctgcgtgggcattgcggtgctggttcatgttctggtctacgtgttcgtcatggccaagaaaccgaggagcattgtgggtcgtcatgtggtggtcaccggcggctccaagggaatcggactctgtctggcggtggagtgcgccatgaaaggcgccaatgtgacggtgatagcgcgcgacgagaaaatgctgagtgagtaatgttctggctaggaaaccccacccaaaatactcttatctttgatatacgatcttttttgcaggcggagcagtggctctgatggaagtgattcgccagcggccagatcaaaagttccagtacagaagtctggacataagcggcgattatgaccaggtggccaaagtgcttggcgagatcgaagatagcttcggccccatatacactttaataaactgtgccggaatggccatttgcggtgtgttcgaggaggtctcagtccaggatgtccacaagctgatgaacgtaaacttcttcggcacctataactgcacccgttatgtcctgcccaaaatgaagaaagccggcgacggcattattgtaatcactgcctcacaggcggctatgtttggcatctatggatacggtccttactcagccaccaagtacgccctgagagcgatggctgaaacgattgcaatggagtctcgggagcacggggtcagcgtcactctggccatgccctgcgatacgaatacacccggattcgaggaggaggagaagtcaaagcccagggaaaccaaaataatctctggtggaggaggtctcatagagccggaagttatggcgaaagctatacttaaggatgccctggtgagtctgttacccatagttaatattcacgcaatctaactagaatactttttcttatttgtagaagggaaaattcacctcaactgttggagcagaaagctggctgatcaccactttgggtggagcattgcttccttgggatggcttcttcaccaatcttctgcacgccatagttttgggaccactgcgaatagttagctacgctctgcacaagtacttcaatagtgttatacgcaaatgcgctcgagaggataaggccaaggccacatcgcaagtggagtccaagtgaaatctctcttgtcccgctgcccttaaagtattcccaagtgcccataattaaatcacttttttataattaatcaaaatgtgcgattgttttgcatggttagcctattcatatattacaattcccgtattatcattcatttttatatatatatttgtatgtgcatttgaacttttttattattgccgtgctagggttttaactatttgtatcgtgttttctagactagatgacgtgtgctcgttttgttggtgtgtgcttcgttttaacaaaaataaaatgtatttactgttcagaaaatgagtcgtttttaaataaccacttagtgattgtgctaatcgctaaagcaatttcacgcattggcctaatcaaaattggtttcgtatcttaaaatcgaacagcaaactacatgcagaagcgattagataaatacaaaaaccacgccacaaaagccatcaaccttttccaaatggttcaaaattcaacgataaattatttggttttcttttgtctttctttattcataagacgcacccagtgtacacttcctatagtttcagttttcaattcgcctttttttaacattctgtatagttaacgctaacaaaaattgtataatcataatgcaaaatatatatatatatatgtttgtatatatatttagacatattattatagcatcttagcacgataatcaaaaataattggattcaaatacagtaagtctactttttggatagaagagttattaaattattgttaggattaggatgaaaaactaaattagagctgatctgcagtatttcggtatcgtttgggatttacaatagatagaaagcattgtaaataaatataaatttaaacaagcagttagattaaacaataaacaaggtattttgcacaagacgccgtacgacaactcaacagtgaaacgaaaaatgctacacaaaccgaaaaggaaaatcatattataagcttgtttctggttgatgttatgctgctg

SEQ ID NO: 21977 - DNA, 1057 bp, DROSOPHILA
agattagagaatccgggaattatcgcaccctcttgaaattgtcatcatggaactgagctgggagatagtgttctgcgtgggcattgcggtgctggttcatgttctggtctacgtgttcgtcatggccaagaaaccgaggagcattgtgggtcgtcatgtggtggtcaccggcggctccaagggaatcggactctgtctggcggtggagtgcgccatgaaaggcgccaatgtgacggtgatagcgcgcgacgagaaaatgctgagcggagcagtggctctgatggaagtgattcgccagcggccagatcaaaagttccagtacagaagtctggacataagcggcgattatgaccaggtggccaaagtgcttggcgagatcgaagatagcttcggccccatatacactttaataaactgtgccggaatggccatttgcggtgtgttcgaggaggtctcagtccaggatgtccacaagctgatgaacgtaaacttcttcggcacctataactgcacccgttatgtcctgcccaaaatgaagaaagccggcgacggcattattgtaatcactgcctcacaggcggctatgtttggcatctatggatacggtccttactcagccaccaagtacgccctgagagcgatggctgaaacgattgcaatggagtctcgggagcacggggtcagcgtcactctggccatgccctgcgatacgaatacacccggattcgaggaggaggagaagtcaaagcccagggaaaccaaaataatctctggtggaggaggtctcatagagccggaagttatggcgaaagctatacttaaggatgccctgaagggaaaattcacctcaactgttggagcagaaagctggctgatcaccactttgggtggagcattgcttccttgggatggcttcttcaccaatcttctgcacgccatagttttgggaccactgcgaatagttagctacgctctgcacaagtacttcaatagtgttatacgcaaatgcgctcgagaggataaggccaaggccacatcgcaagtggagtccaagtga

SEQ ID NO: 21978 - protein, 336 aa, DROSOPHILA
MELSWEIVFCVGIAVLVHVLVYVFVMAKKPRSIVGRHVVVTGGSKGIGLCLAVECAMKGANVTVIARDEKMLSGAVALMEVIRQRPDQKFQYRSLDISGDYDQVAKVLGEIEDSFGPIYTLINCAGMAICGVFEEVSVQDVHKLMNVNFFGTYNCTRYVLPKMKKAGDGIIVITASQAAMFGIYGYGPYSATKYALRAMAETIAMESREHGVSVTLAMPCDTNTPGFEEEEKSKPRETKIISGGGGLIEPEVMAKAILKDALKGKFTSTVGAESWLITTLGGALLPWDGFFTNLLHAIVLGPLRIVSYALHKYFNSVIRKCAREDKAKATSQVESK

SEQ ID NO: 21979 - DNA, 4940 bp, DROSOPHILA
atgctctctagcgctttgagtacgccccacatttgggagttctcgcgctgaaggggtttatctaatctgtgacgaggggcgagaccgaaaagcggacggcaggctactgcccacctgtaaatcaggcaggtgataagcataatcgcgggcgacgtgttgtaggtaggggaatgggagcacatatataagagtgtatatatagtcgtctaccttctgccaggacatcctccacggtgaccgtgacgcgtcccactgtgaagaccttgcccacgaagctgttcttctcgttcgaggacgacgagctgctgctgttgggcggattctccagtcgagagttctcattgcgctcgaacttagacaggattttcttcattttcccccgattttcactagaaaatgtttactgccccagcagcacaacacacacacacacactcgcgagcacacacgcacactagctaacacggtcttaattgcctgcgcgtaggtgtttttggcaatttttaattttgcgagggcggctgacggtgggcggggcgtcggtgccgctggccaattaatccactttcgagtcgtatcggctagctgaataaagctattctgcgcactttgtgtttttgcatgcacacacacaatgcagtggaaaaagaaagttgttcgattttcctgctgctctcgagttgttgggccagtgtgaccagggcgctttgctgcagtcagatgcgcaacccgcggctggtgcagccgcctatcgatatatagataagttggttgcaatctcgaaattctgaaaacaaggaaatccccgtttacaaaataggttttatgataacaattttttgtaatttgatccaatttaaaaagataatatggttctactttcaataaaacatatagctacagttgcattaaactatcgcgcagttttaattagctatgctgccaacatcgtgtttcccttatcaatatgttatcgattgtgctggtgcaattgtaaacaagcatctctagcaaatggtcgctaaattcgcaaaattgtagtttgctgggataacaatgataaatacggccaagtactttgctcttctagagagtttaaggtttagtaaagctctaggtaaattggttaacatcatataataattgtagtatccctaatactaatatttcgacagcaaatacggcgaataactcagggactgccgaagccttggaaatcaacctgcgaattttggaaaaatatgctaaactcgagattggtcagcaattgcatgagctgtgcctggaatatcagttaacagacgatcacgaatctagtattgatcccgattcggatcgtactatatgctatataataagattgcaacatgtgctacattcgatcatgaggaacattaatttccacagcgacgccaaggaggatcttatttcggtagcgcacctgaaattgtgtatccaggcttcccaagaattatcatattactcgcttcgatgccagctacatgaggatttctacaagtcgcccatcttttgtgaggctcaggggaaaatcaaagctaacttttcattgatgcttctaagcattcagttctttattaatctactgcatattcgacaataccacatagccaactcgatggagctggtgcaaagggatctactggcggccattgtgagtctacgtgtgcagcaagactctccactgctggataaggctatagcctacctctggcaatatgaatccaaagcagatttctttcgcaacatcttgctttttaaagctacgactctctgcccaactctggcccaattattgcaccgtcaactcttaggaaagcttcacttaccccaaggatttgctagtcttgttgaggccctgcatcaaaatcccaatgtgaattcttccagaaatgcggaaattgtggctagtattgtggccagaaaaggattttctcagttagcgcaagagaagatggttctccaggtgctagaatattgtaagttctatctgcagaatgcggacaaaatgtgcgccggtgtcctatcgctcagaagactttacgatttaagtgatacaaatcaaaagctgataaaagaaatattattcaaacactgggaaacgctttgtaacccagaagacattattaatggccttatcttaatggatcaccaggaactgtgcaatcgcattctcttatggcagcatctcttttgttcttcaaccgtagcttgcttacccagtaatctactcgttccctaccttcctttgctgctccaactctacgatggccttccaatggaattaccggcgtcatcgcagatttctgccattattttgcgttgtctggacaacagagaaatgaaaaacgaattacctgcgatactccagaagctgtttaaatgggaaattgagaaggaacctccttggaagtgtttaaacccacgcattataatcctgccttccatgaacacaactcaaattcaggttaaagtagctcacaaagatcatctagcagatcacgatatgggcagaatattgcccggtctactcacatcaagctctcatcattccctcacctgcaaagttttcctctctcttctgggcttcatagctaaacagataaatgataaatcttcagccagcgtagattttatttcatcagaagcagagctcaaagactttctgcactccaaatatcaactgaagctagatttgctcattgctttaaaccaaatggtagcccaccaaccattaagagctcagctatcacaacataccaaggagcttctacatatactaaaagacttgcttgtccaccgatctagagagcaagataccacggatcagatcctacttctcgttctaaacctcttgcaggaaattcttgagggcagtgagaatattcaactttcagaggcctgtaaggaactgaaagaacaattgcacctgttgggtactcgatcttccaaccctcttatccagcaatctgtaaaatcattgcttacaataattcacggcgcatggcgaccaagtgaggctgttaaaatacaaccttttcaaagagctcggtccttgatagaggaaaaacaatcccacatgcaagtgtatggaattcagatgatgattgatttgctgaaaaaaagagatcctgctaccttagcgcagggtcaacttatcatagcgttagccctgaccactctcaaggataaggaatcctacaccttcttaaattgtgttcggctctttgtgtcgcttgttcatgtgatggagtccgatgtgctggacaaattgagtgatgagtacctatcagagacggctcacttagactaccgcctcgtagtgggtgaagctattctgaaagtcgctcaggagttgggtaagcaatgttctacacagctaagaataactcctaaactttcatactaatcccatccaggtcctctttgctttcgatacaaggctgttcttctcaactgcttcatgtacggctcccggtctcctgttcacgaattccggatgtcagcctttgccaatcttgcccagctttgtcgccttttggcctttcaagtgcagaacttcttccacgagttactccaacttgttaatagcgaattaaccaccggaggatatgttccctctaagcgtgcagcagtcctggtcttagctgaactattaaacggcatggagaaccttctggattaccaggaaatgttactccccatttatcgccttttaaaagcgattgaagcggatgaatcctgtgatcctcaaatgcgtcagcatgctgcaaacggtctgaaaattttaaacaaaaagtgcacaaaactgatacaatctgccttggaggagaaatcattacagaagcagattaaggtgttgggcattaaggacgatgattcacctcaaagaagaaaccgacatatactggaactgaattaaaggctatcttagaaacctacacaagttttaattttgttttatacacaatagatcaatattacagtttcgaaaagaaatgcgatagtggcgaatcagtacagacattactgacataaaggcagaacagaaaataggacttagttttggactttggttacattatttgggatagaggcatcacttgccgatagagaactcattctcgatcttgtctgcgatcatcttggcaatggccaagctactagtagcgcccggcgatggggcgtttctgcagtgaagcactcgcttggctagcgctcccgatccttgtccgcgatcgaaaacaaaatcgtccaccagattgccatccagatccattgcttgggcacgtactccagcgggaccacgctggatatcgtactccgtaatatccgggatgtacttctgcaacgccttgatctgcaggttaatgaaccacgatttggacatctcgctgagtccgaaaccgatgtacttgctcgccatctttacgaagcccggatagcgcagggcgtcgaaaagctcgaaaagattaatgtcaccccagctggaagaagtgaagtgtcagacaagtttaaatatgagctctaagaagacttacgtgtaaccttcgcgtttcagagccagaacggcatttggtcccagccagatagatccgtccattcgcggcgtaaagtgaactcccaggaaggggaaacgtggatccggcaccggataaatattacccttgaccatatgctgtttttccttggtcagcagcagatactctccacggaaaggcacgatgcgggggtctctggggcatccagtcttctcagccagcaggtcggattgcaaaccgccacaggttaatacgttcttggtacgaaccgtttgaccgggcttagcgccatggatggtcactgggtagtcggtgccctccttggtctcggtaaacttgctgacattgaagtccaggtagatatcaccaccgcactgtttg

SEQ ID NO: 21980 - DNA, 2822 bp, DROSOPHILA
agcatctctagcaaatggtcgctaaattcgcaaaattgtagtttgctgggataacaatgataaatacggccaagtactttgctcttctagagagtttaaggtttagtaaagctctagcaaatacggcgaataactcagggactgccgaagccttggaaatcaacctgcgaattttggaaaaatatgctaaactcgagattggtcagcaattgcatgagctgtgcctggaatatcagttaacagacgatcacgaatctagtattgatcccgattcggatcgtactatatgctatataataagattgcaacatgtgctacattcgatcatgaggaacattaatttccacagcgacgccaaggaggatcttatttcggtagcgcacctgaaattgtgtatccaggcttcccaagaattatcatattactcgcttcgatgccagctacatgaggatttctacaagtcgcccatcttttgtgaggctcaggggaaaatcaaagctaacttttcattgatgcttctaagcattcagttctttattaatctactgcatattcgacaataccacatagccaactcgatggagctggtgcaaagggatctactggcggccattgtgagtctacgtgtgcagcaagactctccactgctggataaggctatagcctacctctggcaatatgaatccaaagcagatttctttcgcaacatcttgctttttaaagctacgactctctgcccaactctggcccaattattgcaccgtcaactcttaggaaagcttcacttaccccaaggatttgctagtcttgttgaggccctgcatcaaaatcccaatgtgaattcttccagaaatgcggaaattgtggctagtattgtggccagaaaaggattttctcagttagcgcaagagaagatggttctccaggtgctagaatattgtaagttctatctgcagaatgcggacaaaatgtgcgccggtgtcctatcgctcagaagactttacgatttaagtgatacaaatcaaaagctgataaaagaaatattattcaaacactgggaaacgctttgtaacccagaagacattattaatggccttatcttaatggatcaccaggaactgtgcaatcgcattctcttatggcagcatctcttttgttcttcaaccgtagcttgcttacccagtaatctactcgttccctaccttcctttgctgctccaactctacgatggccttccaatggaattaccggcgtcatcgcagatttctgccattattttgcgttgtctggacaacagagaaatgaaaaacgaattacctgcgatactccagaagctgtttaaatgggaaattgagaaggaacctccttggaagtgtttaaacccacgcattataatcctgccttccatgaacacaactcaaattcaggttaaagtagctcacaaagatcatctagcagatcacgatatgggcagaatattgcccggtctactcacatcaagctctcatcattccctcacctgcaaagttttcctctctcttctgggcttcatagctaaacagataaatgataaatcttcagccagcgtagattttatttcatcagaagcagagctcaaagactttctgcactccaaatatcaactgaagctagatttgctcattgctttaaaccaaatggtagcccaccaaccattaagagctcagctatcacaacataccaaggagcttctacatatactaaaagacttgcttgtccaccgatctagagagcaagataccacggatcagatcctacttctcgttctaaacctcttgcaggaaattcttgagggcagtgagaatattcaactttcagaggcctgtaaggaactgaaagaacaattgcacctgttgggtactcgatcttccaaccctcttatccagcaatctgtaaaatcattgcttacaataattcacggcgcatggcgaccaagtgaggctgttaaaatacaaccttttcaaagagctcggtccttgatagaggaaaaacaatcccacatgcaagtgtatggaattcagatgatgattgatttgctgaaaaaaagagatcctgctaccttagcgcagggtcaacttatcatagcgttagccctgaccactctcaaggataaggaatcctacaccttcttaaattgtgttcggctctttgtgtcgcttgttcatgtgatggagtccgatgtgctggacaaattgagtgatgagtacctatcagagacggctcacttagactaccgcctcgtagtgggtgaagctattctgaaagtcgctcaggagttgggtcctctttgctttcgatacaaggctgttcttctcaactgcttcatgtacggctcccggtctcctgttcacgaattccggatgtcagcctttgccaatcttgcccagctttgtcgccttttggcctttcaagtgcagaacttcttccacgagttactccaacttgttaatagcgaattaaccaccggaggatatgttccctctaagcgtgcagcagtcctggtcttagctgaactattaaacggcatggagaaccttctggattaccaggaaatgttactccccatttatcgccttttaaaagcgattgaagcggatgaatcctgtgatcctcaaatgcgtcagcatgctgcaaacggtctgaaaattttaaacaaaaagtgcacaaaactgatacaatctgccttggaggagaaatcattacagaagcagattaaggtgttgggcattaaggacgatgattcacctcaaagaagaaaccgacatatactggaactgaattaa

SEQ ID NO: 21981 - protein, 921 aa, DROSOPHILA
MINTAKYFALLESLRFSKALANTANNSGTAEALEINLRILEKYAKLEIGQQLHELCLEYQLTDDHESSIDPDSDRTICYIIRLQHVLHSIMRNINFHSDAKEDLISVAHLKLCIQASQELSYYSLRCQLHEDFYKSPIFCEAQGKIKANFSLMLLSIQFFINLLHIRQYHIANSMELVQRDLLAAIVSLRVQQDSPLLDKAIAYLWQYESKADFFRNILLFKATTLCPTLAQLLHRQLLGKLHLPQGFASLVEALHQNPNVNSSRNAEIVASIVARKGFSQLAQEKMVLQVLEYCKFYLQNADKMCAGVLSLRRLYDLSDTNQKLIKEILFKHWETLCNPEDIINGLILMDHQELCNRILLWQHLFCSSTVACLPSNLLVPYLPLLLQLYDGLPMELPASSQISAIILRCLDNREMKNELPAILQKLFKWEIEKEPPWKCLNPRIIILPSMNTTQIQVKVAHKDHLADHDMGRILPGLLTSSSHHSLTCKVFLSLLGFIAKQINDKSSASVDFISSEAELKDFLHSKYQLKLDLLIALNQMVAHQPLRAQLSQHTKELLHILKDLLVHRSREQDTTDQILLLVLNLLQEILEGSENIQLSEACKELKEQLHLLGTRSSNPLIQQSVKSLLTIIHGAWRPSEAVKIQPFQRARSLIEEKQSHMQVYGIQMMIDLLKKRDPATLAQGQLIIALALTTLKDKESYTFLNCVRLFVSLVHVMESDVLDKLSDEYLSETAHLDYRLVVGEAILKVAQELGPLCFRYKAVLLNCFMYGSRSPVHEFRMSAFANLAQLCRLLAFQVQNFFHELLQLVNSELTTGGYVPSKRAAVLVLAELLNGMENLLDYQEMLLPIYRLLKAIEADESCDPQMRQHAANGLKILNKKCTKLIQSALEEKSLQKQIKVLGIKDDDSPQRRNRHILELN

SEQ ID NO: 21982 - DNA, 3217 bp, DROSOPHILA
ttcattcattcaaagatacaatgtggaaaggtagcttgccttacttgcttcaccctattcctctcaataggctaatacacaagtatctgagcgatgtttctggaacttcggttaatagttttcaacttcatgcaacagagattcgtttaagagcagggaatatgcaattataccatcagaattcgatttcaatggttcattaatcatgcgccattttaaaaaccactcataaagtgttcctatactaattaagtcttatttcattcacgttttctgccacttacattccactacgccccatcgatatagacacatgttggcgcctcaatgccgccctgcatacgaattcattcaactcaagagcgctggccaaatcaaatcgaactaaacttaagtgaccccgtcgagtggccgaccgcccaactataaataaccgggtggaataagcgtccaaacattagcaatgaaatcatgcaaaccgaaagatacagatacaaacagatatcgggtagtacagaaaagcaaggcatgcgcggcacatggatgtggatggtatatgttcgcgatgcgtggcaaggtcgtttcgtttatttcggttgagaactgtttggaaaatattccaaactgtatttatagaaggcggtccaaggatcgaactgattttcgtgttttgaacttgacattgaatgttggcggagcgataagctgttgttttcaattgccatcttcatcttgtgattcacactggcccatcatctctggaattagtttgtcgatgatgcggctattattgttttcattcccaatcccgattcggggcacttcgatcacccaactgtacttggggcacgtgacggccgagctccgccagatgataagggtttcagaactgggggccgtcagctgatcatacccgtatgcatatacttacataatcctcagatacgtgaccgttcgagtgagtagagatttgttttggaaaatatttacaatgcatttattggaagcagtcaaatatttcacattgtgggtagatttggggctcttaagatgtcatacaaaattattcgtacaatataattaatatacatatagttaaataaatacatgtttatgtacggtgtgtgtgtgtgtgtatgtgtacagaggaatgacacaaccaaattagtttcaatccgctcagcactcaattttgtcaaatcaatttaatgttagtgttgtctaatatttttcgaatattctagaagtctcgaatataaactttaggtattcaagaattgtcactctgacttgcccaacttggaggctattttgttatcatttgacgatgctgttcctctgcacgggtatgtgtatggtgtggttaagtataactaaatcaggacgcagcagacttggccattcttgcaatccgaaccgggtcgcaggagcctctggtggcatcggtccatgcactgtcccaggtgttccgcacagggcgctggtctgaccggcactgcaacggcaatgggatgacgtttgacgttttcgagggcgatgggacacacagaatggatcgggttgtcaagggttagtggcgatattcgggtaattcggtaacgatgccaatttgattgtggttagatttttagcgatgcgaagcaggtgttgggtttgatcggactgatggggttttttaggatttttggggatattttggggattgtttggggtttttgcaggttttaagcaggatggtacacacagcagagagccagcaatctactcacgttcgtagcagcactccacgccctctccggcactcgtgggacacaatcccttgttcgaggtgggttcgatgcagtccgactccgcgacacacagtcctccgaccatgacgcactgtcggtcattgggatacacacgcacaccctgcagcactgcgatttgaatgggttaagtggtagttcgctatggccgcctgatccacatcgcacacttactgtagtaactggggtcattcacatcgtttgtctcgatgttggcctgagcctggtgcagcactaggatgctgctcaccagcaggcagcacagcaagctccttctcggcgacatattcggctatttggggatattcggctgtactaccgggcgtatgcgtgatacgttttgaatttcgttctgattcgctctgctttcaatgcacttcactctggcagcttggcagcagcagtaatccacttcctctcgatggcgcggtttgcgttgaactgatcccagctaattacgccacagaggcttttcaacgaaaaattactttgccgacggagacgggagagcaacagcgcgagagggagaaagagcgagcgtttttgcacaactagacgcggagaaagagaaagagacggagcgagcggaagattgggacgtagagtgtgaaagggcgggggcgacgggaggaagtcgaggaagtgccgttcaattgaagaccgtgagagagtttagaaaattgaccaactccgatcggcttcggcttcatccgcttcaatcagcaacgctcttgagtgcacacggagaaaaccagagcgcgttgttacgattattgttgttattagcttgtacttatcagtggttaatatttaacatctataaacgcgtttctacactggaaaaaaaatagtaatgtaaagattattcgttttacagcagcggtgatatgcatatgaaacagaatgcataatgatgatttagtatagagagctcttctgttatgactagcaccgttgacccttttatcgaatgctttttaccattagcttttaaagatagttacagctttgaaatttctcgcggtgcactggagatcgcccaatgaatggacccacaatcaagcgctcaactcgggcgaccaatcaacggggcaatcaacgaccatcggcgcggagcaggcgaaagaacaagaaccgcattgagcggggcgtaacgtgattttactgcaatccgatctggtttggcacaaacatctagctatcatcttgctctgccagcgctcagttcttgtcggcggtgtttgtgtaattttcgaaaacaatttgtgtgaaatatgtgcgtggaaagtaaacaaacgccgaagaatcgaaatattacgcatacgcggtgtgctggctgtgccccagaaacaacaacaggtctgttttgggccagatgttaccttcgctcgatctaaacaacggcggct

SEQ ID NO: 21983 - DNA, 880 bp, DROSOPHILA
gattactgctgctgccaagctgccagagtgaagtgcattgaaagcagagcgaatcagaacgaaattcaaaacgtatcacgcatacgcccggtagtacagccgaatatccccaaatagccgaatatgtcgccgagaaggagcttgctgtgctgcctgctggtgagcagcatcctagtgctgcaccaggctcaggccaacatcgagacaaacgatgtgaatgaccccagttactacatgctgcagggtgtgcgtgtgtatcccaatgaccgacagtgcgtcatggtcggaggactgtgtgtcgcggagtcggactgcatcgaacccacctcgaacaagggattgtgtcccacgagtgccggagagggcgtggagtgctgctacgaactgccggtcagaccagcgccctgtgcggaacacctgggacagtgcatggaccgatgccaccagaggctcctgcgacccggttcggattgcaagaatggccaagtctgctgcgtcctgatttagttatacttaaccacaccatacacatacccgtgcagaggaacagcatcgtcaaatgataacaaaatagcctccaagttgggcaagtcagagtgacaattcttgaatacctaaagtttatattcgagacttctagaatattcgaaaaatattagacaacactaacattaaattgatttgacaaaattgagtgctgagcggattgaaactaatttggttgtgtcattcctctgtacacatacacacacacacacaccgtacataaacatgtatttatttaactatatgtatattaattatattgtacgaataattttgtatgacatcttaagagccccaaatctacccacaatgtgaaatatttgactgcttccaa

SEQ ID NO: 21984 - protein, 127 aa, DROSOPHILA
MSPRRSLLCCLLVSSILVLHQAQANIETNDVNDPSYYMLQGVRVYPNDRQCVMVGGLCVAESDCIEPTSNKGLCPTSAGEGVECCYELPVRPAPCAEHLGQCMDRCHQRLLRPGSDCKNGQVCCVLI

SEQ ID NO: 21985 - DNA, 3189 bp, DROSOPHILA
caaaattacaataaacccaaaacggaaaaaaacacctgtaactaaagtacaatagctggcaaatatccttcctcaataaacgtaatctgctcaagaacctctgcatcgcctttattgaagcaccctgtatttagcataaacaaaacccgtgtcggcgctgcgctgcgaatgtcataagatccggagcgcacaaggaactcggcaaaaggctggtggttatgtattcatctcgatagctccgctctccaaccagttcatccatggcatttcggttctttggcaagtccttgctgtacgctctgccacttggcgtcactttcctggactgcgttggttatgtggccagggtggatggtgagtcgtccggagtttattcgctccatgttagtgtgcgctaattaatccacaactttttgcaggcatctccatgcagcccgctctcaatcccgtgccggatgaaaaggactatgtgttcctgctgcgctggggcacccacaacagtcaggtggagcgcggcgacataatatcgctcatttcacccaaggatcccgcccagaagattatcaagcgcgtggtggggctgcagggcgacgtcgtgtccacgctgggctacaagcacgagatcgttcgcgtacccgaaggacattgttgggtggagggcgatcacacaggccactccatggacagcaatacctttggacccgtcgccctgggcctgatgtccgcgcgggcagtggccatcgtgtggccaccggaacgctggcgaatactggagaacgaactgccgcggcgacggagacccatacaggcctccaagaactccagcaactactacaactagactgaccaactggcggagagcctgcgcccaagatagttccaattgtgtacatactgaaccgtatattttataaacaatttgttgtgttcccgcatgcaaagcaaagtaggatgttccaaagtaaaaattaaagttaaagccaaaggaatagctcttatactacatcatttttagctcccgaatgccgaactcctccatgaggctgagtgtcggcttgagagccacgccggcgcgcactatttcatagtagccaggagtggccaggtcaatgaccgtggaggccagtcgtcgctcctcggtcagaccgattcgaccggcatcgaagacggcgcccaattggggccatagggaacggaactcggacacctgcagactgctgggcgcactggagcgattggcgctggtcagggccaggggcttctcctgccacacggcgcacaggtcgcgcatgaagttgaagtccggaatgcgtatgccgattttggaggtgctgggattaaggaaacggttgctcagctgggacgtccgctcgatcacgatggtcagggggcccgggagcaaacgagttagcagctcgtcgctgagatgggcagcctgaccaaagcgtcgcaacgcatcgatgttgtgaacgcagatggccacgggcttgtgttcatcgcgacccttaatctcgtagagctgctgtatggctgtctcgttgttggcatcgcaggccaggccatacacggtatcggtgggcagggcaatcacttggccaccaagcaggcactggcgggccaactggagagcagcctcgtcgcccaccgcgcacactggagtcctcagctcgctcgcttggtgctgcattctgctggatgtgtggtgagcacggagcagtcgataaaggctcgtttgaaggcggcgcattagtctcgccaggtgtggttgcactcgtggttgcagcacttgtaaaacgtggtcatgggctcatccgccgaccgcgtctggatttgcataaagtacgcccgcttatggccgcacgttggacactctgcgtccgtggagtctacgttctcccacgccgccttgccgcccagcacgtgatccacctcctggaaacacagattatcagagatattatcataaattcgtagcaaattgcatcatccagtggaaaatgatcataccttgaggcgtggaaaggttttcgtggagatcttgcgcctgatcttcgatatgtacgggcaggtgttgcacgtgaagcgatggcagttggtgtcctcctcgataatcaatatatttccgcacgacgggcagaaaaacaacatagtttcggagaatccgaatccgcgctgtttagttttttgatttgagcacgttgaattctcagtgtgaccgcgtatacgcttagatatactaactcaataacatcacaatgtatactgcaataccatatgttccaccgttcctccatagatgctaatttgaagcacattataataattaattaataaattaattatttgtaataaataaaaaatattttcaaatactgtttgaaaatttcatgttcggaatttagtgaatttattacttagccctagcatatactaactgtatattttatggtgaaataaacgtatttaccatcttatagtttacggtcatactaatagcattataagaaattttgttcgttttgcaaaaaactatcaaaataaacaataagcaactcaatttttagcagacattagagtagcaaaagttttaaatcatgtcggccgatgtgcgtgatattctggacatggagcgtgccaacacgcccgaggtgacgcgggattcgtttctggccaccaagaagcgcaactttgagcggtaaacaaatgcatttacatgtgtgcgattctctaatttacaatttaatcattttaggaccaagactgcgtcccggcgtccggagggcatgcatagggaggtgtttgccctgctctacacagacaagaaagatgctccgcctctcctgcccacggataccgctctgggaatcggagcgggatacaaagagacgaaggcccgcctgggcatgaagaaggtgcgcaagtgggagtgggcgcccttttcgaatccggcacgtaacgattcggcggtttttcaccactggaaacgagtcaccgacaattccaccgactatccgttcgccaagttcaacaagcaactggaggtgccctcgtacacgatgacggagtacaatgcccacttaaggaacaacatcaacaactggagcaaggtgcagaccgatcacctattcgacctggccagaaggtagactcttcattagacttcttattaagtagccaaaattgtaagcc

SEQ ID NO: 21986 - DNA, 1114 bp, DROSOPHILA
atcaaaaaactaaacagcgcggattcggattctccgaaactatgttgtttttctgcccgtcgtgcggaaatatattgattatcgaggaggacaccaactgccatcgcttcacgtgcaacacctgcccgtacatatcgaagatcaggcgcaagatctccacgaaaacctttccacgcctcaaggaggtggatcacgtgctgggcggcaaggcggcgtgggagaacgtagactccacggacgcagagtgtccaacgtgcggccataagcgggcgtactttatgcaaatccagacgcggtcggcggatgagcccatgaccacgttttacaagtgctgcaaccacgagtgcaaccacacctggcgagactaatgcgccgccttcaaacgagcctttatcgactgctccgtgctcaccacacatccagcagaatgcagcaccaagcgagcgagctgaggactccagtgtgcgcggtgggcgacgaggctgctctccagttggcccgccagtgcctgcttggtggccaagtgattgccctgcccaccgataccgtgtatggcctggcctgcgatgccaacaacgagacagccatacagcagctctacgagattaagggtcgcgatgaacacaagcccgtggccatctgcgttcacaacatcgatgcgttgcgacgctttggtcaggctgcccatctcagcgacgagctgctaactcgtttgctcccgggccccctgaccatcgtgatcgagcggacgtcccagctgagcaaccgtttccttaatcccagcacctccaaaatcggcatacgcattccggacttcaacttcatgcgcgacctgtgcgccgtgtggcaggagaagcccctggccctgaccagcgccaatcgctccagtgcgcccagcagtctgcaggtgtccgagttccgttccctatggccccaattgggcgccgtcttcgatgccggtcgaatcggtctgaccgaggagcgacgactggcctccacggtcattgacctggccactcctggctactatgaaatagtgcgcgccggcgtggctctcaagccgacactcagcctcatggaggagttcggcattcgggagctaaaaatgatgtag

SEQ ID NO: 21987 - protein, 108 aa, DROSOPHILA
MLFFCPSCGNILIIEEDTNCHRFTCNTCPYISKIRRKISTKTFPRLKEVDHVLGGKAAWENVDSTDAECPTCGHKRAYFMQIQTRSADEPMTTFYKCCNHECNHTWRD

SEQ ID NO: 21988 - DNA, 4031 bp, DROSOPHILA
ggccacgcagtgtaactaatgccgtatctattcttgatttgtatattttacccgtttcttcctttttagtgcaggagcaagctgcttcggagtctactacttcgtcagaggaggaaaactctctgggtgcaggcagcagcagcagtggtggaagcagcagcacagccgtggcagctgccgcggccgccaatcggcgtgatgagatggccaacatccgtcagattagccgccagcaactggctaacgcattggctaacgtgaccccgtttaattcactgtcgaatattgcgcagagaaacgcggacgaggccgtgcagggtgatgaaagacctagaaccacctcggcgccattagcaggcgttggaggagcagcgggaacaggcgcaggaagcagcagtggagccatcagcagcggatccatatcctcagagttgctccgcaacgagctggcccgcgcttttcagtccctgtcgcaggatcaaccggcgcctgtggagaacatggaggtggagtccggagaaggaccagtaccagagcaagccgccacagcaccagccgatgatgtagatgacgaggacgatggtggagacgacagtgatgtgctgccacgccgctaccgtcgccatcggttcaccgaacaactgcgtaccatggccgccatgggcttcattaatcacactcagaacgttagttatctagaactttccgatgggaatgtggaacacgctattaatctgcttatgctgagcatgaattaataaggatcggaattgactaaaaagccaacataatgtgcttactttacggacttatatttattctgctgctgaggattctgaagcattaaactcccaacttaagcaaggaatatctcttaataacttttaataattaaatatacgtttagaggagtcatctttgtaagctaattggggtgggattgcggagtttgggcatgggggtaaaagccggccgtacaaaaggtttccactaaattatactagttgattagatagtccagcgccttgtccttattattgttgaacttgagtagcgccgccgagattttcgattcgtcaaaaccgaggtccagaagttctcccagtggaataaggtgttcgataatctgaaaagacgtcccagatcggaataatgcattttgcaaaagttttcgaaactgacttaccttcttatcgtcgataccgcatagactaaccacctttgccacccgttccagagggaaacccatagtactgatacgttgggccaacttctgtgccggaccagccagctccctaaaggagtttctgtccactgccaactccaccgttggctgctgctccgcgttgtgactgtgcaggcgggtacgacgcttctccgcctgctgcagctccgtcttcagctcccgcaggatgtcaggcacactccttgacttcgtggctacctcgtcctccgactggctgagcgcatgcacggaggaaggcgctggaggagccttcaaaaggttttgagtcccgaatccattgacttggtagttgctaaactgttggaaagaatgctgctgcggagggtagaagggctggtgactgtagccctgcatgtggtacacctgcgaaaataataattagcccatattttaaatcggagcgtctgaaaaaaacttattttcgattgaaataaaatattgggtatcggactaatacttggtttataagaccatgctaagatcgtactcaagctcagtcaaaatatattacaccctcaattgtggtactaattagtttgagcaatagccccaccctcgacttgtgatgagttatttatttttaggtaatctacctgcaaatgctcagaaatcatcccgattaaatggtatactgtgagtgaatgaacaatttcctcttttattacaatttaatgagtaatgaggattggattttgagaatacaaggatagtgtgacattcaaaagaatcaagttaacatattattaaggctctttaactagttaaaagtgtcccacctgaaagtgttccggtttatgcaacggctgctgggcggaagcgctgtacatgggcgttaggtattgagccgtggttggaatgtggcttggctcgcccctgtccgcattatcatcacagtgaacatggaaattgacgctgtcgagcgtcgctttggtctccgccagcgtagtcattgctagctccaccggagctggcacttcattgccagattgctcctccttggaatgatcctcatgcggcggctcctgctgctgctgatcctgctgctgttgatctatgcgcttctccagctgtgtctggtgcagaacctgagctagtatgtctagatcgttgatggtcttcagctcgatattgtcgaaaggtgtggagttcatattgtactcaaagtctgcgtagtttagggagctgttacgcttgtgcagcgtctgcggactgaccactggagtggtgctcagaatggtgggctgcaagatattgtgaaaattacacacacttattgactttggttcgtgggaagagtcgcgtgactcagcggtgattggaggtggtggctgctgttgctgttcctcgtccctctgctcgggctcgttcttctttcgctccttctcgtcctcatccgatgacaagtcgtccgcactaggataatcaactgctccaagcatctccttctgtctcgcctccagcgcccgttggcgttcctccttgcgacgctcctggcgactggctcgctcctcgcgctgctggcgacgcaggtggcgccatcgttgcgcctgactcagcacggccctctccagctgacagtcatactggtaatccggatgatccgtgtagaaaccttctcggaattgcgacaggcgattgagggtcgcctgcggcaggtggtacacggcaggcggtggtttgtagcgctcgactatcttgaccgggacatcttccatgttatgctagcgcattcaccacgaattttgttaattaagttgctactacgcgtttttttttctctgttctcttttgttgtttctcgagcagcagcgataggcgattggtattgtcatcggtcactgctgattcgccaatttcgactagtgttgaatatcgtttttccttgagatgctcacctaattaggtgtactcaggcttggttgcgagtttgacaacagctgatattaaatctacccaaattttcgccaatttgagggcgtatgaaaggcttaacaaaaatcggaatacattaatagtttctacagatcacgttatacaacataaaaaaattaaaattacaaaacattttgacatactaaatattttttgttaccaagggtatcattatttagtgcatggcggatagttttaagatctttattctaaaaaactatttttgaccaaacttttgtttaaaataatcccgcgcttttacaactgagtttattgaaatcatgttctttccactagataaaaccaaagtttctgggaataaataaggacgaaaaatggcagttatgatatctattttatctctatctattctttaataggtcttagtccaataatacagcaatttcctatgtaatgttcaatgttactttatttgcagggtattaatttgcttaatgcagttcgaccattgcaaccattttatcgatagttgatgccgggaatagttcatcgctaaagtcaaaggcaatgtaaacaaaacaacctgagcaatggacgatgccgatgatctgcgcataaaccagcagcagcttatggacgagatttcggccctcttgcagaacacagcgaagccgagcgccgccaacgcactgcagctgaatcaggagctccagcgccggctcatgcaagtccggaccaaaattctggccatgttacaagtagtaagggcccgcttctctcggaacgaggacatcctggtgcgccggctgcgacctcgttcccatttcggcccgaattccctcaatcttagcggggcgatcctgcggaagggcacgtttcgcttcaagggcaa

SEQ ID NO: 21989 - DNA, 1558 bp, DROSOPHILA
agaacagagaaaaaaaaacgcgtagtagcaacttaattaacaaaattcgtggtgaatgcgctagcataacatggaagatgtcccggtcaagatagtcgagcgctacaaaccaccgcctgccgtgtaccacctgccgcaggcgaccctcaatcgcctgtcgcaattccgagaaggtttctacacggatcatccggattaccagtatgactgtcagctggagagggccgtgctgagtcaggcgcaacgatggcgccacctgcgtcgccagcagcgcgaggagcgagccagtcgccaggagcgtcgcaaggaggaacgccaacgggcgctggaggcgagacagaaggagatgcttggagcagttgattatcctagtgcggacgacttgtcatcggatgaggacgagaaggagcgaaagaagaacgagcccgagcagagggacgaggaacagcaacagcagccaccacctccaatcaccgctgagtcacgcgactcttcccacgaaccaaagtcaataagtgtgtgtaattttcacaatatcttgcagcccaccattctgagcaccactccagtggtcagtccgcagacgctgcacaagcgtaacagctccctaaactacgcagactttgagtacaatatgaactccacacctttcgacaatatcgagctgaagaccatcaacgatctagacatactagctcaggttctgcaccagacacagctggagaagcgcatagatcaacagcagcaggatcagcagcagcaggagccgccgcatgaggatcattccaaggaggagcaatctggcaatgaagtgccagctccggtggagctagcaatgactacgctggcggagaccaaagcgacgctcgacagcgtcaatttccatgttcactgtgatgataatgcggacaggggcgagccaagccacattccaaccacggctcaatacctaacgcccatgtacagcgcttccgcccagcagccgttgcataaaccggaacactttcaggtgtaccacatgcagggctacagtcaccagcccttctaccctccgcagcagcattctttccaacagtttagcaactaccaagtcaatggattcgggactcaaaaccttttgaaggctcctccagcgccttcctccgtgcatgcgctcagccagtcggaggacgaggtagccacgaagtcaaggagtgtgcctgacatcctgcgggagctgaagacggagctgcagcaggcggagaagcgtcgtacccgcctgcacagtcacaacgcggagcagcagccaacggtggagttggcagtggacagaaactcctttagggagctggctggtccggcacagaagttggcccaacgtatcagtactatgggtttccctctggaacgggtggcaaaggtggttagtctatgcggtatcgacgataagaagattatcgaacaccttattccactgggagaacttctggacctcggttttgacgaatcgaaaatctcggcggcgctactcaagttcaacaataataaggacaaggcgctggactatctaatcaactag

SEQ ID NO: 21990 - protein, 495 aa, DROSOPHILA
MEDVPVKIVERYKPPPAVYHLPQATLNRLSQFREGFYTDHPDYQYDCQLERAVLSQAQRWRHLRRQQREERASRQERRKEERQRALEARQKEMLGAVDYPSADDLSSDEDEKERKKNEPEQRDEEQQQQPPPPITAESRDSSHEPKSISVCNFHNILQPTILSTTPVVSPQTLHKRNSSLNYADFEYNMNSTPFDNIELKTINDLDILAQVLHQTQLEKRIDQQQQDQQQQEPPHEDHSKEEQSGNEVPAPVELAMTTLAETKATLDSVNFHVHCDDNADRGEPSHIPTTAQYLTPMYSASAQQPLHKPEHFQVYHMQGYSHQPFYPPQQHSFQQFSNYQVNGFGTQNLLKAPPAPSSVHALSQSEDEVATKSRSVPDILRELKTELQQAEKRRTRLHSHNAEQQPTVELAVDRNSFRELAGPAQKLAQRISTMGFPLERVAKVVSLCGIDDKKIIEHLIPLGELLDLGFDESKISAALLKFNNNKDKALDYLIN

SEQ ID NO: 21991 - DNA, 7260 bp, DROSOPHILA
gcagtttttcaaatatctttcgtgttcgctgtcttgcggcgtctgttactgcggtgtgggccatcagacacctgttcgaaatttgttaaattgagcgttgcaataaaaataaaaatatttgctgttgtctctgcccgcggtggtgctacttggcggattggtgagctggtgagccggtggagctgggatgtggtgctggtgtgctggtcagtcgcgtgtggcattctcgaaagtgaaagaaaaatccgttttcggcatttgcaatggcaaagaaaagcaaaacgtgtgcgatttgaatttcgtttttacgtaaaatgcgattataatgctttcacccgagcatcaggcggataagagattaccattccagtcgaggcaagtgccaagtcatggataaagatgcgagcaccgataaacgccagcagcttttggccaaccagtcgggcttataatttataatctggccgagagatcatcccatcacatggcgcgccaccactaactagatcaatttgggtatcacatttatccgtcttcaattttccactttgcaagccaatttcaaatttctgaaccgttcaaaaaaaaaaaaaaaaaaaatataccaaaagactaaagtactacaggttttttagcagatgttcaataattcaatgttcaataatttatatggcaaagtaaagcacggatatctttttatattgcctagacagatctgattccttatcgcatcttagtaaagttataagtaaactattcatatttatctttgttaaagtcgggaattttgtgtaatagtagtaccgacaaaactgtatcttcagacttggccacttgagcaatcgcacagcaagcattacacacagccaagtgtaaatagcacactagcctacataaccacggcgggcagtgcattaattaagcccaggaacattgcacaaccgctgaagcttggagagaatgggagatacacacttgaccagctggccccgctagccacttaaaatttcattagatgttctgcactaaatgtgctcttaatttgtggccactgtggctccgcatctcgggagatggatggatcacttcttatgattattgtacaataatttaagaacagaaggatattgcttaccaggtaaaaatcaatcggcttctcccgcgccttgttgtaagccttttgtatctccgtttgtttgagggcgtgcgcgatgtggagggcactggcgtcgaatcttccgtacttgtagtcagagtcattctgcgatggagaactgatctcccggctaccgtagccattcggcgtggactgccgcgagccacccagtgggccacctgcacagatccggtaaaacagtgttgttagccaagttgagagcacatgacagccccatactcaccatccacttcgctccgcgtgcctcggatctgctcgttcacgaacttgttggtgcgcggcgcattcagggcctggcgaatacccacagaggtctggtcgagatggccgggcccgctctttggtacatgtgaactgcaatagacctagagcgaaggtgtttccgaagattattagttgttgcacatatcgctgggtcatatgatatagtgcatacttattcaaaaagataaacttccaactaactaaactgcattcattaaaagatttaatcctcattactcatttcattatacatctagaaaaaaaggaatgctctttctgaatcatgtcatctaattgctattttgaagccatgagatttcttaatgggcaccgataattatcttcaattaaaatttccttaaacaaaaaggaattttcaactaaaacacttttggaatgcatatatctagcgtccaaatcgaaacacaccattagccttattgggtttcgctttgagtgcgtgagcagaccccaaaagtcagtcgcttgcaaatgcaattttaaccacttcacctacacacagcaggtggcaatagaatatgcaataacgaacacggacctttgcagtgcaaatacagtgcgttttgtggctttaaggcaggtcaaggaactaaatacatatattatatacaaatttaatacaaatttttaacttgctagatggaaaatacatacattcaaccatataaaacataatattgtcaccataatacttcatagatttttccatttaattgatcttctttccttaaataaatttcatttaaataatttataatacttatgaaagctatatgattcccccgacttactggctgaccgcatagctgcgaaacgcactgtacatgaatatatgtacacactacataagtgagtctataggtatatatttcatatgtatgacagaccgcagtgacacacatttgcgcctcggcaaggtgcaataacaaagttatttattattatgcataggcagaaaaacacaaaaagtgtcgttcgaattgcatttttgcatcttgcagctgtgcaaatatttagactgacgcgtttgtcgcttaagtctttcgtttttgtcggtccgtccccgtctgtctcgtgtgccgctgcttgcggcgatgcttgtggtggcacttacctctttgtcatcctgcttgtgctgattattgaaatacgtcttgagcgtcagctttgtgccgcagtgtacgcatttgaagcaaccggaatggaagaatgtgaaatcctttagtggccccacacgatccacctgatagactgtctcgctgcagcgcaggcaagtcgactcgtagaaatttggccgatacataatgtttggcgtctatgtattcctcctggatcttttctttttctgtggcagcttccgactggttttcggtggacctgtacctgttgagtttgtcacttttcttttcgtctttcaatttcacttggcgcggaatttacgagtatattctgctagtttttcgagtttgcagttgctggttctgggggcgacatcatccgctcatccgctcatcctcgtcatccgtccgcagctggcagaagctgtccgaaacgaaaatgaccgaaaacgatgattactgcctgagtgggagatagaaatttcctatttgggctgcgataagatttttcgaccatcaccatataccatatcagggttcaaaaaacaaaaattttgattctgcgcaggcgtttgtcatgatgcgagccaaaactttcatttattttggctatgggcagattattaatgaatcttaattaactggacacggtggacaagagttttggcgtttctcagcggcaaagggttaaatccgtttcgccttgccattgacctcgcttgggaagtcgagcttgagattgctccaaacgtgccacaattgaacttgagttgctgcattcgtcgtacaactggctcgtgcaacttgcaactgccgcctggcagcggcacaaaagttgcattttccatttgattaattgacgcgattgttactggcaggtttcctttcggtttttgtctagctacaacaattaaattgaagtggaaaagcagactgtgtgaaggtaagtgtgtgcgagcaagtgcatgttactttaattgaaatcattgttgttgcggcgtctgttgctctgaccaaaattaaaacaaatgcggctcagttgcgcagacaaagccaaaagccgcagtcgaactcaaagtcatcgttttgctttcttttcaagtttaatgaacgttgagtccgggcgatgaatggtgggtggttggggatcggttggggaatgggtggtggcaaggccttatgattagcgccagttgcggcatcgaaggttgctgatctgtggattgcatgccacattgcagctgcagcactaatggaaaatggtaagaaattgaaatggaaaaggggaaaacgccaatgcaaatgcggcgaaggccgccaagacattttgtaacaccaaattattttgattggctgtgaataaaaatttattccgcttttgaggtctgccttttgatcgaccacatcgaatgtgaggcaacaaattgatgtgtgaatcaagacgagcgggagatttgtgcccttaaagaccataagctccatcgatgactaacctgtccacaatctcgtctagctctttggccatagcccccgcatcgattcgaatatcaatcaacaacgcccacatcgagagcgacaaaaatggcagtttgatctgttgatgcgatcataatcggtgtgattgaatggtccaattacgcttagcggctgacataattagcgtgtaattataattgtaatggacatgaatacgtggatagccgcgaagaccctgcaaattggatggggcggctttgacaaaacgcctcgtgcgacttacatcacctatcacaatatcgttccatcatcccatcatgccaccatggccacttgggtgtgactaagaagctatggactgcaggtaacccgagatgccgcatataatttcgcacacatgcctgtgctccgtgccagctttgggtttcttttccacctcaatgcggatgaaatgccatgcgaatggaatataaacatacaaaataaaatgacaaacgcgagaagcagtcacaaaaacgaaagttgctctgcgcgggcaattgtttgcaatcgagacatttaaataaattgataagcactcggaagcatttgcatcgggcgaacaagttcgttgcctaagtctttcgtttcgatgtggtatctctgctgttgtttttgtcgtttcccttatcgctggcattgcttaacgaaacgctaacaatgacaattaaataaataccaataataacagtaaactgctgcagcagcaacacaagtataatgaacttgaattggcataattgccaccgctaatcacattaaagccagatacaaagatttgataaatgcaaagaaacaacagccaagcagcaaacaacaagacaaaaagcaactggttattccgcctggcagtgaaacaatcataggaattaaaataagatgcaaatgattgcgtcactgcagagtagcgatatgaggggagaaatataaacttaaaatgtgacaatggcactaatgtgaataactaacaagtcgaacagggcaatgattcccctttttagattatggaaataaaggcagataatttcaatgtgatgaacttaaataattgttaaattaataaacattataaaattcaaactgttttcccatttcgctttacttttaggcgaactatttaaagtatacaaaagtacttgtcaaaaacgtttaactgttcttgaaaagtgtgagaattggttgggcaaatttgaaaaaatcaaggtacttgctttgctgtgccaatttcaaagtcgctaattgaatggaacaatgaattgcttttagaaatcgcccatttcgctggcaataaattagaagcacaaacaccgaaaataatttatgagcaagccacaataattggaagccacatacgaaacccgtgtagttaaaagggatggagggcgggtgcaaccagcgcccatgacaggtggtgtcgcctcaaccacccaccccgtctatttgcgtttgtattggtttatgtgtgtgtttatgccgtgacgcaggcccagcttcgacttcaaacgtcagcctgcaatctttcacttttttttcgtgtctgcagccgcggcgtcggttgttccagtttttccgtagattatttccccagcatcgctattatttttgttattttcgcctagattatacacacgcgatacatggagtgcttattctaggccctttttgacacacttctttgccgtttatgtgtatttctattacttttacgcatatatgctaaacaactttcttcttctggttgcaaaggggcgcgctttgtgcaaaagtatttatcataaattttacacacacgcaggcgcacaccgacacacaaacacacacacacagagcgatagccccagcgagatccaagcacacatattgcatacacacacacaggcatagaaaaaggggagagcagattgttcagttcgcaaggtccatgaatccggaattccaattctgcgctttatcacattttcggcattatttgttgtgcctccaaaagtctcttctccgaacagcaggtttcgaatattgggaatgtaacaaaatttcattaccaaacacaaccactcatacacaatcagcacagcacgacgacacacacggacgcgttcactcacactagcacaggtttcgagccgcttttcttttcgatccgtttcttttccgttcggctcgagcgcgatcacgatcgatttgagactagttgctttgctattcgcggaatggaatccgctctgagtcgagctttgttgggggtaaagcttttacatagctccaaaaagctcgcttcgcaaaggcaactgcgcgtgcccaccactactatcgatagccgtccacggatcagcctaggagttccagtaatcgttaaaaatattttactctggtccccgttggaaaatctataatttcatttgtttttttttataaagccctcggctacacttccttgctataactatcatttcagcttagcatttttaatagttttaatttatataaatatttatatagaaaggttttacaattttttgttcgtaatctgctgcgatagatcgataggtgttcaacgtttgaacttgaacatcgtggtattttcaggctcttcacctgcggtctcactggctgcaacaattatcgaagaaacgataggttgaaattaataacaaaagagtgcaaaagggaaaacgcaaaaagttatggggaaccaattggctatacagatgaatagcgatgaagacgacgattttgattcttcggacaacgagctgggcttcaacgtgatcaactttacggtgaacgccatggatctgcgctccgattattgcagcagcgagatgccagttatacgaggcaagcccgatctagttaaatttcaggtaatgacgaaataccccgtccccagataacaattaatagtaatttattgcccacgcaatcttccagaaaactgatatgtacaaggagatccaggcgtcgagtggattagtgagcaatccgaacaatcgctggaacctggtgcacgcccttcagcagcgtgagaatgggttggcatcgccgcacagcgcatcgttctccaagaaccagcagcgctacatatccaatctttacataccaaacaaaaaggccacacgcctgatgtcgctggaatccaaaatatttgtgaccaagttcaatcgt

SEQ ID NO: 21992 - DNA, 1028 bp, DROSOPHILA
ctcgagccgaacggaaaagaaacggatcgaaaagaaaagcggctcgaaacctgtgctagtgtgagtgaacgcgtccgtgtgtgtcgtcgtgctgtgctgattgtgtatgagtggttgtgtttgcttctgccagctgcggacggatgacgaggatgagcggatgagcggatgatgtcgcccccagaaccagcaactgcaaactcgaaaaactagcagaatatactcgtaaattccgcgccaagtgaaattgaaagacgaaaagaaaagtgacaaactcaacaggtacaggtccaccgaaaaccagtcggaagctgccacagaaaaagaaaagatccaggaggaatacatagacgccaaacattatgtatcggccaaatttctacgagtcgacttgcctgcgctgcagcgagacagtctatcaggtggatcgtgtggggccactaaaggatttcacattcttccattccggttgcttcaaatgcgtacactgcggcacaaagctgacgctcaagacgtatttcaataatcagcacaagcaggatgacaaagaggtctattgcagttcacatgtaccaaagagcgggcccggccatctcgaccagacctctgtgggtattcgccaggccctgaatgcgccgcgcaccaacaagttcgtgaacgagcagatccgaggcacgcggagcgaagtggatggtggcccactgggtggctcgcggcagtccacgccgaatggctacggtagccgggagatcagttctccatcgcagaatgactctgactacaagtacggaagattcgacgccagtgccctccacatcgcgcacgccctcaaacaaacggagatacaaaaggcttacaacaaggcgcgggagaagccgattgatttttacctggtaagcaatatccttctgttcttaaattattgtacaataatcataagaagtgatccatccatctcccgagatgcggagccacagtggccacaaattaagagcacatttagtgcagaacatctaatgaaattttaa

SEQ ID NO: 21993 - protein, 221 aa, DROSOPHILA
MYRPNFYESTCLRCSETVYQVDRVGPLKDFTFFHSGCFKCVHCGTKLTLKTYFNNQHKQDDKEVYCSSHVPKSGPGHLDQTSVGIRQALNAPRTNKFVNEQIRGTRSEVDGGPLGGSRQSTPNGYGSREISSPSQNDSDYKYGRFDASALHIAHALKQTEIQKAYNKAREKPIDFYLVSNILLFLNYCTIIIRSDPSISRDAEPQWPQIKSTFSAEHLMKF

SEQ ID NO: 21994 - DNA, 3509 bp, DROSOPHILA
agcaatgggtaactttatgtcgactccattcgcaattgtcattcccgctggctgcctttgttatttactagtctgggcctttgagaacaacaacaacttgattaggccttctgtcggaggcgtccctgctccagatgcctatggtacgtgccgcgacgccgcgtggagtcatggttctgtcctcgggactcccagcggcggcatttgcggcctataattaggtggcaatcatttagtggtgcgagatgcatggccactccttggtggactgctcctcgtggacagggccaggatgaaaaggctgggcaattttctttgcgcttttcattttcaattttccgtgtgcattttactaaatgagccataaatacggctagatacttgcaaagatcgcagattaagaaagttacacgatacatcgtgtattttttggcgctcccagagacgaatctttacatgacagatacaacataagacatgaccctaattaaatgaaatgggccattgcaagatcatccaatgtccgtctgttcttaaattgattttaacaaatagtgaaggacgtattccatttgttatttctcgtcataaaacaaggttgtttttgtcagacttaaacggattacgcagtccgacccaataaagttaacatattcttgatcaggatcactagccatgccgatctgttcgtccgtataaatgtcgagatcttaaaaattttaaaagctagaaggtaacgggtatctgatattcgatggattttacataaaaaagtttttagaccaacaaatttcattaggtaaccttcaaaaaccactccataagtaatgttgctaatgggtgatctcaaaagatataaacatagttttttatgagctcgtggttggtagagttgagctcttttggctcaaaacgaatcacgttcgatattgagttgggtgaaagttttgttataaagtaatgcattttcagacttatgaatgtaaatgaagtcacttacccaagggcacattggcgccgttctttcgattgacggaaactgagatcggcaaaatggctgcaccggaagtggacgacggcgagggcgacgacgagtcgcaggacccctccagcgattgggcgggcgtaggcaccgtggtcatgtggtgatcggcgctagtgatcaccgatgttcccgatgacctaccacctcctgccccgccacccgagctgccccctccgcctcctcctccaccgccgctggatccgttgctcgaggtggccgctgccgcattgctggaactgggtgctccaccgccggagctgctggtggccggacccacactgccaccatggtcgctgtgcggcggagatcgcagggcggtctgcgtggccggttgctgatgcggatgctggtggtggttctggtggtggtggtggtgcgagtgtgggtggctttggtgctggtgctgagccaccgaggcggctgcagcagctgccatgtggacgtggtgcgcgtgggcgtgaccgtggatgctggaagcggccgtgctggagccacccagatgggaggctggagccgacggagctgctgctgcggccgccgctgcctgctggtggtgcaggacatgtccgtgatgcgagtggtgtcctccgtgtgcgtgatgggcgtgcacatggtgggcgtggacatgagcgggagctgcgacatgatggtgatgactcaggagggtcgtggccgccggattggcaggcggcacctcgtgcatgtgcagcgcccgctgctcatcctgcgcctgggctcgcctcaaggccgtttgcagagccatcacccgctggcggtccgccgtcagtcggcacttctcgcacgtgcagtagcggaacttgcagtaccgcttgtgtccctttagggtgatctttaggccatgattgcggcagcgggcgcagttcggtggtgtcctcggcgaaatcgagctgccgctggaactggaggctccgccacagacgtcgttctttgagtcgatcatgtccgagtcggacatcgtgtcgctattccagttctcctccgaaaccatgattccagcttctgatatcctatgtaaatgttcgagcgtctaagtttatgtaaccgtgcttttattatgctatttttattagcattttctgtgtctattaactgtcttttgctgtttaattcactggggtttaaattatttaagattttttcaatgagagttatattgttagggattatatgcctttattgcaatttagtcttgcataaattattggtaagcttaagttattgggtaagtccgaagagtattggaaaatatttcgactttaggtctcacttttaaattttgctgctttcttttgattttagaagcaccctcttcgattcgccgggaagcctcttcaatgttggcgtctgcgtcctttaatatcacatacatgagtggcatcagctcccaaggatagcggaatttttctaatagcttttggcaatagtctaggaaaacgtcttggcctggaataaacggagatagaagatgtcgttagtttttttttttattcccatgcttctcgatcatcagctgtctgcaatcgatctccccatttacttggcaatcagcttcattgacatcagctccatcccataaacgaacggttcgacaagagtcgtggtgccactccatcttgaatttcgccagtttgcataagtattatatatggtgcaaaaactggcagacagcgatgtgcaacgtaaacatggctgcaaaaacgtcggcataatttgcaacttaatacgagaaacctattgatatcaaacaggaatgttcaacatttccaatcccagtgaaaaccagtagcataagcataatcgttagctacgcggaaatcagcaagtctagacaaacaaagaaaacctaaattgtttttaagcactatacacatacataaaaaatatacaaaagcaataatttttttatttagtagaatcaccttaatgttttaggcaaaggatcctaatcttaaataatgaatagatgtaaatgtaaatatcgtatttcctattaaaaacgtataagctactatgtattaagctggtttctttaaaaaataacaaaacaagcaaataggaaaatctaatataataataaaatctaataataataaaaaagtaatcccagtaatcttggaacttctgtacctaaccaatatacctcatctattgtaactaaggttacatttaagaccgtacgactctttttgggccacatgagatacattccgttgaagacatacaatattttcatacaattttttataaacttgtgtcaaaactattaatccgcttacttgcggaatattcacttcgtattaatatttttgccgctggtgttactttgcagttttctcttttactcgccaagcttatgccattatgctcttcgtatcgccagccatttttttcgttttctggtttttacctcacaccagcaccaccagcaccaccagcaccaaaa

SEQ ID NO: 21995 - DNA, 2913 bp, DROSOPHILA
tttaaattatgttatttttagcatggtttacttatggaaaagagcatagttaagggtttacaatgaaaacggtcaaataagggtatccatatctggtaccaaaccaatttgctttctcccagttgatgtgcagtgcatccagcagtcgagcaggttggatgctcgcactcgtttcttttttcgcggtgcagcaaccagagtgcaaatacaaatagcaagagcgttgcgtcgccagtcggtgggcccgtctctgtgccagaaacacatgctcagttttaggtccgcccgtccgcctgaatgtccgtgtatctgtccgctgtcttttggtctgctagtcggactggtactggtccgagtgttagtatcgtgcacggggagctttagctttgtggccgcaaccagtttgctggcatcgatcgtcctttgcaggtcgtgcatgtcgcgttggcgtctcgcgccgtccgcgttccgtgctcgaaatcacaatctcaagctgaagtgaaaagaactggagcggattcggtacaaaattctgtgcgatagtttttagttgctgtgcgaggtccgaaaatatctctaaaatgcgttgacctacagggaaccagatcgagccgcgagtgccatgctaaacaaagtcgtttgcggctacagcttgtacggtttaagataacaaataaaagaaataaatttttaccggcttcacactctcactctcggtccacgaagcactcctgaccgtctcgtacccagccgatcggactccccgtatctcatcgagttcgccgagtgctagtgctatattctctcactttgcttgcataaccaagagcaaagcacacctcgcggaggcagatcgcagatgcagatacagatacatatactgctagtggtctagtagtggacctggagatactctagcgagtgcatgcaattggcattgtacctggtgcttctaaaatcaaaagaaagcagcaaaatttaaaagtgagacctaaagtcgaaatattttccaatactcttcggacttacccaataacttaagcttaccaataatttatgcaagactaaattgcaataaaggcatataatccctaacaatataactctcattgaaaaaatcttaaataatttaaaccccagtgaattaaacagcaaaagacagttaatagacacagaaaatgctaataaaaatagcataataaaagcacggttacataaacttagacgctcgaacatttacataggatatcagaagctggaatcatggtttcggaggagaactggaatagcgacacgatgtccgactcggacatgatcgactcaaagaacgacgtctgtggcggagcctccagttccagcggcagctcgatttcgccgaggacaccaccgaactgcgcccgctgccgcaatcatggcctaaagatcaccctaaagggacacaagcggtactgcaagttccgctactgcacgtgcgagaagtgccgactgacggcggaccgccagcgggtgatggctctgcaaacggccttgaggcgagcccaggcgcaggatgagcagcgggcgctgcacatgcacgaggtgccgcctgccaatccggcggccacgaccctcctgagtcatcaccatcatgtcgcagctcccgctcatgtccacgcccaccatgtgcacgcccatcacgcacacggaggacaccactcgcatcacggacatgtcctgcaccaccagcaggcagcggcggccgcagcagcagctccgtcggctccagcctcccatctgggtggctccagcacggccgcttccagcatccacggtcacgcccacgcgcaccacgtccacatggcagctgctgcagccgcctcggtggctcagcaccagcaccaaagccacccacactcgcaccaccaccaccaccagaaccaccaccagcatccgcatcagcaaccggccacgcagaccgccctgcgatctccgccgcacagcgaccatggtggcagtgtgggtccggccaccagcagctccggcggtggagcacccagttccagcaatgcggcagcggccacctcgagcaacggatccagcggcggtggaggaggaggcggagggggcagctcgggtggcggggcaggaggtggtaggtcatcgggaacatcggtgatcactagcgccgatcaccacatgaccacggtgcctacgcccgcccaatcgctggaggggtcctgcgactcgtcgtcgccctcgccgtcgtccacttccggtgcagccattttgccgatctcagtttccgtcaatcgaaagaacggcgccaatgtgcccttgggccaagacgttttcctagactattgccaaaagctattagaaaaattccgctatccttgggagctgatgccactcatgtatgtgatattaaaggacgcagacgccaacattgaagaggcttcccggcgaatcgaagaggctcgagtggaaataaatcgcactgtagcccagatctactacaactactacaccccgatggccctggtgaacggggcgcccatgtacctgacctacccgagcatcgaacagggtcgctatggggcgcacttcacccatctgccgctcacacagatttgtccaccgactccagagccgctggccctcagccgctccccgagcagtcccagtggaccgtcggctgtccacaaccaaaagccctcccgaccgggcagcagcaatggcaccgtccactccgcggcctcacccacaatggtcaccacgatggccacgacctcctccacgcccacgctcagccgccgtcagagatcgcgctcggccacgcccaccactccgccaccaccgccaccggcgcacagcagcagcaacggagcctaccaccacggccaccacctggtcagctccacggctgccacgtag

SEQ ID NO: 21996 - protein, 549 aa, DROSOPHILA
MVSEENWNSDTMSDSDMIDSKNDVCGGASSSSGSSISPRTPPNCARCRNHGLKITLKGHKRYCKFRYCTCEKCRLTADRQRVMALQTALRRAQAQDEQRALHMHEVPPANPAATTLLSHHHHVAAPAHVHAHHVHAHHAHGGHHSHHGHVLHHQQAAAAAAAAPSAPASHLGGSSTAASSIHGHAHAHHVHMAAAAAASVAQHQHQSHPHSHHHHHQNHHQHPHQQPATQTALRSPPHSDHGGSVGPATSSSGGGAPSSSNAAAATSSNGSSGGGGGGGGGSSGGGAGGGRSSGTSVITSADHHMTTVPTPAQSLEGSCDSSSPSPSSTSGAAILPISVSVNRKNGANVPLGQDVFLDYCQKLLEKFRYPWELMPLMYVILKDADANIEEASRRIEEARVEINRTVAQIYYNYYTPMALVNGAPMYLTYPSIEQGRYGAHFTHLPLTQICPPTPEPLALSRSPSSPSGPSAVHNQKPSRPGSSNGTVHSAASPTMVTTMATTSSTPTLSRRQRSRSATPTTPPPPPPAHSSSNGAYHHGHHLVSSTAAT

SEQ ID NO: 21997 - DNA, 12275 bp, DROSOPHILA
taccggttgcgccggcttgataaccggttggtgcccgccaagaatacaaatttcaaattaagcatccaaagaggaaattcaacagtttacacgtatgttttttctttatttaaatattcaattgagtggttgttctatagagggcgtggtcgcaaactgtatttcgttaaatatatctatatttgcatgtaattgtatttgaattggtgtagactatttagacgtcggatcgtatatattgaaaaagttatcccatagtttacattcataaaggttcaattacatcaattaagtactacaaaactattttcgctgtgagttgatactaccatagttttccgtgtgtgttacaataatttaagccagctaatatccctggccaacttgatttaatgaaacaacttagggtctttagcattaggtggtacacttagagaaaacaatatcgacttaaaatcaaggctaaaaaacaaaatcagtgctgggctcttggctctgtaaatgcttaataatacacacgagcgtgtttgcgttcagtgtccgtgccagcaaacttaattgataaacattaaataacatttggattcagattcagaacttgcatcctcaccgaacggtgtccaagtatttctaaattatgtattttactgctcagagcagcaatgcgcagtccccaaaacggtgttggatcgagttttagtgtgttagatatataaacaattcggcgttacacttgatttttcatttgcccttctcagtacattgtatcacttggaattgttcatagaccactctccccacctgcgattctgggtcacctaacccagatcaattagcgcctgcaacgcacatggatcagacgcccgcgtcgcaaagagcccgatgccgaacccgaacccgagtccgaaccggagccggaaacagaagccacagaagccgacggaatcagggccacatctgcagcttcttggggagctggggaatccctacccagagcctatcacattggaacgcgtcgcgccagcagatactcggagaactgctggcccccaacgctggcctcgatggtgaagccggcgttgaggagtcgggtgagcacctgcaccgagttcagcttgcagtagccgttgagggggaagcgaatgatttgcccccagtcgccctggttccaggacactccgctgcgactcgactgtgtcgcttggctggcctccgggaagagctcgtcgagcagagcccgttctgccgacagcattatgcgttcgccaaggtctggcgagatgtgcagcgccactacctcgtaattgcactccggcgatgcgctggtcctcgggctcgtcttgatgtggcgagccggtggagtgggtggcgccaccaaatagttgccattgcgaacgcgatccttgcgcatgctttccagctgcttaatcatcgctgtgggcacatcgattggtcatgtggagagggaatggagacagggagaagagcaaattagctataatcgctggtaggcataacgaggttcgatgcacagagaaaaagtatcaagtgagaagtcaaatcccaagtgtaacttataataaatttaacatagaatatgtaagctttttactccatatggaagttgaatacttacgctccacttcgtagtagcgagcctcctccagcagcagctccaggtcgggaaaatcctcggcaatcagaagtcttgagtttctcataaagttcagaatgtggcggaacatgcccccgtcgcgatcgatgaaatagtgctgcttcagcgagtccagcacgatgggtatctggccattgaagagcttggccagcttcgactccgggtacttggtgagcgtctccagtgagctggtgtagatggtcccgcccacgtcgatgtgaacgggcgccgtatagcgggaggcggcggccacacacggaatcccggtgatgggcttgtggttgccgtgcaaataggaactggcccccgccgatgaggctcctccgacggcggcggcagcagctgccaccgctccgggcaagcccagcggcgtcactgaggaactggcgggtggcgtcggtgtgggcgaagaggagtttgagatcgttggcgagacggttggcgaggagctgcgggcgaaagccgttcacgaattcacaatgagaatgtttgcgacaaagaggaatggcaatgtggcgtggaagctcgcatccatcatacaatcgatggagtactctgcattccactgcactttgtagctgccaggatgttcttaaaacttttgaaaataccaaataaaaacaataaattctacaaaatcgtagaatagtgttgtatattccataccttactaccctaattattatctttgcccataaagcccaagcttacctgattttaatatcgcttctggcgtaaatgcggcccgtggaggataagtcgcgtggctccagggccttgacatctctttcgcgctctcggtccatatcgcattttttcctgcaaccaagaatcaaatgaattcccagttaattatcacataatatacaagtaatgagagcagattatataagtcggtgggggggcttcgaaagcgctaatcatgagaaccaatttgtcccccgcgccaaactgaaattgacttgactctgattacggacagccacatcggcggaggacagcaaacgtgacaacgaaaatgccgcgacgggccaaacatggcttgcagctctccacagggcccataaaagttcacacacacacacacacactcaggcattcagaccgatttgtagggaggcagagccaagtcgtacgtacgtacatatatagatatatatatatatttcatatggccacggtcttgggctgattgtgtgggaatatttggattttcactgcgtttccatctcggttacggggcgtcgagcccgaagcgatcggctctctgcagcttcgttcgtggacaagaccaaatcgccattcccgcatggcttataccatatagcagcccaaactgggcggcctgtggatgcagttaatgttaacggccatcgagtgcatcgttttagccactcgtcgatgtggttgtattggccggaagggttgccagtcgaatttcacacgaaaatcacattgtttcgcggtggaaagcggggcaatgtgcgatgtgggctcgccaattatgacgtgtcagtcggatgcgtgccacatggcgtatgcgcaacgcgcccgctgagccgacttaacaaagtcaacaccaattacgtggctacatctaaatctgcaaagcgagagccaaagccatcatcatcatcaccatcatcagcatcatcattagtatcagtttcagttcctccaagtccaggaccgcaaattaataaaactcaatcaaccggcaagcgaaccactcaaaacgagttggccccatatgacaaatgttcacatgctttatgcacattaacttggcttatacacagttttcttcagttatgaatgtacgttacgatgtaactacctttgaatgggtagcttagctgggacataagcaattaacctacttaataaggcaatattttctgtatttatagtagttaaacatattcatttaataagatgacaaagaattcggccatattccatatactttctcagcaatgtgataatggaatgtccgtatctgaaatttatattaccgatcacattgccccttgaagagcatttattcttcgcttcgccacaaatcaccgctgtccatctagctaaacaagtttgctttttttaaatgtttgaggccctgcggccacgacgactcgggctgggtaattacgatttgattaactttaactacatgaacattcaaatgcgaatgggaaccggagaggcagtggatgtacaagcttacgagtgtacgattgtgcgagggctaaaaagcgaatagaaacgtaaggagcggcggacgtcgaacagggttacggtttccaatggaaaccaagagagttgcacaaaaaaaattgcacaaaataaatggctgcaaggcattctcatggtagcaatggcgattgaaggggttccagaaatgggtggcatatacagctggatttttattaatttacgccaattataaagcgtgagtaatgcgttcaatcaaacatcggatattcgtttatgggatctggcttaatggtttcctagccaatatcctttaccacaccgcaccacaccgcacccctctctctctcgttcttctactcctactccttcctggccacattcctcctagggccaactgctgcagttgcagccacaaaatatgcaatgcctgagctctggcttgccacacaaacaattcaatttcaattgctttgcggcccacttgagcaggtgcaacaacaacaacaagctccacacacacacacacacacacacacacacaccgagtttgggacacacatggaagtgtgtgtgggtgtggacacccagagctaacggtattgtatataagacaagcactgcagtttgcatcctattctagtccattaccgccgcaagcggtatcttttctatgccgtctagtagcaggatgagccgagcagtgggcgcgggggggtaatgtggcaaggggctgaggggcaaggctgcaggctgggcgggggccgagttgctggagttgttcgcagcgcctttggttacacttgagatgagacccagagctgagcacgtgagatatgaagggaatatgtcgaattttccaaatttataacttccagaaaagtagaaagtattcctcagatctttcaatctgaacaatcctaacttggcttatcttttttttatgaaaatagcttttacatgcaataatagaatataaaatataaattttaatttatattcataagcaacgaaggatcagttgatccttctttcgcatgctgcgcacctctgaccaatatgaatattgaagagttgcctttgccgtagtcatatttgtcaaccgacttccttccccgcatcattttggcatcctggcaatccggcctgctgctctgcatgcactcgtcctttctgtggtcattatttgacatctttgcctggcgcaggttctggttttaatggcaatgccattaactcttaactcttggcattgcacatttgctgggacggagacttcctcttctacttctgacggaggagtttcatgtttcattcggctccgggagaaagagatgactgctgtgagcttattagttttccattgttcagattgtgagtgcggagctggatatcaggttgctgaccagtccgggatgaactggccccggggcgaaaccattttccaagatggaattatggacaaaactggccgttggcacatgctcaatgctcgaatcctgggtggataaccggtgtgggaacccgcccatttcagtgccacccaggcaattcgccacgacttggtctgctcggttttcggatcggatggcactgctggcattccctggccctcccaaaacaggacaaaagcgaaaacaaaagccaagaaatgagctaaagtgcagaccacaccacatcacacacacaccctcatcctcattctcgtcgtcgtcctcatccttgtccacacggagatagcgagacacacacctaggcagagcatcagacgttgacgactgcgacgctgactatgtaaccctagtaaatgtcctgcggctagccaaccttccgcacacaaaggccagacagcccgagtgtcctggttggtagccgcacttacaaaaatgatagaggtatcttattccatcgaatgattacaattaataaaacttactattattatttaaaactaacgcgaagtgttaacagtatatttgtcagaaagtattctacgtgcatgattgatatttttgtactttccagtaatacgttttttccagtgtcgaaggagaaggctagctgggtgagagcgagagagctagcgaaaaagggcaaaagctgactaggcccgcggcgatcgtttggaattagtgcggaaatcatggatggatacgaaacgaaaccaagcaaggaaagcgagccaagccaagccaagccgagccaaggagtacggaacacgggcggaactggggcccaaaggaccctcggaaggtggagagcttattcatcaacacacagcgctatggaaagcgtaggaggagccggagcaggggtgtggccatgcggcccccgaatgtaatccactggggctatgcacgagcgagtgcccactgtagttgggcaaggtgcccgtgcccggtgtttgggattgaaacttggggttatcctacccgcacaccacctctttcccgcccatttggttctggggtggttccttcagggcttctccggctcatacatgtgactccgcttgagtgtgtgggtggccgtgtgtggatgccgggtgcctcctcattcatttatccttgcagcgctagcggcaacgagagcagcagcagcagcagcagcaacaacaacaacaaaggagcaggaacatagccagtaaccacaacggcaaggatatacctcccaatccgttccattccgttccggacccaaaccgaaccgaacccttctcagactccaccaaacgattccgataaggctaggggttggggctggatggctagatggctgcctggctggctggatggctggatggatgctgcaggcagaaacttttgcgattggtaggtaagtctagtcgtgtccgttctggctttggcttatacccatgtgtgttgcctgcatttaaagatatcatacctaagttggtctgcgtctcatggcctcaatgctccccaggcagctcgcacaacaacaggagtggagagtataaaagcagaataaaaacagcagcataaaaatggggaaaataaaaagcaaaacgaaagttttcgaggcaaaatcttatctcaattttaaaacgcccgcggcgaaagcgacgtcggctgcactgaatccacctcgaaagttaatacgaaaacattgggaacccgaagatttatcaaattgcaacactgctgcagcagcagcagcagcagccgcagtagtagcagattatgtttgacgggcgacgagggcggtggattccaattaggcaggacctatgtatgtatattgggggttggaaaaagaaagcaaacttacggctcccgggaactgcagataagggaatgcggaacggcacgaaacgcttgtgtatctagccaagacaaacataaagtaaacacacaaacgcacacacacacacacacacacacggagcagcagaggaaaaatctgcaaaatgtcccggggacaagttgagaagaatccaaaagccccgggcgaatctcgagaaggtcgaaaggcaatggcaaggagtggcatgtggagcaactgcctccactggcttggcttgttttcgtttcgcagttggccaaaaccaaaatcaaaacgctgatgagcaggcaaatgaaaaacttttgccgggcagtcggaggtcccaagtaaaacacaaaaagccaaagccagaaggagaacccccatacatggctaccattcccctccagatctaggatctcgggctgcagtgcccgaactcaacttctgcgtcgacgtcgtctttagccaaagggtccaaatccaaacggcggagctggagctgcggcatatgggaaatcagaccactctgcccccccccgtctcccttttcacactgcgatgctacgaaaattgttggccaaagttgcagaatgtgtgcgccatggcaaattgtacaaatatatgcgatatatatgtgaatatatatatagagcatggccgtgagtatgagtatgagtgttagtctgagtgtgagtgtgagtgtgtgggtgtgggcagggaagtctggcagaagttgagtgagtgagcgagtaactggagtcccggcatatactgaagcagcagatattaaaacgctgcaaggctttcaaaaataaactttgaaaaatttattagaaaatattaaataaaaacgacgattgcgctgcatatggctcactcagcaaaaggcaggccaagggttgtggcagcaggaggtgggggggcttcgaggaagcttggagctacgtatgcagagcaaacattactcagccaactcacaactcgccgacatacgacctccatgtatgaaaaaaagtgaaacaacagcatccacgatgacgacgacgacgacgactagcaaaatataaatatattccggataaatccacatgtgagagtgtgtctacctaaagatgagatgtttttattcagctaaattcgaaaattgaattgaaagtcaaaagcgcaaaggataagcagccaaagcgttggaatattgccgtaaaggaaaacattgcgcatacgcagcgttgtttgctgggttcgagcaaactgatagcttcactgcagcctcagccggacattgtatgattgccggcgctacttaatcaagtgtacataataattaacagccatgtttccactcgaacagcgctcaaacaatggaacacgattcggaatccggccggaaaacagcaggcagagagcaagctggtccaccgcaaagccaaaacccattcagatgcacttctgccagtgcaactggattcgcaagtgcaactggcagcggcagacaatacggcctgcctaattggtgcaatttgcgtgtgcatatcgcagccaaaaacagcatcaacagcagatgcaacacaaaggcaactgaagtaaaatgcactccccgatgcaacaacaacatcggcaggtgcagtcggccaaagaatcgggtttcggaacgggaagtcctgggtatcatcagagtgtaagccaggagtattaggcatccgattaagattgttccaagatcaaaaaatggcaaggtggatgtaatgcattaaaagcataagatgtattgctataaaatgttgtatattttacaatatgcttaaaaaatcttgaacttcaaatatacgcgataatcagaagtcgtacccattgcagttgcattggcacagccactccgttggtggcaaattggcagcgcaatgttgatgctggtaatgatgccgaattgcagcttaattaacacacagcgcgttaagagcttttgtgccactgcctgagccattcaaatgcagcagaagcaagtaagggctttgactattggtacgtaatggaaatcactttgccgtcggtttccgtttccaaacagcagcaggtataggccgttaatgcgattgtgaatgcaagtagctggagcctgaatccgctgaatgaaaacaaattagctgggaatatggcgactgccagatcctgacaatgcgagcaaagaatcgcgaactgcggctccagccaaacaaacaggcaaacaaacaagactttgacttcgactccaccttctatagggaaattcttgtgtctggcatgcgaaaacaaagaaaaaacacacaaaaaaaaacagcagaaacagcaagagataacaccaaaaccagttgcttccatgtgaaagagagggctgtgtgcaatacgagggcaacaggcgaaggtcgtcaacgccttgctcctcccattacacaggaagaaatgatatagtcatgtgaacaacgtaattggaaatcagtttcaaatgggagaacttgtgataaaataatttgactaaaagatattattatcaaagtgcttcttgaatatataccatctattcaatactattaatttaccctattcaacaactattaattattttctcagagtggtatctgtctatttgaatgcaattccgcgcatactgcagttcttgctttgaactttgcctcatgacttggctccaactcaacggacaaactggcggacaaacggacagacggaccgatggacggacggacgacgactctcacggaacgtcgattcgctggctaaacaaaaatttgttgtacgagtgtgctgtatgcatttggcccgggggtcatcttttggccgcttagttttcgaccagccacaatacaaccggtcatgcccccctcctttggttcgcttcgcgtcgacccacgacccccgccccagcaccatcgtattttatagcctttaaggtagaaaaaataatgcgactcgttctcgtctgcacacataactcagccggcggctaaggttgcccaaaaatgcccatggcgtattttgtatgattttttctccccatcgccgtagcccgcttcctttaccgctcccttaccctgggttactcttcttacttttgtttatttctcctttggtgcgggtacagagcacttgaggcgtataatttttttttttttttttttaaacagtcttcgtttatggcgcacaatttctgacttggcatgtgggagagacgaaaatcagtggccagcggcacttttggccaaaaccaaagggagagagatcgggtggcctgcaacttggactgtcgatgtgctgttgtgtgtcaaaaattcgtttattacagaatctttttttaaactaatttattggccagctcgaaggctggttgcgattttcggggcattttgcaaatgaaaagttttcagtttacgcttaccgtttggggcaggaggaatccaccgtcaacggtgatcgttgatccaatgcaacaaacggagttctgtttttgggaggaaagcaaagaacatatcagttagataaatatatttcgattgggttttgaattttgagctattgattatacacctaaaactcttcatcttcataattatgaataaaactcatgttttttaataaattaacattagggcaggagtaatgtgataaattggatttccgtcaacatttaaacaaataatcatagaatgacttaattgtataattataaaaggaaaacaaattatatgtgcaacttaagtgtctcttcaccgctcaagaaactcacaaaaaggttggtatatttaggaaatgcactttaactcttttttaatacaacgcgcgcgtagataaacgatattcgtcttgtccgatcttcagtgaccttcgatattctcagtgtgcttcgatctgctgatcgctagtcgctttcggttgaaccctttcaaattcaatcaaatgagcgcgcgccaacgagtgtttacttccgtttccgcttgccgtacacaacgcacaccgttaaacgttaaccgttcgctgttcaccgttcaccgttagacctaagtgttgcctacttttgagcgctggcaatttacctcacttgcattcgcgtcgagagttgctcgaatactgatttagctcgctggctgatggatggcgaatggcgaatggtgaatggccaatggttcggctccccaatgttgcgtgttgcggctcgagttgcgtcttgttgcgagtgggggtggagtgaagttcgtcggcgctggcgtctgagccgacgaccttgagagagcagcagcagcagcagcagaagcagcggcaaagagatagagagcgccgtttgttgtttagcggcttggcttttccaccatatgatgcctttgttcgagcgtttaatggtctatttccggtttaagtggtccgatctggctttgttgttcttgttttcttgtggcctgcaactaatctgccgcaattaacaatgtaactgcaaatagaagaattagactgcttggtattatttcgttaaattagagttacagcattcgaaaaacattgttatgttttaaaaattaagaaatattaatttctagcttacagaattttaaaatatttcataaatgtagtttctaatgaaagactctgaaatagatcaaaatttgaaaatattttttggcaagtgcatacactaatttaacccaaaagttgcattcgtcatgggggacatctctatatggtcgattttctataattgtaaatatcaaagcctgtttgtttttgttgcccttggccatgtgtatgcctgtgtgtgggtgcatgtacagctgacaccagtgtgttggtgcgactgcctctgtgtgcgtgagcgggtgtacgagtgtgcgtgttggtgttaatgacaaagcatagaacgctgcgccccgcggccaaacgaaatgaaactttgtgcggcatcagctccagagactttgaagaagcagaagcagaaccagaaccgccggcatcgccatcggcaacggcaacggcaacggcggtacgaagcacgaagaacggagcattggggcgctgagctgagcccgcctggaatgccccggggtcgttcgaggagcga

SEQ ID NO: 21998 - DNA, 1416 bp, DROSOPHILA
cgcgaatgcaagtgaggtaaattgccagcgctcaaaagtaggcaacacttaggtctaacggtgaacggtgaacagcgaacggttaacgtttaacggtgtgcgttgtgtacggcaagcggaaacggaagtaaacactcgttggcgcgcgctcatttgattgaatttgaaagggttcaaccgaaagcgactagcgatcagcagatcgaagcacactgagaatatcgaaggtcactgaagatcggacaagacgaatatcgtttatctacgcgcgcgttgtattaaaaaagagttaaagtgcatttcctaaatataccaacctttttaactccgtttgttgcattggatcaacgatcaccgttgacggtggattcctcctgccccaaacggaaaaaatgcgatatggaccgagagcgcgaaagagatgtcaaggccctggagccacgcgacttatcctccacgggccgcatttacgccagaagcgatattaaaatcagctcctcgccaaccgtctcgccaacgatctcaaactcctcttcgcccacaccgacgccacccgccagttcctcagtgacgccgctgggcttgcccggagcggtggcagctgctgccgccgccgtcggaggagcctcatcggcgggggccagttcctatttgcacggcaaccacaagcccatcaccgggattccgtgtgtggccgccgcctcccgctatacggcgcccgttcacatcgacgtgggcgggaccatctacaccagctcactggagacgctcaccaagtacccggagtcgaagctggccaagctcttcaatggccagatacccatcgtgctggactcgctgaagcagcactatttcatcgatcgcgacgggggcatgttccgccacattctgaactttatgagaaactcaagacttctgattgccgaggattttcccgacctggagctgctgctggaggaggctcgctactacgaagtggagccgatgattaagcagctggaaagcatgcgcaaggatcgcgttcgcaatggcaactatttggtggcgccacccactccaccggctcgccacatcaagacgagcccgaggaccagcgcatcgccggagtgcaattacgaggtagtggcgctgcacatctcgccagaccttggcgaacgcataatgctgtcggcagaacgggctctgctcgacgagctcttcccggaggccagccaagcgacacagtcgagtcgcagcggagtgtcctggaaccagggcgactgggggcaaatcattcgcttccccctcaacggctactgcaagctgaactcggtgcaggtgctcacccgactcctcaacgccggcttcaccatcgaggccagcgttgggggccagcagttctccgagtatctgctggcgcgacgcgttccaatgtga

SEQ ID NO: 21999 - protein, 338 aa, DROSOPHILA
MDRERERDVKALEPRDLSSTGRIYARSDIKISSSPTVSPTISNSSSPTPTPPASSSVTPLGLPGAVAAAAAAVGGASSAGASSYLHGNHKPITGIPCVAAASRYTAPVHIDVGGTIYTSSLETLTKYPESKLAKLFNGQIPIVLDSLKQHYFIDRDGGMFRHILNFMRNSRLLIAEDFPDLELLLEEARYYEVEPMIKQLESMRKDRVRNGNYLVAPPTPPARHIKTSPRTSASPECNYEVVALHISPDLGERIMLSAERALLDELFPEASQATQSSRSGVSWNQGDWGQIIRFPLNGYCKLNSVQVLTRLLNAGFTIEASVGGQQFSEYLLARRVPM

SEQ ID NO: 22000 - DNA, 4820 bp, DROSOPHILA
ttaataatgcgatactcgtattcgtactccatcacgcgcattcgcccgtccagttctatggctcgatattggttcaatccctccatgaactgaccgcggctgcactgcaccgtgtccaggagctgcgaaaaggtaaagagtagcttctgctccacgcagaactcgttctccggccccgaatatcgagtcagctgcagtagttcacccagcttgcgaaagcgcggctttatctcgcggcactcgaagtactcgtggaacaccttgagcaccggccgctgctccagagttcgcggcacttccagttcatcctccgtgctgtcattgaggctgcgctccagggaggcgttggcgttgccagtgcgcggactcttcagcggcgaggtgctggtggcggcggcaaacttgaggtccggtaccagcaaaaggctattggatatttccgcgcccttcacgtcgtacgttcgctcatcggtgcacagcaccagcttctcgttctggccacccttgaaatatagcgtctggccgtcgcggatttgtccaagcatgtgcccatcgagctccagaaggcgcagattgtccgaatccacgtccgccgagggaaagtacagagcctgggtgagttgggtcaactggcgctcgtccagtttcgcatgcttcacaatggccttcacatcctccggcgtgcgaacgtagctatggcgggtggttgggtaacattataactcctacgcaggcataccaaaggcactcacagctgggcagcagactcatcaacctccatggattccatgttcgctgcatgtaaacaaaacaaaaaattaaccaaaacaatgagcgggaaaaagtagtgggaccaaagcacagcaatgttgctttcgttgagggtattcaatggcctttcaatatgtaagcttaatgtgcttggaaaacattacagcattaatccgcacaccctgcaagggcacactcaccgctcagctgatcagttatttaacggtcgtagcctcggcaagaacgtttcttttttgagcggagatttcgcgagcacgcgtcttgttttccgccgttcgccgtgcacttggacgcgcactttagaaagcgttgactgcgccaaaggtcattgctgggcaagagaagcgtccaatcgccgctggtggtgacgcttgtggaaaaatcaattcggaccagtgacggacgtcgaacttccagttctctgacaagcggaatccagtcaacaacaacatgcccgtgggaacgtttgacgcctgggatgcggccgtgctgatcaccatcctggtcatatcggctctgattggcatctactaccggtatacaggcggcaagcaaaagaccacacaggagtatctgatggcggaccagagcatgaccacttttccggtctccttcagcctgatggcaagcttcatgtccgccatctcactgatgggcgtctccaacgagtcctacgaatttggtaccatcttctgtgtgatcaacattgcctacgtgctgagtacgcccattgccgcgtacttcttccttcctgttttctacaggatgcggacgaccagtgtgtacgagtatctggagcggcgctttggccaggccacccggctgtccgcctccctggccttcaccgtgcaaatggtgctttacatgggcattgcactctatgcaccagcgctcgctttagaagctgtaaccggcattcatcggtcaatggccatcgtggtcattggactggtgtgcaccttctattcgacacttggcggcctgaaggcggtgctcatcacggatgtgtttcagtccttcctcatgtttgccgccatctacgccgtgattgccgtgtcggccattaaagccggcggattcgcggccatctgggatgtggctgtggagcgaggacgcgtgaacttcattgagttttcattggatcccaccgtgaggcatacttggtggtctctgatcattggcggcatggtcacttacctctccttgtatggcgttaatcaaacgcaagtacagcgactcctgagtgtccgcaatttgaagagcgctcagtcggcgctttggtggaacctgcccatcctaggaatgcttagttttagcaccattttcagtggactgtccatattctactattatcgagattgtgaccctttgctaaagggacgcatcgacaagcgggatcagatcatgccccttttcgcactggagactatgggtgagttggaaagacatccaataagaattagcattatttgatttctttttccggcaggtcaatatcctggactgtgtggtctgttcgtgtccggaatattctccgccagtctttccacgatttcgtcggcagttacctcgctgtcggctgtaacactggaggattacctgaagcccttgtacaaggcgatatttaaacggacgctaattgactccaagtccacgatgcccaccaagattgtggcgtgcatttttggcctgctttgcatcggtctagcttttgtcgctggctccatgggcggagttcttcaggcatcgcttaccattttcggtgtggtaggcggtccgctgctggccattttcacactgggagtctgcactacacgcagcaaccaaagaggcgtgctgcttggcttcctcgtttccctgatagtttccttctggatgggattcggcggacccaaaccaaagccagttaccttggagtttagcacagcgggctgtgagaatgccaccgcggtaatggcgcgtgccatcgagctcagctcaaagagcagcggagtggtcatcgaacccgactacttctggttatatcgaatttcttacttgtggctgagcgtcatcggctttcttattgccgtggtcgtcggctatttcagcagcattgtgctggctcactgtggaaaggcagaaaacgcggaaatctatttggacaagtctcggaagcagctggactacgatctcttcgcacccatgctgtcccgccgctggcgacgccataaagaagaacaagaccaaactgcccaggacgaaacgctcaccaaactaactgagcagtagttccgcccggcttagatttagtgtagaatatatacatacatataaaagaatttccagaaggcgtcggctatttggttagtcgtgttacggatgtcgtacctaaaagtgcataactatgtgacctttttgtatacctgtgtgaacgaaactggcatacagagcgaccaaaacagagtcttccatatacacgtaaacaacgataattagtagttattagtcgtgttgcaaatgttcacaagcgcatcattaagaggcctcttaagaatagtcaaatgttttttacaagaacgtatcaaaagtaggagtctacctcaatgaacttttacagagggacaataatcaatttggagcctaaaagcgagttggccgactactttcccatgttgagcattggcagccacaatgccccacataaattattgatttagtagtacatctaattttaatgggatatttatattcatacctcttagttactcgatatttgcatacatagataacataataacattacaataatacactacagtgagcaccgcctataaatagttactacatggctcttaaagcattacattgcgccacagtgtgaattctgtttacttatatacctctactatatgtacacaaatatactatagactaattatatactcgtgtcgtgtcgcaatcaaccattgaacaataactcggagcagtgaaagttatgtgtatttgtaaaagccaaactgctgatcattaaagaaatctgttctacaaaatgtgattgcctttttttttatttgctgcggaaacatgatacttgcaatccccagctgcagcttggattgaaataattacttcggttggctcatgggtgtttttcagaaatcacgatttgtcgaatacttcctgcgataagcaaattcgtacgctatcagctaccaaggttatgcgaggctctcccaacattgctcactcgatgaggaatctatttcggaacgaatgccataactttcaagcgtttacctttgccaattgactattgcgccatgcgggaacaaagtctaattgcgggtcggagacagcaaattgcttaaaattggagaagccatgggtcagcatgtgaatatgggttcgcctgtaaacaaatgccaattgatagatttgtcgaaacatcattaataaacccagaccacgctcgtcttgctcatggaaagttttcagaacggattgggagttcaaagtacgaatagactcgcatgacacacatttttggctaatgttctggcgaaagaggagaccaaaagcggtggataacatagttacgccataaccgatttttgtttactctaacttagtgtgcgatttactatttttaacaatatttatgttaaccaacaagaatcttaaggcatttatttgtattcattagcaacgtcataaaatataataaccatacagatttacatataagagtatcaatttggcgactgatgattgtttagccttcatttttgcaacgccaacagatgatttgggcgatttgttagcattcggaagcaaagctttcacagatagtttcgctgatacgataagggtttcgtttggatagcattcattgaagtgattcattggggaagatttatggttctattgattctgcttcctcacaaacttcatgaacacatcctggaaagttgtatggctgaccgagtagtacaatatctgcatctcatccttcaagttctccatgtactcgaagatcgcggaccact

SEQ ID NO: 22001 - DNA, 2763 bp, DROSOPHILA
tagcctcggcaagaacgtttcttttttgagcggagatttcgcgagcacgcgtcttgttttccgccgttcgccgtgcacttggacgcgcactttagaaagcgttgactgcgccaaaggtcattgctgggcaagagaagcgtccaatcgccgctggtggtgacgcttgtggaaaaatcaattcggaccagtgacggacgtcgaacttccagttctctgacaagcggaatccagtcaacaacaacatgcccgtgggaacgtttgacgcctgggatgcggccgtgctgatcaccatcctggtcatatcggctctgattggcatctactaccggtatacaggcggcaagcaaaagaccacacaggagtatctgatggcggaccagagcatgaccacttttccggtctccttcagcctgatggcaagcttcatgtccgccatctcactgatgggcgtctccaacgagtcctacgaatttggtaccatcttctgtgtgatcaacattgcctacgtgctgagtacgcccattgccgcgtacttcttccttcctgttttctacaggatgcggacgaccagtgtgtacgagtatctggagcggcgctttggccaggccacccggctgtccgcctccctggccttcaccgtgcaaatggtgctttacatgggcattgcactctatgcaccagcgctcgctttagaagctgtaaccggcattcatcggtcaatggccatcgtggtcattggactggtgtgcaccttctattcgacacttggcggcctgaaggcggtgctcatcacggatgtgtttcagtccttcctcatgtttgccgccatctacgccgtgattgccgtgtcggccattaaagccggcggattcgcggccatctgggatgtggctgtggagcgaggacgcgtgaacttcattgagttttcattggatcccaccgtgaggcatacttggtggtctctgatcattggcggcatggtcacttacctctccttgtatggcgttaatcaaacgcaagtacagcgactcctgagtgtccgcaatttgaagagcgctcagtcggcgctttggtggaacctgcccatcctaggaatgcttagttttagcaccattttcagtggactgtccatattctactattatcgagattgtgaccctttgctaaagggacgcatcgacaagcgggatcagatcatgccccttttcgcactggagactatgggtcaatatcctggactgtgtggtctgttcgtgtccggaatattctccgccagtctttccacgatttcgtcggcagttacctcgctgtcggctgtaacactggaggattacctgaagcccttgtacaaggcgatatttaaacggacgctaattgactccaagtccacgatgcccaccaagattgtggcgtgcatttttggcctgctttgcatcggtctagcttttgtcgctggctccatgggcggagttcttcaggcatcgcttaccattttcggtgtggtaggcggtccgctgctggccattttcacactgggagtctgcactacacgcagcaaccaaagaggcgtgctgcttggcttcctcgtttccctgatagtttccttctggatgggattcggcggacccaaaccaaagccagttaccttggagtttagcacagcgggctgtgagaatgccaccgcggtaatggcgcgtgccatcgagctcagctcaaagagcagcggagtggtcatcgaacccgactacttctggttatatcgaatttcttacttgtggctgagcgtcatcggctttcttattgccgtggtcgtcggctatttcagcagcattgtgctggctcactgtggaaaggcagaaaacgcggaaatctatttggacaagtctcggaagcagctggactacgatctcttcgcacccatgctgtcccgccgctggcgacgccataaagaagaacaagaccaaactgcccaggacgaaacgctcaccaaactaactgagcagtagttccgcccggcttagatttagtgtagaatatatacatacatataaaagaatttccagaaggcgtcggctatttggttagtcgtgttacggatgtcgtacctaaaagtgcataactatgtgacctttttgtatacctgtgtgaacgaaactggcatacagagcgaccaaaacagagtcttccatatacacgtaaacaacgataattagtagttattagtcgtgttgcaaatgttcacaagcgcatcattaagaggcctcttaagaatagtcaaatgttttttacaagaacgtatcaaaagtaggagtctacctcaatgaacttttacagagggacaataatcaatttggagcctaaaagcgagttggccgactactttcccatgttgagcattggcagccacaatgccccacataaattattgatttagtagtacatctaattttaatgggatatttatattcatacctcttagttactcgatatttgcatacatagataacataataacattacaataatacactacagtgagcaccgcctataaatagttactacatggctcttaaagcattacattgcgccacagtgtgaattctgtttacttatatacctctactatatgtacacaaatatactatagactaattatatactcgtgtcgtgtcgcaatcaaccattgaacaataactcggagcagtgaaagttatgtgtatttgtaaaagccaaactgctgatcattaaagaaatctgttctac

SEQ ID NO: 22002 - protein, 545 aa, DROSOPHILA
MADQSMTTFPVSFSLMASFMSAISLMGVSNESYEFGTIFCVINIAYVLSTPIAAYFFLPVFYRMRTTSVYEYLERRFGQATRLSASLAFTVQMVLYMGIALYAPALALEAVTGIHRSMAIVVIGLVCTFYSTLGGLKAVLITDVFQSFLMFAAIYAVIAVSAIKAGGFAAIWDVAVERGRVNFIEFSLDPTVRHTWWSLIIGGMVTYLSLYGVNQTQVQRLLSVRNLKSAQSALWWNLPILGMLSFSTIFSGLSIFYYYRDCDPLLKGRIDKRDQIMPLFALETMGQYPGLCGLFVSGIFSASLSTISSAVTSLSAVTLEDYLKPLYKAIFKRTLIDSKSTMPTKIVACIFGLLCIGLAFVAGSMGGVLQASLTIFGVVGGPLLAIFTLGVCTTRSNQRGVLLGFLVSLIVSFWMGFGGPKPKPVTLEFSTAGCENATAVMARAIELSSKSSGVVIEPDYFWLYRISYLWLSVIGFLIAVVVGYFSSIVLAHCGKAENAEIYLDKSRKQLDYDLFAPMLSRRWRRHKEEQDQTAQDETLTKLTEQ

SEQ ID NO: 22003 - DNA, 5127 bp, DROSOPHILA
tatttgccaaaagaagttcagtagtgtctacgccttgaagcggcatatgcttactcacaatcgccaacatcatcttaaaaaatgtacctattgttccgaggagttcaaaacagaaaaacatctcaaaaggcacgagcgtggtcacatgggagatctgtttcgttgcgaattttgctcattggtatttgtagatgttaactacttgcgaaagcacaaaaaacgcattcacagcaacaacgtaatagcgatgtaggagaagatcatgtccaaacgggtgactaccggttatactcttggaaaacaaccattgaattaagcagattaatatatgtgaaaggaatataaacgatttattattcattataattataatgaccgcaggtctaaacttctgttgttgattcttactttgaattttcttaaatatgattcttttgttactttcataagctcaaaattaatattatttaagtttcgttttaattatatatttcacagaaactcaaatatactgagaataagctctaaatttatattattgaaatttccttttaattgtatatttcacaatacattattatactgaaaataattaaacaatcgattgattgctaccacatgctacttaatgccttcttatatatctttagagcttcaaacttttttcttttagctttgttgtggttttgcgagaacaaaaggaaaaatagacaaaaagaatgatccatacatcatgaaaacaactagtatgctttattattagtacgttttgttcttaatatagaaaaaaagggaatatatatgctttatgctttatggacgtgcgactatatcaaatgtaacgtataacgttaaaggtagtctgtgtagtattaatacacaattgtaaacgaattcaatccgttaaaaaacactttggtgaaattgtaaagcttttgtatgcgaacaatttaaacaaaaaaaaacataatcttcttaaaactaactaaaatacttcgactcacatctcgaagagtttctttagctccgcgaggttgagaccaccgccaacacatttggtcacttctcctccttcctctggaagcacaactttcgcaatttctagcttgcaatcttgcagggacttaattcgttgctctacagtgtcctggcacatgtagcggtagatgaaggtaggcttagtttgaccatatcgataaatgcggtcctgagcctgtcgctccagctgcgggttccagtggaggtccacaattagcatatgattggccacgttcagattcagtcccactccgccagcggtgagggagagtagaagaacgcgcttctcgttattcgcgttaaagtctcgcagtacaatctcgcgttctttggcggtcagctggccattaaagtcaagtgtttcccatgatagatcctgcagtcttttacggacgattgcgagatagcttacccactgagatgtaacaatgattttgtcgttggtgcctgtgagcagttcctctagcttatcaatgaccatctttagtttggcagaagggcgtatgaactgaaagatgggattctggggattgagcagtttaagagctctggcactatctagttgatcctcaaaagaactggccgttggcaggtcatcaccagaatcccatggcacattctcctccttaatttcatcttttatcacttccaacttgaaattgccatctcttctagtactgtcctcctcgtcacaacagtcatcttcgctatcggtttcgtcaaacttatccaactcggcaaggacatccatcttgagctggccctccacgtctgaggcatccaccttcacgttctggacgtcctcggcggtcaaagcaccacgcagcatctaacgaaagatgttgagtatgattatgtggggtgataaagtaaaatatgtatatatttaccccaatcattagtcccggatggcaacaaaactgtcgtagccgcagcagtagcaccaggatatagataccaaggatcttttcccctggattgtagccaagcgacttaaggaatctttcgtagatctcgttgtacctttcgtcggacatatgtccggctataaactgtggggttctttccagagagtaataatttaaatcactgttgcccttctcgcgttggagcaggaactgtgtaaagatttttttggatatggcagacaggatctggtacacggccatttcagttttcgatagctgtacgcatataagttcaatcttaagggaaggcagcgcaggcatgtcgccagatgcctgtagcttttgctttgtcctgcgcagcattagtggttttattataaagttaagtcggcgatgtccgagcatgctttcgtttaggttctttttccactgctggaggtcctgaaagtttggtacatttacaaaccgcagcagggcgaacacatcgacgccccgattctggacaggcgttccagtcagggcccaatgacaatgcgcccgcaactggcatacagagttacagcagttggttttagaattccgaatgatgtgagcttcgtcgaggatcacgcggttccagtacacggcgaacagtggagaagtgtttccatatcgtttaagctcgtttactacgagattatacgaggtaatgactaaatcatagctcctgaatgcctctattccgatttcatggcgattgggtccgtgaaaagtcagcaccctaatggcattttgcgctaccttggaggccacctcatgggcccactgacacataacgctcatggggcaaacaactaatgtgtttgccgagggatagcggccgtttgataagtgctcctcctcttcatccgaactgaaaacctctggttcgggagtctttgctagcagatctttctgttcatcctccactacagctttgtctccggcatcattatcatcatcatccaaaattcgaaattgattgatttttttagtcttcacgtgacaggtgcgcttctccggcggctcgtactgctcctcctcctttccagactcttcttcatcatcaaacatgctgattttacggatttccttacaatatactcgattaaactcctgagtccactttaacgtcaaggctttcttcttttcttctcgttttctgttcttagtttcttccgaagccaagattagggctatcatagatagagtttttccaaggcccatgtcgtcggcaaggattcctccagagatcttctgacgctcacgaaattgcatccatttcaagcaagactgctgatgctttagcaggcgcactaacagcaaagcgggttgcttttccaagtcatcgattgcaggacgtggctgaatgggctcatacagggtctagaatagggcgcatttaaagatttaaaaatatacaatttataaaagtactaataaaaagcataaaagcaattaatcctggctattaaaccattaatccttggtgtgcaatagtcagtattttaccttcagactgtcgattatgttgctcttgtgctgatagaactgcgctgcagtgtggttggccttttgtcgatagcggttcagaccggagtacaaattgctccacttgggctgctcggtgtggtccaccagttccgagttatcttcgattttgatctcctgctggtcctcccgcaaacgcaaagtgtccaggaattcgcccagcgcctccaggcgggcattgagcttctccaggtgcaactttaaatcgcaaagctccttggtttcggacgcgttctcctccagttgccgctgctgctgctccattgtgagtatcttttgcaccagctgatcgatctgtgcttttttttcgttatactccgaagcactgacaaaaattgcactttcattgtcggcatattctgttggggaaaggtcgaggtaagtaagaagaagtggcattgcatgttccaggttcttaccacctgacaattcgagactgtcaactggctcaggctccatccagttgttaatttcaccagagctgtccggcacggggacgctgctctggtcttgaatgctgcacgattgtttgtggatttcggttgtatctgatggtgaagatgattccattgggtatattggactgcttccatacctggattgggtattatttaagcttgagatcacagataaactgcaacacggcggcaagtccgatctcgaacacggactccgtggaactgaaaacgactctattaggatgaacaacaaagtaaatgctcccggaaaacctacgatctaattccatttgataactaaaagctcaaaaaacgaagcgacaagttaaaagattcattaaatcttttaaaataaacaccgggtaatcgataatcgattttaaaaggtgcattataaccgatcatttcgttgcgaagcgttcacactgtgggcagatggtaccaaaatatgtgcagtaggctcgatttttgatgtttaaactatttggcctgccacacgactcggcgcgatcttctgctttctaaaatatcgatagtttgtggcattgttttgatcaggtggcatctccattctgaaataaatggcgctgatttacaagcattttttgtaaaatacctatagctaaaaatgtccagtgaaaacagcgagtattatagtgacaaggaggaagactcggtggtcaacaactccagtttaggtaagtaatttttggatcgcttttagtttggtgcccagttcatgtcattcacttaacatgcaatacaggccgatcaaggaaatcctcgcggctcagcaaatcgtcgcgactcagcaaatcctcgcgccccagcagcgctggcgtggttatagatgaaacgcaatcagaggaggaagagtcccagtcgagtgagactgcggaatccgaaaagtccgatgagtccgacaactcgcaaaattcccaggagtcagaagactctgaggacgacagcgttcgtccgtccgctaggaacactaagaggaagcccttgggaatcccctccgatagcgaggatgaggaggacgagctggaacagcgcgctttgtcacccagcacccgcatgagcatcactggagtgcggcctcaggatctcagcgatgacgacagcgagatcgagtacagcgatgaagtgcagga

SEQ ID NO: 22004 - DNA, 2940 bp, DROSOPHILA
aataatacccaatccaggtatggaagcagtccaatatacccaatggaatcatcttcaccatcagatacaaccgaaatccacaaacaatcgtgcagcattcaagaccagagcagcgtccccgtgccggacagctctggtgaaattaacaactggatggagcctgagccagttgacagtctcgaattgtcaggtggtaagaacctggaacatgcaatgccacttcttcttacttacctcgacctttccccaacagaatatgccgacaatgaaagtgcaatttttgtcagtgcttcggagtataacgaaaaaaaagcacagatcgatcagctggtgcaaaagatactcacaatggagcagcagcagcggcaactggaggagaacgcgtccgaaaccaaggagctttgcgatttaaagttgcacctggagaagctcaatgcccgcctggaggcgctgggcgaattcctggacactttgcgtttgcgggaggaccagcaggagatcaaaatcgaagataactcggaactggtggaccacaccgagcagcccaagtggagcaatttgtactccggtctgaaccgctatcgacaaaaggccaaccacactgcagcgcagttctatcagcacaagagcaacataatcgacagtctgaagaccctgtatgagcccattcagccacgtcctgcaatcgatgacttggaaaagcaacccgctttgctgttagtgcgcctgctaaagcatcagcagtcttgcttgaaatggatgcaatttcgtgagcgtcagaagatctctggaggaatccttgccgacgacatgggccttggaaaaactctatctatgatagccctaatcttggcttcggaagaaactaagaacagaaaacgagaagaaaagaagaaagccttgacgttaaagtggactcaggagtttaatcgagtatattgtaaggaaatccgtaaaatcagcatgtttgatgatgaagaagagtctggaaaggaggaggagcagtacgagccgccggagaagcgcacctgtcacgtgaagactaaaaaaatcaatcaatttcgaattttggatgatgatgataatgatgccggagacaaagctgtagtggaggatgaacagaaagatctgctagcaaagactcccgaaccagaggttttcagttcggatgaagaggaggagcacttatcaaacggccgctatccctcggcaaacacattagttgtttgccccatgagcgttatgtgtcagtgggcccatgaggtggcctccaaggtagcgcaaaatgccattagggtgctgacttttcacggacccaatcgccatgaaatcggaatagaggcattcaggagctatgatttagtcattacctcgtataatctcgtagtaaacgagcttaaacgatatggaaacacttctccactgttcgccgtgtactggaaccgcgtgatcctcgacgaagctcacatcattcggaattctaaaaccaactgctgtaactctgtatgccagttgcgggcgcattgtcattgggccctgactggaacgcctgtccagaatcggggcgtcgatgtgttcgccctgctgcggtttgtaaatgtaccaaactttcaggacctccagcagtggaaaaagaacctaaacgaaagcatgctcggacatcgccgacttaactttataataaaaccactaatgctgcgcaggacaaagcaaaagctacaggcatctggcgacatgcctgcgctgccttcccttaagattgaacttatatgcgtacagctatcgaaaactgaaatggccgtgtaccagatcctgtctgccatatccaaaaaaatctttacacagttcctgctccaacgcgagaagggcaacagtgatttaaattattactctctggaaagaaccccacagtttatagccggacatatgtccgacgaaaggtacaacgagatctacgaaagattccttaagtcgcttggctacaatccaggggaaaagatccttggtatctatatcctggtgctactgctgcggctacgacagttttgttgccatccgggactaatgattgggatgctgcgtggtgctttgaccgccgaggacgtccagaacgtgaaggtggatgcctcagacgtggagggccagctcaagatggatgtccttgccgagttggataagtttgacgaaaccgatagcgaagatgactgttgtgacgaggaggacagtactagaagagatggcaatttcaagttggaagtgataaaagatgaaattaaggaggagaatgtgccatgggattctggtgatgacctgccaacggccagttcttttgaggatcaactagatagtgccagagctcttaaactgctcaatccccagaatcccatctttcagttcatacgcccttctgccaaactaaagatggtcattgataagctagaggaactgctcacaggcaccaacgacaaaatcattgttacatctcagtgggtaagctatctcgcaatcgtccgtaaaagactgcaggatctatcatgggaaacacttgactttaatggccagctgaccgccaaagaacgcgagattgtactgcgagactttaacgcgaataacgagaagcgcgttcttctactctccctcaccgctggcggagtgggactgaatctgaacgtggccaatcatatgctaattgtggacctccactggaacccgcagctggagcgacaggctcaggaccgcatttatcgatatggtcaaactaagcctaccttcatctaccgctacatgtgccaggacactgtagagcaacgaattaagtccctgcaagattgcaagctagaaattgcgaaagttgtgcttccagaggaaggaggagaagtgaccaaatgtgttggcggtggtctcaacctcgcggagctaaagaaactcttcgagatgtga

SEQ ID NO: 22005 - protein, 965 aa, DROSOPHILA
MESSSPSDTTEIHKQSCSIQDQSSVPVPDSSGEINNWMEPEPVDSLELSGGKNLEHAMPLLLTYLDLSPTEYADNESAIFVSASEYNEKKAQIDQLVQKILTMEQQQRQLEENASETKELCDLKLHLEKLNARLEALGEFLDTLRLREDQQEIKIEDNSELVDHTEQPKWSNLYSGLNRYRQKANHTAAQFYQHKSNIIDSLKTLYEPIQPRPAIDDLEKQPALLLVRLLKHQQSCLKWMQFRERQKISGGILADDMGLGKTLSMIALILASEETKNRKREEKKKALTLKWTQEFNRVYCKEIRKISMFDDEEESGKEEEQYEPPEKRTCHVKTKKINQFRILDDDDNDAGDKAVVEDEQKDLLAKTPEPEVFSSDEEEEHLSNGRYPSANTLVVCPMSVMCQWAHEVASKVAQNAIRVLTFHGPNRHEIGIEAFRSYDLVITSYNLVVNELKRYGNTSPLFAVYWNRVILDEAHIIRNSKTNCCNSVCQLRAHCHWALTGTPVQNRGVDVFALLRFVNVPNFQDLQQWKKNLNESMLGHRRLNFIIKPLMLRRTKQKLQASGDMPALPSLKIELICVQLSKTEMAVYQILSAISKKIFTQFLLQREKGNSDLNYYSLERTPQFIAGHMSDERYNEIYERFLKSLGYNPGEKILGIYILVLLLRLRQFCCHPGLMIGMLRGALTAEDVQNVKVDASDVEGQLKMDVLAELDKFDETDSEDDCCDEEDSTRRDGNFKLEVIKDEIKEENVPWDSGDDLPTASSFEDQLDSARALKLLNPQNPIFQFIRPSAKLKMVIDKLEELLTGTNDKIIVTSQWVSYLAIVRKRLQDLSWETLDFNGQLTAKEREIVLRDFNANNEKRVLLLSLTAGGVGLNLNVANHMLIVDLHWNPQLERQAQDRIYRYGQTKPTFIYRYMCQDTVEQRIKSLQDCKLEIAKVVLPEEGGEVTKCVGGGLNLAELKKLFEM

SEQ ID NO: 22006 - DNA, 6799 bp, DROSOPHILA
agtcccgcgatccaagtgagtgcgcttgcgccaacgccaacgcagcaccgaagctgaagtttgggccaaactatgacctgtggacgtgcagcagtggcacacgggggttaatggtgtttcgtactagtttatgtgctgcgacgaccattgtgcgaatgccgcataactggaacatcgctgacaggccagcacagtgggcactggcggtggcggacaacctgtggatttgcacggccggcacaagcgaattagcatgcgattttgctcggttcgtgatttcacaaagcggtgcgaatcgacggccacaagggctcacctttgtacgccaaacatgaataatgctcatgaatcgatcgataatcgttcagttctgccctctgtttcaaaggcttttcaaaacgtgttgacttagctgggaatcatacatatacttcaatctcagcctcttgtacttttacatcttcaaaatacccaaacaattaacattttaagcgtaggttttcaaaagagtattgctaacaaaactgcaactgaaagccaaaatagggagttattaccttaaatattattttcctttttatattttttttacagctagttttgctctatttgacactagaaatgtagaaaaattatctgaaatcgtagtgcttaaatttgaagcatacctttgggcaacttgcactgacgaccaatttttgtataaaaattttatcatacttttagaaaattcaaaattttagaaattcaacaaatgcagtcataggtttgagtctgcgctaagctagtggtgagttatgtgttagttggtgatcggtatttacgctaggtggcgcttggcaggactgtgtaagatgtaaaaaattacatatagcgcttatcaaacaaacggtagatgtcgcttcaaaattttcatgtgaacaaaatttttacattcttgtaatgagatttaaaattaattattttacttttattttttgctgataaaagaatgcattcttcaaatgtgagttgtgctcaacgccgccattatccaatcaatatgttccatcacgtttgtgaaaacactgggactgaggcactcagcgttgccatagctaacgattccgacctgaacgaagagcactcgaccgtcgagccgaatggcttggcccatgggtccgccggagtcgccgctgcacgacactccggactcgtgactcacgcagatctgatccctacgacggtcaacccagtatgttttgctgcacacaccccaattcactctggttacgcgaatggactttaggatgtggtttgcagcttccgatgggctgcggccccagccagtggctaccagcctgtggagtctttcaatcttcggctgaagggtcgtatttgtgatcaggcaaatgggcttaatgtgaactatgggaaggagaaacttttgcattgccatctatacatgtgtgccatctatgtatcttgaacctttatactccaccgacttggccagccggagaagtccaatgtcgtggatcctattggttctggaatagcccccatgcctgaaggccacatctatttcaaaatcctcggaaggtggcaggcaatcggagccgttgcagtcgatactagttaagctgttgaactcgcccagtcgcacagtcctatgaccagactccattttagccgagttagtagttagtagattcacacaatacctacaagttttcatcctctcgtatgcaatgtgctgctgtcaggatgaatccttacggaagaatgtgtcgtaagctagggattactttcgtgtggtgcttgcttacgatgatttacgagagttccgccacatacaagctcgccagatttgtgcaagtaagccatccaaggactctcggatatgtgcgcctggtgctcctcattttggagtgcctccggtgacatatatccacaatcgggttccagaaattgggcagttgcatggggatgccatggcaagagagacgtcaacagcaaaatccagtacattgcgtatgaagcgagcagaacaaactgatccatatatatcaatgtgttctgacttcatggcagactaaaccttatcattccttcatttgtatatatgcactatgtatgtacgaggtctcagagagatgcggtttattaaggttcataacatcacggatgtatgtatatgtatctcatacattcgttacattcttattaattttttttggtatgtaactcgatccagttcgcaaagtgaatgacgtttgtgtagacagtagggccaaagcagtgaaccgcaccatagctgaccaccccgaagagtatcactcttctttccgatccaatccgtaccctcgccgttaggggtccacccgaatcaccctggcaagtggaaccagtgctgctagctacgcagatgtggcttttgtccagttgtttgccaaagacttgggcacagtagctgaggtggtgatgcgtcaaggatgcttgctgcaggacggggctgtttatgcgggattcagtgcgtccccatccggtggtattgaacttgacaagatttttcagtatgttcgacgaccaggtgtagtctcccattagcaaacagatcgatcttatgttatctgcatgggcaaatctttggattaaatgcgtatgtagcgctcggaagacttacctccatactgtactgttgtctctagtctgagcagagctatgtcattcttacgaaagttagtgtaatgactgggcacataagttctggtcacattgatttccctgggccgtggaatgcagccataactggagcaatcgacggcctgattcacgtcgtaatcacccaaacgcactgtcctaagtcgaaagatgacaaattattcaattcgcatactccgaagacacttacaattgacttttggtttcacttttacagtgggcagccgtcagaacgtatccttaaaagcttgagaaggtttttcggggttcttgaaaaagaattttccaactaactacatacgtggcgtgatgagcgatcctccgcacttcatcatcccacgttcgatgattatcaccatccagggattggagaataagtccgctggcttgccattgatcacacgatatagacccggctcagatctggctgtaacgcactggggatctagtaaatgtggttggccctgtacctttaggaaaaccagggctattaaaaggaggagctgcacagctccagctcccattatattcatctgtaataatgttcgaactgactgagaactcaagtgcctacgccatttattaatgcatatcagagaaaagcttatcattatttcccagtcattcgtcgtatgtataggttccaggaattatgcgattgacttgagttctcgggacccgattgcattgaattggaacatttctacaaacttgaattgcattgaaaattattgcatatatttcaataacgaaatggacagtcctacaaatcctaactgggagtgaaattgtgcactatatctcgaatccagtttgagtaacgtaaaacattcgtgaatacggtaacttcacgacaatttggagccccatagctgattattccgaataaaacggtgcgtttcactcccgaaaatgtcagctctgcgctcaacggtccacccgaatctccggtgcacgtagaggattgcgaatggccagcacagatgtgtggccagcctattttccggtcgaagatttgggcacagaatttgcgatccagatggaacaaactagttgtctggagtattgtgctcgtcagttgagattccgttttgccccagccggtcacattaaacatggcaacatagttcagaaattgccgaagtttgtccttgttcgaagtctgcagcacacagatcggtcttgtttgaactggaaaagaggagttcttaactctttatagatacgcatgatttctatgcttaccattatatcttacgggcttggccagcagaaaaagggcaatatcataattatgataatccctgtaggatgagtgcaaaaatattcgcttcacgtcgatttctggaccaaatggagagcaatattgacttgaacagaggtatctgggcgtgatgccactatatcgaccaaaacgcactttcctttatgagtaaagatagaaataagtttgaactgcacaaatgttcgtagttacttacaaacgatatcggctgtggcaatgcgctgctgtcaaaacaaatactaaaaaaacactcagattaatttctatttatcctgctaaatttaaatacgtacgtgagcttatcagtgagccaccacagaagtgatagccacgttggagtatctgtaccatccatggatgcaactttatatcagcattatgacctcctaaaatttgttcgcggactccaactggtgtttgcacacaattcggatcaagcaagtcctggccaagcgattcatatgaacgaagcgcgagaataaagcaaaccagcagccatttcattttgaactcaatgaggctatgagccataatctgcacattgttttaatacatttgtagcgacagcactccttatcattgggtattatagcatagaatatagcattctctcttgtttttattgacacaaattttcaaaataatcatattgtattattcatatgtgatttaatgttttttcttataatcaaataatgtaccgcactaaaaaatgtcggcgttctttaatatttccttttattaaaaatcatacgctggattcattatgaaaccgttttatttggtttttcaaaacgcttaaattcattatctgactcgttttacataatttctgcgcggcgtacagtattaacgatccagtccaagtgggtcattacgtttgtaaagacagtggctttggagcagtccgcatgtccgaaactggtgaccccaaactggaacaccatttggacatggtcataggtcacgatggcggtcagcggaccaccggaatctccattacaagtgttggcattagcactttccgcgcagatatgattgcgattgatctgctgatgcggatactgcttcgcgcactcagatcgatgaaggttaaatagcgaggttttctggagcatccgactagatgatctcgattcggtttttccccagccgtaggttctaaacttgacaatgtgctcatcaatgtttttaacaagcgggtccaggagcaaacaaatcggacttatattatctggcagacaatgtgttatcaatcaatgatatatttttatggagtccagcgtgttacctgaatagtgcactcgcttggccagtctcaaaagagccaaatcgtgctggtcaaagtaataatctgtgtggacaaacatggcatcgacagcgaacttctgtgcttctgcttctcgctcgagtacgcccaggcggacttttctattgagatggatacaagttagatttaatccatggatattggagcacactcacagttccccgtttgctatgcaatgtgcagacgtcagtacgaaacctaaaaaaaaaaaaacaatagctagtattttgctccacctcaatgttgatagcttacgatttgtgattagtgtgcctccgcaatggaatcccccttcccccatgaccatggccatccatggagcgctggctactggggcgttgtgacctcctaaaattttgaattggctaatcggaacagtgccacacggatgctccagaaagctgccactttcagagcccagcacaactactgaactggcggccaaaagtacgaccactacaaagatcttagtgtttttcatatcccagctgtacaaacatactgatggttgaacaaagtttgccactgggaggtttcgttttttatgaattggcttatcgccggttggagagaagagagcataaaactaggtatcagaaacaagcataaatgaatcatttaatcagaaatcaactgaaataaaaccaaggcgtatattagttacttcttttatccaagacccaagaatctctaattcgcagtgcaaacatatcagccgatcttcatgcagagtcgcgtactaagagattggcggttcaaaatttgtgttttataatatgccatacgataaggcgcccaaaatgtaattaacacaatatatatttggcacgcggcacttccatgcttatcattaatttgtattgaatattaaatattatattatgtacaatctattacgaatttttattagtttctgtctaatatacatagcttagcatgcggtaagatgctttcccagaattataataaaggctagctgtattcggttgcgaggaatttcgctggagatcgaaagaggggaattgtggtcccaccacaatctccaagaattcccactatttctcttcgtatgtgttgatgctgtgttgaagccagcgattcttcggagattcgtttgcccacgaagagaggttagatcggttggtgtgtgggtttggcttgccagcatctcgtactccgatctctctatctctctctgtaccgatttctcgctggccaggttgaagctttggtaagtggtgccagaaccggttccagttcgaaaatccaactgcacacattcagaaaaacagagaaaccgagaggaggagggatattagctacaaaaacaacggctgaactaatcattttcatttgaaataagcaaatgagccgcaataaatgaatagcattggaatttgaatattcgtattggaatgctcgaacttcgaacccagacgaaagacacgattacgatattaattttcatctaattatgagtg

SEQ ID NO: 22007 - DNA, 2130 bp, DROSOPHILA
atgaaaaacactaagatctttgtagtggtcgtacttttggccgccagttcagtagttgtgctgggctctgaaagtggcagctttctggagcatccgtgtggcactgttccgattagccaattcaaaattttaggaggtcacaacgccccagtagccagcgctccatggatggccatggtcatgggggaagggggattccattgcggaggcacactaatcacaaatcgtaagctatcaacattgagaaaagtccgcctgggcgtactcgagcgagaagcagaagcacagaagttcgctgtcgatgccatgtttgtccacacagattattactttgaccagcacgatttggctcttttgagactggccaagcgagtgcactattcagataatataagtccgatttgtttgctcctggacccgcttgttaaaaacattgatgagcacattgtcaagtttagaacctacggctggggaaaaaccgaatcgagatcatctagtcggatgctccagaaaacctcgctatttaaccttcatcgatctgagtgcgcgaagcagtatccgcatcagcagatcaatcgcaatcatatctgcgcggaaagtgctaatgccaacacttgtaatggagattccggtggtccgctgaccgccatcgtgacctatgaccatgtccaaatggtgttccagtttggggtcaccagtttcggacatgcggactgctccaaagccactgtctttacaaacgtaatgacccacttggactggatcgttaatactacttcgaacaaggacaaacttcggcaatttctgaactatgttgccatgtttaatgtgaccggctggggcaaaacggaatctcaactgacgagcacaatactccagacaactagtttgttccatctggatcgcaaattctgtgcccaaatcttcgaccggaaaataggctggccacacatctgtgctggccattcgcaatcctctacgtgcaccggagattcgggtggaccgttgagcgcagagctgacattttcgggagtgaaacgcaccgttttattcggaataatcagctatggggctccaaattgtcgtgaagttaccgtattcacgaatgttttacgttactcaaactggattcgagatatagtgcacaatttcactcccaataacataagatcgatctgtttgctaatgggagactacacctggtcgtcgaacatactgaaaaatcttgtcaagttcaataccaccggatggggacgcactgaatcccgcataaacagccccgtcctgcagcaagcatccttgacgcatcaccacctcagctactgtgcccaagtctttggcaaacaactggacaaaagccacatctgcgtagctagcagcactggttccacttgccagggtgattcgggtggacccctaacggcgagggtacggattggatcggaaagaagagtgatactcttcggggtggtcagctatggtgcggttcactgctttggccctactgtctacacaaacgtcattcactttgcgaactggatcgagactgtgcgactgggcgagttcaacagcttaactagtatcgactgcaacggctccgattgcctgccaccttccgaggattttgaaatagatgtggccttcaggcatgggggctattccagaaccaataggatccacgacattggacttctccggctggccaagtcggtggagtataaagttcacattaagcccatttgcctgatcacaaatacgacccttcagccgaagattgaaagactccacaggctggtagccactggctggggccgcagcccatcggaagctgcaaaccacatcctaaagtccattcgcgtaaccagagtgaattggggtgtgtgcagcaaaacatactgggttgaccgtcgtagggatcagatctgcgtgagtcacgagtccggagtgtcgtgcagcggcgactccggcggacccatgggccaagccattcggctcgacggtcgagtgctcttcgttcaggtcggaatcgttagctatggcaacgctgagtgcctcagtcccagtgttttcacaaacgtgatggaacatattgattggataatggcggcgttgagcacaactcacatttga

SEQ ID NO: 22008 - protein, 709 aa, DROSOPHILA
MKNTKIFVVVVLLAASSVVVLGSESGSFLEHPCGTVPISQFKILGGHNAPVASAPWMAMVMGEGGFHCGGTLITNRKLSTLRKVRLGVLEREAEAQKFAVDAMFVHTDYYFDQHDLALLRLAKRVHYSDNISPICLLLDPLVKNIDEHIVKFRTYGWGKTESRSSSRMLQKTSLFNLHRSECAKQYPHQQINRNHICAESANANTCNGDSGGPLTAIVTYDHVQMVFQFGVTSFGHADCSKATVFTNVMTHLDWIVNTTSNKDKLRQFLNYVAMFNVTGWGKTESQLTSTILQTTSLFHLDRKFCAQIFDRKIGWPHICAGHSQSSTCTGDSGGPLSAELTFSGVKRTVLFGIISYGAPNCREVTVFTNVLRYSNWIRDIVHNFTPNNIRSICLLMGDYTWSSNILKNLVKFNTTGWGRTESRINSPVLQQASLTHHHLSYCAQVFGKQLDKSHICVASSTGSTCQGDSGGPLTARVRIGSERRVILFGVVSYGAVHCFGPTVYTNVIHFANWIETVRLGEFNSLTSIDCNGSDCLPPSEDFEIDVAFRHGGYSRTNRIHDIGLLRLAKSVEYKVHIKPICLITNTTLQPKIERLHRLVATGWGRSPSEAANHILKSIRVTRVNWGVCSKTYWVDRRRDQICVSHESGVSCSGDSGGPMGQAIRLDGRVLFVQVGIVSYGNAECLSPSVFTNVMEHIDWIMAALSTTHI

SEQ ID NO: 22009 - DNA, 4384 bp, DROSOPHILA
accattaaattaaactcattaaaatcgccatgaataactccagaatttcccagacgcacaataaggttcataagatcatcgtaaacttgtggagcgtctagaagttcgtgaacttgggtcctataaaaatgatattcaaaaatacgaataatgataaaagtgactagcttacatgggccagcccttgacgaggtccattaagacgcagtggcggttgaaatcgatgggttttggcactggaaacccacgatcatagagtgccgacatgtaggcaaactcgcgggtagccgagatgcgagataagtacaaccaggaggccttgtgtcggcgaccgtggtagtctcttttggcttttacattcctgaaacaagttcgacccaatcggtgtagtttgaggcaaattggagtgccctcctcatcagccaccacgtagatgttggactccttgccaattccaatctggttgccaaaggaactgaccgatccccgcagtgtgagagacttcagagccagatagtcgtagcccgtgtttgtcaagcggtagccatcatctgtgagccaataattgttaatgaccataaaaacttcaatctgcagccatacatacatttctttccccgttcgtaggccaatagcttgtgcttgcacagctccttgagcagcttgtggactccacccgacttcagattcgcaatggcagcagccaggggaccagggaccagctcgtggttcttcatgcccatctcgatggcggtgaggacgcggaagtcctctttggtgagatatcgcagcactgtcacgtttaatttacccattttcgttctattttgacagtttaacaacgcatttagcaatgttttcgtttcacacgtgcaggcacgataggtggtgagaaatcggtatgcatcgattgtagcaagagtatcgcttataattatatcattttccaactaccgaacattgtaatgcaactggtgttttacatcccggtccggaacggtcacactgacctgcacatcgtcatcaggaagagacaaaatcggggaaatggctggagatgatctgattgcgaaattccaggcgctcggcatgagcgagcaaaaggcgaaggaaactttgaagaatgccaacgtgacaaagaatctccagctgtcgctggcggcggcgggaagcgccaccctatccgacggcactggtatgctgatctaccacatggctaccaagctgaagccgcagactgcggaccatctgcctcttctggtgcgctacatagtggagcacaagctggacaacactcagcgcgttgatgccgccctggagtacctgctcaagtgcggtcagagcctgaatgccaacatagatctgcaggcgcttgagaaggagtgcggcgttggagtggtggtcactccggagcagatcgagcgcactgtgcaggccaagatcaaggccagctacaaggaggccttgttggagcaacgctaccattttaactcttttaaaatcctgcaagatgtccggggagaactcaagtgggcggatgccaagtccgtgaaggcggccatcgatgtggagatcttcgatctgttgggtcccaaaacagaagcagacttgaaacctcagacaaaagcaaacgataagccgaaggctgcaaaaccgaaagctgaagtaactcctgccgctcaaacggctgaagctgcatccgatggagccaccaccatttcggaactcatgaaaaccaaggtacacttccatgctcccggagagaacttcaaggcagatggctacgtggtcaccgagcacacggagcggctactaaaggagcacctggcgagaactggaggcaaagtgcacacacgatttccgccagagccgaatggcatcctgcacatcggtcacgcaaaggctattaacattaactttggatacgcggctgcccacgatggagtctgttacttgcgctacgacgacaccaatcccgagaaggaggaggagaagttctttttggccatcaaggagatggtggaatggctgggctacaaaccattcaagatcacctactcctcggacaacttccagcagctgtacgagtgggctgttgtgctgattaacaaaggattggcctacgtgtgtcaccagaaggcggaggaactgaaaggcttcaatccgaagcccagcccttggagggagcgtcccattgaggagtcacttcggctgtttgaagacatgaagcgtggaaagatcgacgagggagcggccacactgcgcatgaaggtcaccctggaggagggcaagatggacccggtggcgtatcgcattaagtttatctcacaccaccgtacgggctctgactggtgcatttaccccacgtatgattatactcattgcctttgtgactctctcgaggatataacccactcactgtgcaccaaggagttccagtcgagacgatcctcctactactggctgtgcaacgctttgggtatctactgcccggtgcagtgggaatacggtaggctgaacatgaactacgcacttgtgtcaaagcgcaagattgcaaagctgatcacggagcagattgtccacgactgggacgatcccaggctgtttactctgacggctctgagacgtagaggcttcccagcagaggccatcaacaacttctgcgcccagatgggcgtaacgggtgcccagatcgccgtcgaccccgccatgttggaggcagcagtgcgggatgtgctaaatgttacagctccccgtcggttggttgtcctggaaccgctcaaagttaccataaagaatttccctcatgcagcgcccgtgcagctagaagtgcctgatttcccgcaaaacccacagcaaggaactcataagatcaccctagacaaggtgatctatattgagcagggagacttcaagttggagcctgaaaagggataccgtcgtctggcaccgaagcaatctgtgggtctccggcacgcgggtctcgtaatcagcgtggatgagatagtaaaggatccggcgactggtcaggtggtggaactaatctgcaccagccaacctgccgagcaggccgagaagcccaaggcttttgtccagtgggtatcgcagccgatacagctggaagtgcgtctgtacgagcagctcttcaagcacaagaatcccgaggatcccaacgaggtgcccggcggtttcctgagcgacatcagtgagcaatccatgtcggtggtggtggcattcgcggatcgggccctaaaccaggccaaggtttacgacaagttccagttcgagaggattggcttcttctccgtagatcctgacaccagtgcgaaccacctagtgttcaaccgcactgtgggattgaaggaagatgcgggcaagaagtgaacgggatttcgggaacccacaaatgaaaagaaacaaaatccgtatcacattaaaattcgatttataaaatcaatgttcatttctttccctccaccatgatgatgtggtagccaaacttggtcttaatcgggggatctgtgtacacgggattgttgacagtggagatgggcaatgcgaaggcggcgtcctgaaatgggcccaccatcgctcctcggatctgccatccgagatcgccgccttgtcgcgccttgtcctcgctgtaagcagccgctacctcggggaatttttggcctgcctttagcttctccatcgcttcggtgatcttgccctgcttctcgcacaagatgtgacgaacctttacagcattgcctcccttcttctccttaccggcagctgcagatggcaaaattcatttgaaggataggatttttgctttagtcgtaagcacttacacttgtcttcggcggctggctttttgccacctttccctgcatcctttccactcttcgcatcctttttcggtggcattttcgttcaatgtttttaaattgcaaattcgaaacaagtaaacagtttggttggagcagacacatgcggtcagtgctgcgcactaagatctaaccttttttatcaaaccactttatttcaagatctagtaaatatttatgttgttgattcatatgggtagccattgcacatttaatttattatgaataaaattaaacaaaaagttttgaagaacaaaatatttgcttggccgcttatagccacatttgcatctctgatgtgcgtcgaaagctttcgatagaaatccggtttgcgtcaacggtcacacttagatgcactttctaatcagacgtttaactttgggtgcagataagccagcgtaagagattagagaatccgggaattatcgcaccctcttgaaattgtcatcatggaactgagctgggagatagtgttctgcgtgggcattgcggtgctggttcatgttctggtc

SEQ ID NO: 22010 - DNA, 2327 bp, DROSOPHILA
tcacactgacctgcacatcgtcatcaggaagagacaaaatcggggaaatggctggagatgatctgattgcgaaattccaggcgctcggcatgagcgagcaaaaggcgaaggaaactttgaagaatgccaacgtgacaaagaatctccagctgtcgctggcggcggcgggaagcgccaccctatccgacggcactggtatgctgatctaccacatggctaccaagctgaagccgcagactgcggaccatctgcctcttctggtgcgctacatagtggagcacaagctggacaacactcagcgcgttgatgccgccctggagtacctgctcaagtgcggtcagagcctgaatgccaacatagatctgcaggcgcttgagaaggagtgcggcgttggagtggtggtcactccggagcagatcgagcgcactgtgcaggccaagatcaaggccagctacaaggaggccttgttggagcaacgctaccattttaactcttttaaaatcctgcaagatgtccggggagaactcaagtgggcggatgccaagtccgtgaaggcggccatcgatgtggagatcttcgatctgttgggtcccaaaacagaagcagacttgaaacctcagacaaaagcaaacgataagccgaaggctgcaaaaccgaaagctgaagtaactcctgccgctcaaacggctgaagctgcatccgatggagccaccaccatttcggaactcatgaaaaccaagcacacggagcggctactaaaggagcacctggcgagaactggaggcaaagtgcacacacgatttccgccagagccgaatggcatcctgcacatcggtcacgcaaaggctattaacattaactttggatacgcggctgcccacgatggagtctgttacttgcgctacgacgacaccaatcccgagaaggaggaggagaagttctttttggccatcaaggagatggtggaatggctgggctacaaaccattcaagatcacctactcctcggacaacttccagcagctgtacgagtgggctgttgtgctgattaacaaaggattggcctacgtgtgtcaccagaaggcggaggaactgaaaggcttcaatccgaagcccagcccttggagggagcgtcccattgaggagtcacttcggctgtttgaagacatgaagcgtggaaagatcgacgagggagcggccacactgcgcatgaaggtcaccctggaggagggcaagatggacccggtggcgtatcgcattaagtttatctcacaccaccgtacgggctctgactggtgcatttaccccacgtatgattatactcattgcctttgtgactctctcgaggatataacccactcactgtgcaccaaggagttccagtcgagacgatcctcctactactggctgtgcaacgctttgggtatctactgcccggtgcagtgggaatacggtaggctgaacatgaactacgcacttgtgtcaaagcgcaagattgcaaagctgatcacggagcagattgtccacgactgggacgatcccaggctgtttactctgacggctctgagacgtagaggcttcccagcagaggccatcaacaacttctgcgcccagatgggcgtaacgggtgcccagatcgccgtcgaccccgccatgttggaggcagcagtgcgggatgtgctaaatgttacagctccccgtcggttggttgtcctggaaccgctcaaagttaccataaagaatttccctcatgcagcgcccgtgcagctagaagtgcctgatttcccgcaaaacccacagcaaggaactcataagatcaccctagacaaggtgatctatattgagcagggagacttcaagttggagcctgaaaagggataccgtcgtctggcaccgaagcaatctgtgggtctccggcacgcgggtctcgtaatcagcgtggatgagatagtaaaggatccggcgactggtcaggtggtggaactaatctgcaccagccaacctgccgagcaggccgagaagcccaaggcttttgtccagtgggtatcgcagccgatacagctggaagtgcgtctgtacgagcagctcttcaagcacaagaatcccgaggatcccaacgaggtgcccggcggtttcctgagcgacatcagtgagcaatccatgtcggtggtggtggcattcgcggatcgggccctaaaccaggccaaggtttacgacaagttccagttcgagaggattggcttcttctccgtagatcctgacaccagtgcgaaccacctagtgttcaaccgcactgtgggattgaaggaagatgcgggcaagaagtga

SEQ ID NO: 22011 - protein, 759 aa, DROSOPHILA
MAGDDLIAKFQALGMSEQKAKETLKNANVTKNLQLSLAAAGSATLSDGTGMLIYHMATKLKPQTADHLPLLVRYIVEHKLDNTQRVDAALEYLLKCGQSLNANIDLQALEKECGVGVVVTPEQIERTVQAKIKASYKEALLEQRYHFNSFKILQDVRGELKWADAKSVKAAIDVEIFDLLGPKTEADLKPQTKANDKPKAAKPKAEVTPAAQTAEAASDGATTISELMKTKHTERLLKEHLARTGGKVHTRFPPEPNGILHIGHAKAININFGYAAAHDGVCYLRYDDTNPEKEEEKFFLAIKEMVEWLGYKPFKITYSSDNFQQLYEWAVVLINKGLAYVCHQKAEELKGFNPKPSPWRERPIEESLRLFEDMKRGKIDEGAATLRMKVTLEEGKMDPVAYRIKFISHHRTGSDWCIYPTYDYTHCLCDSLEDITHSLCTKEFQSRRSSYYWLCNALGIYCPVQWEYGRLNMNYALVSKRKIAKLITEQIVHDWDDPRLFTLTALRRRGFPAEAINNFCAQMGVTGAQIAVDPAMLEAAVRDVLNVTAPRRLVVLEPLKVTIKNFPHAAPVQLEVPDFPQNPQQGTHKITLDKVIYIEQGDFKLEPEKGYRRLAPKQSVGLRHAGLVISVDEIVKDPATGQVVELICTSQPAEQAEKPKAFVQWVSQPIQLEVRLYEQLFKHKNPEDPNEVPGGFLSDISEQSMSVVVAFADRALNQAKVYDKFQFERIGFFSVDPDTSANHLVFNRTVGLKEDAGKK

SEQ ID NO: 22012 - DNA, 2901 bp, DROSOPHILA
attttccttaaagtggaatgcaaatagtcgggcaagtatgcaaatatttggactggctaccgtacaggctaatcctttgctgatcctgtggctactgtgctactttccattcaagcgatcaatcatggaaaaggcacttgtgctgaccaacacaagcaactagcatgacaactcattttattagaacagtctctccggtggacaaacatccaaggaggttgtgtgaaatggttccctgttcctggtaaacgcgtggaaaacgtgttttggaaaatactcattgttggctcagcgtgatgcgaggaactcgttttatcagccaagaaattataaatatttatgaaaaaccttttgagcgaacgcggacccaaggaaagataaacaaacagaggcacggagtcaagaagttgtcaaacgcaaagtatcttaggtcaggaaagcagatcagtcagagatgtatctcctggtgtctatttgtacatgctatctggctatctggcgcagaactaccccaagaacggaggaaacctcagtcactttgttggatacatattcggcgcattagatgactttagatgactggggagtccccatctccccgaacaaactcaaataataataaaaaacgcatttatgactcgacttcatcgggtgagaaacgccataaagcagcgaggcaatcggcgtcggcgatcgtttaacgtaggaaaatacagaaaaccgaaatcctttcgaaaatcatccacaaaacaggttggaaaagggagtccgatatagtaagatggccataaaatgcaggtagaccgctcggtcatttgggggttttcaatcacaagacgaatttattaacaggggggaaaaaaggaacagtgacccttctcagattttgatcatgggcaaagatgcaacagaatgaaaaaaataaaaaaaaaaagaaatgaaccaagatgaaaactcaaatcaaaacggtgtacagttgtgcatggggtgtggtgtgcgttcaactgatggatccattcttctccccatcgtcttcgtctttgaggtggcccactacagacgcctgtttggggttcatttgccagagaatgatactgccatcttgggatccaatggcacacacctcgccatccgggctgaagctcagtgctagcactgcggatggttcctgagatacataaagacccctatcaacatctgtgtcgtagtcgtatttgaaggagtagcccatgttgttgccgcacacgtagattcccttgttgggactcagcgatgccgcagtcaccttgtagggcagcttgcgatgcttgagcacttcgaagctcttggggtccaggaagatcactccgccggcataggctatggtcactatatcgccgctgtggtgcagctccaacgacttgacgtggtgcggcaggaaaatagagttagttctcgtgccggtccggcagtcccacatcctcacagtgcgatcatatgaagaggagaggaagcagtgttcctccaagcagaagattacatccctcacaccgcggctgtggccacggaactccatcaggggagctttctccgattgttccatgtcgaagagggcgagtggagattcctgatcgatgcagccggtcaacaggcgagtggccttcggattcaagtccacacacgccactgttttggtatgtctaagcttcttcagctgtttccccaacagggcatcccagactcgcactttgcagtctgcaccgccactggccaggatcttggcatcgtggcttaaggataccgaccacacactgtccgtgtgctttcttaggtgcgtaatacagtcgccagtgtcgccgtgtcgcagtgctgcaacgccatccagtccggctgaggccaaaaagtatccagtatcgtagtccctgttaaaagataactccaccactgagtccgagtgtcccggacacaggactccgatttcatgcctcattttatgtatttgattttaaattacttgctatacaaatgaacgacacaaaatcatggactactagatcgtacacattaataattcacatctttttcaagttaaggaaaaatcgaaaattatcaacaccagtacgtttacctatgcaaacttcctttaaaatccgataattctgccatcttggcgagtatccagggcacataggtgggtacatccatgtagtaggccttctgaccagcaccgcagttttggcttccagtgctgaccacaccaaattgtacggttcgagccttgccaaacaacgtggtcttccatatgagcggtccaccggagtccccagtgcacgtgtccacataatctccattggcgcaaaggaaggaagtatccctgccgtcggtgcacttctcagtgtttatatggacctccattgtactgttggcgaagcgccgactttccgttctcccccagcccacagccatgtaggattgtcccagctgcaaggtaaacgccaagagttcatccgtcaggggtagacatatgggtcgtatgtgatctaaagaagcatattatcaaaggaatatatttcatacttttcatacttatttgcatgtaaggctattcttacctttaaagaccactttcttgtttagttttatcagagcaatatcatacccgggatagaagaggttaaactcctcgtgaagaatccacttgtcgatggtaaactcctccacgggcagtgcgcaaacccgttgataattgtaggtgacgcagtcacttgtggaactaatgtcgagctctcccagccacactcttatcctgtttatgacccaggctcagaaaaataaaaagtcaagaaagaataatacaagtcatacttactccttagatcggggacacattttgaagcagtgcgcggcagtcaaaacaaagac

SEQ ID NO: 22013 - DNA, 901 bp, DROSOPHILA
ggactacgatactggatactttttggcctcagccggactggatggcgttgcagcactgcgacacggcgacactggcgactgtattacgcacctaagaaagcacacggacagtgtgtggtcggtatccttaagccacgatgccaagatcctggccagtggcggtgcagactgcaaagtgcgagtctgggatgccctgttggggaaacagctgaagaagcttagacataccaaaacagtggcgtgtgtggacttgaatccgaaggccactcgcctgttgaccggctgcatcgatcaggaatctccactcgccctcttcgacatggaacaatcggagaaagctcccctgatggagttccgtggccacagccgcggtgtgagggatgtaatcttctgcttggaggaacactgcttcctctcctcttcatatgatcgcactgtgaggatgtgggactgccggaccggcacgagaactaactctattttcctgccgcaccacgtcaagtcgttggagctgcaccacagcggcgatatagtgaccatagcctatgccggcggagtgatcttcctggaccccaagagcttcgaagtgctcaagcatcgcaagctgccctacaaggtgactgcggcatcgctgagtcccaacaagggaatctacgtgtgcggcaacaacatgggctactccttcaaatacgactacgacacagatgttgataggggtctttatgtatctcaggaaccatccgcagtgctagcactgagcttcagcccggatggcgaggtgtgtgccattggatcccaagatggcagtatcattctctggcaaatgaaccccaaacaggcgtctgtagtgggccacctcaaagacgaagacgatggggagaagaatggatccatcagttga

SEQ ID NO: 22014 - protein, 193 aa, DROSOPHILA
MEQSEKAPLMEFRGHSRGVRDVIFCLEEHCFLSSSYDRTVRMWDCRTGTRTNSIFLPHHVKSLELHHSGDIVTIAYAGGVIFLDPKSFEVLKHRKLPYKVTAASLSPNKGIYVCGNNMGYSFKYDYDTDVDRGLYVSQEPSAVLALSFSPDGEVCAIGSQDGSIILWQMNPKQASVVGHLKDEDDGEKNGSIS

SEQ ID NO: 22015 - DNA, 2549 bp, DROSOPHILA
aacgaaaatccaaaaatacaccacgcccgcattaaaacatgcgattactctgaggaaagcagaaacaacacaatcactgagaatggttggaattttccaaaaattatctccaagaatcaaatttcagcatttcttttgtaagtagatgtgcttgatttgtaatcgcttttccatttataatattcaaatcgatgaataacgaatactgcaattaactatatacgactgccatagcatgtaaaactttaaggcacaacttaaacgcatttacatttcaaattaactgacataaaattaaaaccccgatgattaatgccagataaatcgaatgtttctgcttttcctacccaaacccaccaccacattgaaaacactctctttacaacataatacttgcattgctgagccttagacaaacaaacaaacaaaaaaaaaaaacggcaaaatataaagtataattaaactgattatttgcgcaacgacagaagcttatttctagcaacttttttgcgtcattaaggcgaaaaagtctgtataattttgtccttagattaacattagaaatatgtcaatattctcactctgtgcaaataataaaaaaacttttgaaaaaagcaaacgagaagccgaaagtttattcataaaatttgtttagagtgtaagaaaatgcatataaatatatatttaaattcgtattatacacaagaaaaaacacgacacacacgaagaagtaaacacgtaataaataaaaacttgaaaattgtacaaaattcaaaagtatttgaaaagaggttttttttatttgtatttattttttgagtagtcattccaaaaaatgtaacaatggttttgcattaaatgtttataatgtttgagaatttagcatatgatttaaatcgaatttgaatagtatccggttttcataaacgagggcccactgttatttatgtttgtttttcaccgaagtggcatctctgatcagctgcatatattatcgtttctttgttgtgtttatatgttgtgactcagtgcgaaaccgtgataaaacctgagaattgaaacgaaatttagtcggtcaccaaaattacaagtgtcaagatgtccctggtttcagatgaggagtgggtggagtacaaggtaggcccaatatgtcctagcaagcgacgcaatatttagaaatcacttgattccaccatagtccaagttcgacaagaactacgaggcagaggaggatctgatgcgtcgtagaatctacgccgagtccaaagcccggattgaggaacacaatcggaagttcgagaagggcgaagtgacttggaaaatgggaattaatcatttggctgatctcacgcctgaggaatttgcccagcgttgtggcaaaaaggtgccgccaaattaacagaatctcaagtgaatctcattttaaatagacattttgtaaagacactaatctctctgtaattctataaatatgcatttgaatttttaaatctttatcgttcaaccacccccaaataaacaataaatcagctgttttgtacattttaaagattttgggatttttgtgttctggccactttggctgggagaaaaacagttcattaggttttggttcaatgaacgaaggtttatttatctctacgatatatgcaaataaatacgtacggctgagatggtaaaattccattccaaaaatatgtatgcttgtacgcggtatctatatacattttgaacttaaagcggattaacgcctttctgcgatgaactagttccggttcagcgttcattgagcgagtcagtgaaccgaactgcagtgccgacgagcggcagttcacacacaacatttgaaagtttgtaaacttttcctttttcgatcacatagacacatcgatacacgtagttatttgtttttattttgtaccaacaccaaacaccccatcttacaagcgcgtaaaacctcgttttcggtccaatctcttgcagaatcttgcagtagaacctcacagcccagccaaacatgtccggaatcatgcgtgtgccatcgattttggccaaaaatgcagtcgcctccatggtaagtagtccccattttggaagtgaaaacccaggctcctctgtggcaaacgaaatgatttaagagtggttatacaaccgggtctacacagaacccagccagccagctcgtgatgtgacaacagaaaaagaccaacgaattggccaaaaacgcgccacccgtacttgtgttatgtaatttgtgagcaaattgtgggacacaggtgcattaaattattccctttgctagattatattaattttcatatagcgaatatcattccaagcaagtgttcagcaattttgcggattttatagtggaaagctaggtgtgcaccagcgaggttatgttatgctgccgccccgcccccttcatccatgctctcctgcatcgacgatatcgtgcatttgggcatttcgtgcaacaaaatgcagttgaaacacttggttttggatgcacgacacgccttgaaaagctttataagtaccgcttaatc

SEQ ID NO: 22016 - DNA, 488 bp, DROSOPHILA
ctttgttgtgtttatatgttgtgactcagtgcgaaaccgtgataaaacctgagaattgaaacgaaatttagtcggtcaccaaaattacaagtgtcaagatgtccctggtttcagatgaggagtgggtggagtacaagtccaagttcgacaagaactacgaggcagaggaggatctgatgcgtcgtagaatctacgccgagtccaaagcccggattgaggaacacaatcggaagttcgagaagggcgaagtgacttggaaaatgggaattaatcatttggctgatctcacgcctgaggaatttgcccagcgttgtggcaaaaaggtgccgccaaattaacagaatctcaagtgaatctcattttaaatagacattttgtaaagacactaatctctctgtaattctataaatatgcatttgaatttttaaatctttatcgttcaaccacccccaaataaacaataaatcagctgttttgtacattttaaa

SEQ ID NO: 22017 - protein, 79 aa, DROSOPHILA
MSLVSDEEWVEYKSKFDKNYEAEEDLMRRRIYAESKARIEEHNRKFEKGEVTWKMGINHLADLTPEEFAQRCGKKVPPN

SEQ ID NO: 22018 - DNA, 4968 bp, DROSOPHILA
gccgagtggcgaatttatactccttcggccatgtaatgcaatgcgtgtaagtggcaattaagggagcaaaagaaaccgagacccaaaaaaaaagtgagagtgggagtgggagaaaccagtttgtcgttttgtttcctttgacccacactggttacctaaccagttgctggatgcttcggctcggctttgcctgttttgcgattgattgattgcccagcgacaagatacacagatttcatttgtcttcgacaaattaactacaatgtgcgccctgcccaggccatgagttgcgttagttggtcttagaaatagtcaataaactgtgaaattgggtcacatcgaaattgggctcaagtgcaggcgaaatgaaatgctcggcctaataaaaagcttttgccatttccaatttcaatgtccctcggacacagtttttcaaaagttttaaaaagtggcttgctttttatagtatttctctacgtttttacagaagaagtttgacattttttgtgctagatcacaaaaattaagacttatggagaacacatttttcgaacttgcaaaaaactagaattctgatagaattttacacaaatattcctgacatttgagctttttaaatgaaattttatagtcaacaagttttaaaaagaataaaaaaatctatatatgtaaataacatttggaactttatatatggctgaagtgttagaaatatgtggacaattatcgcctgaagcgaatttagagggttaaggcaacaccatttgaactttttggagcgtcttcgccgcaaatcgtttgctttcaatttcatttcgacttgatttgccagctttttggctaccgctcgagtcatttggaaattcgcatcttattacacactccgttaattagccggagtttgtattgggcttagtatggattgcagggggatatattgaacggcctttgcgcaatctgaattagtcgcataagcggatcgccaaaggacagttgacaaatggccggcttaacactgcttttcggcctaatcctggtcagcttctgcgcgtgttcctcaaatgccaccgatactgcccagatactgagatacgacaatgaaaacatggatagcgatggctatgccttctcgtaagtaggtggttcagggtcaataccaagtttggaataagttgcttacacacgtctccccgtagattcgagacaagcgatggtatctcgcgtgaggagagggccactctgaaaaatcctggcactcccgaggaggcaatcgccatccagggcagcgtccattgggtgggacctgatggtattcactataagctgaactatctggccgatgagaacggttttcaggctcagggcgaacatcttccccaggtagagcactcatcacgtgataggtttggactttgttgataagaaaaagaataagcacacgcaaaaccaccgaatagctaaagtaggcgggtagacaatagaaatgaaatacataataataaaatacagacacaggtgtatatatatctatatggctgggcataaattttcacccatcgaaattgaattgtattctaggcaggaaattagcatatatacatttgtatcttccaaaacccgtttgctcttcgcgcctgaattgtgtgcggtaatcgactagctgcactctccgatcccccgatctctgatcttcaatctgcgggagctgaccaaaccggttcaataaacgccaaaaagcacccaacaaaggttgccaaaaagcgaaacacaattaatgaagccacaatgctgccaacgaaagtgagaattccgggtaaaaaagggcattttaaggcaattaacctaagctcctctcatttatcaatcgtaaatgcaaaataatcggtcctttcccagcctagacatattattttacacggccgaaaaaatcgtaaatgcaaaataatcggtcctctcccagcctagacatattattttacacggccgcaaaaatagtacacatatatttttgggcgaatttataagctctgttaaaaaaagtatcttaaaaaatgtggtattgcaatatttgcaatatgaaatacataaaaattatgtttatatttttgtatgactttaagtatgtatttacatatattaaaggaacaaggtctcttaaaaagtttagtctaaacaaattataaagtgattctgtatgcaattatgccattagactacttcttgctgtgtaccagtcacagatttctgaatgatttataatgcccgaaaatgaccagcagtgacattacgcatacgccccgatgtattgtggtattgtagggcatacatagcccagccttagtcggctgagcttggtattggcttttgttgtctggttagctggtattttattgactaaggtcatcaaccaacactcgggctgctgactatggagatggaaacgacgatgatgagccgcgtaatcttgaatctctcgtgccgcatcttcacttaaacagcaaatgcagctgacaagcaatggcggtggaggttttcgtttcttttcgattcgattcgtttcaagatttttggaggttaaatcgccctgtcttaatcggaaattgtgtcagcagttaacagacgtcagggcggaaatgcttcaatattccccaaaaaaaatttgcagctttgcagtcggataattcaagaattacatttatgaggaaatatcagctgaaaaagcggagattaagtgtttatatgatggcaattaaatctcaagatcatgggaattcctagattccatgaattgaattcttcttcccgttctttgcttagtttcctaaacatattttaagtggttgagttttattcacttcctcactgctcacttctcttggggatttaatttccaacccattttgctttgtttcatcttcgataatctttttcatcacaatttgttgataagtgcaaacatagccattgacctattgccatagatccaaatgtatatatgcctgcttgtctacttgtaggcaaacacgcgcattgaccaaatatttgttttttgttggggggcccaaacatttcattatcacttgctccatcatcttcagctccgatttaactttcagctcccgtggcgtggcaattgagatgagattcgagcgcacatcaaacgcttaatggtctttaaattatttttttggcttgttcaattaaaagcttaagctactcacgctgccatacagttgccttcaattatatgcgtatgggtagataattgtgttagcatttgaggtgtttgttatgggccacctaaactttacggatcacataagtgtgtgtaaatgagtgtgtgtgttggactcgcagcacttggagttttggcccggccagttataaatagctcaacactcattacagttagccacattactcgttagtgcctaattgtgataactaccggagcgtgcactaaaaaccaaacttagccaggaccttttgaaaagtctctaccagaatccaatccaactaaacatgcagtcctccagcatctgtgtcctggccatttgcgccttcgctctgctctccaccattagggctgctcctctggacgactcccaacatgccaccatactaagatacgacaacgacaacattggcactgatggctacaacttcgggtgagtagcaaggacaatgcacgggatatttccaaggattgaaacttttgtgtactctcgcctttcgaaaagaagaacccattcaaaagagttaactatcttgatttcagctacgagaccagtgatggagttacccgccaggagcaggctgaggtgaagaacgccggtaccgaccaggaggcgctcagtgtgcgcggttccgtcagctgggttgctcccgatggccagacctacaccctgcactacattgcggatgagaacggtttccagccccagggcgatcatctgccccacaactaagtatttcctctttgtgtagtcagtatcgaaagcagtatttctttatattgtaaaaatatcagggttctaaagtattttaatgtttgctccaatgatcatatttcattataataacatagtcgatatcaatacataaatagctgaatcgtattgtttgattattaaattatcacaatcaaatgccagtcttcagctagtctgtttggattttttgcgatcataaagtgaaatgagttagatcgtccgttcaacccggatcaaaagacgttccctatgctaaatttaatatttatggtagggctatatcaatgaaaagaaaagtatgacgcaagagatggaagaacagggtgcctgttctcttcacattttccatacgcaacgttgaacgtcgaaatgcggtgtgtgtctcgtcttggctcgtctcgtctggcgactttgcctggacggccttcggttggcagaaacttgcaaatttttggcacagccaaacatgtttgggtttttgttgtctttgtaattaatacataattaaagtggcgcatattgaaaaatgtgcgagggatctggccacaaatgaaaacgaagttttgaaggttaatttcaggcgttgatttaaatttcatgcgatgctaatgaaatttggaagataccttccaaaaacaacatacagcgcacagagagccaaacggccaaattaatatgcatgaaataaaaagctacaatgatcaaactagttttggaatgaaacgattggacgcattgatcgatctttaagctaacagagcgctgacgtagtttccatgcccaattttaagttgaacacacttgatttacatacttattgtcgttgatgtacagaactattggctggtatgctcaatgaagttctaaatatacgtatgcgaatcgatcgaactgaactcattgctattttccgattgttatattaggaagggatgtgaaaatgaagttgaacaataagaagtgctacacatttgaa

SEQ ID NO: 22019 - DNA, 321 bp, DROSOPHILA
atggccggcttaacactgcttttcggcctaatcctggtcagcttctgcgcgtgttcctcaaatgccaccgatactgcccagatactgagatacgacaatgaaaacatggatagcgatggctatgccttctcctacgagaccagtgatggagttacccgccaggagcaggctgaggtgaagaacgccggtaccgaccaggaggcgctcagtgtgcgcggttccgtcagctgggttgctcccgatggccagacctacaccctgcactacattgcggatgagaacggtttccagccccagggcgatcatctgccccacaactaa

SEQ ID NO: 22020 - protein, 106 aa, DROSOPHILA
MAGLTLLFGLILVSFCACSSNATDTAQILRYDNENMDSDGYAFSYETSDGVTRQEQAEVKNAGTDQEALSVRGSVSWVAPDGQTYTLHYIADENGFQPQGDHLPHN

SEQ ID NO: 22021 - DNA, 7173 bp, DROSOPHILA
ttaagaagtgtaaataagtattttgaaagaataggtatttttttcatttagaaaattattaattaaaaaaaaaaacattttagaactgaaaatacaattttttattatgtattttattactctaaccgctaacatacccagtcgtcttcaggctttattaggtgttcttattacatgaacattattaaaaaagaaaaagtttttgggcccttataataatattaaaaaagaatatatttttcctatttttaacttatcttaacaaaatcaaacgaaaatttccagtatgccttaataaaataaaaacaaaaagttctcccaaatgcatagtcggctttgcggatttaaagtgcatagtttaatcataaaagactcttaagcttactttcaggctatagctattcagattgcattgaaatcgaatgacttaggcaacgaactttttaaatcccttgcatacttttgggggctaaatgctaattaccagtatcttcgtgatgcgtctctttagacgcgaatcatttatgctcgtattgaaagacaactgttatagcaattaatatgcaaattttagcatacaacatcagtcattgccgaacttgacagcaatatttcaattacaattgacttgcagtatccggcagaagataagctcactgctgattgccgatcgatgaaaatagagaagtgcaaacatcttcctcattgcattcgaatttgctcatcaagcaggtcaaatgcctggctatcgatgagactcaacaagttggattgcaaatacattggggtcgattaattattaacagatacaaatcggcatgaactacccttcaggcctgatagccgattttgaagaccaatctaaagtgttattaaatttcaatacagtactaataaattagaccattctaaatttaatcttgtaaaacttctctcataatttgatttttttggatctttatttgcttaaatataaaaaatatctaataacgacttttgtatgcactttactagaactcaatctacaaataaatcaatacggaccaaaaatactcaggaagtctagcaataaaagccaaaaaggttatttaccaaaactaatttagcttttgtataaaaaatatcgaggatgcaaattacttagtaagttcagaactagctgacaagcagtttaaataatcaaataaataacttttcaaactgcatgaaattttaaattataagcacaggcttggctgaggctcaagaggtgtgatgcgatctggccaatgctaccagctatgcgatccgacttggcgaaatacacaacgtgtagaaggcagagattcgcacgcacacttggccaacaagcagcggcaggttctcgtccgcctctaatgttttataatgtttacctaatattattaacattgtcaattcgctgccgaacatcgtggggtgtgtttcattctaaggcgcttgctccgtgccgataatctagccgtgagaaacgcgtctttccgtccgcttgaaatctaaatatttataatcgcgtatttgtattaaaatataaacgcccgtttatttatgcgtttttgtgtgagctctgacagtttatattagggcgtgaaaataaaataaaattggtgaccgatttaaataaataataaattcccaaaatgagcctaaaattgatggcgtttgtctgtgctgtaagtgcttaagtttgatcccaactctgaacccggcattcattgagttccctttaaagctgctgctcctgtgcaccttgacccatgtcctgtcggccgcgaccacagtgcgtccctacaagttcggcttcaccatcgacgagcagcagcatcgggcagagaagagaggtgagctggttgagctagcaaatgacgctaattaaaccattagcatatcttgactactgtgcgtcgatttattgacaccgaaaccgaaatatgtaaatagatgatgcgtcatctcgagagtcgttaggagcagatgcacaaatgcagcaccatccagcagctagcagccagcattagccaaaaaaagccataacttttgacttttgagccggagtgcgactagtggcggcttgtgcaatgccacacaatacacgtttgatgggtgcacggtgcacctgagcgacaggtcaccagcaattgaaataccagccaccaatggcaattagcggaatcttcacaacacacatatggccgggggttcatctctgaagtccattgtgtagtgtccaaatggcatgcatggtcgttatgatttttatttccatgctgaatcggtgataaagttttcagaaaatcgaaaacgaaacgtggccgatttgcataacatgtagactctttcgaacacacaaatgtttggcttatttatggtttttctttctttggctaatgctaatttcaaaaagatcagccacatttcaatatttataagtataattctggcatataaaatgccagagttgagccaaaaattgtattacgttcatattaacaaacaaattcaggaactcgttgtgcatgcaaaatgatatttgtttgttgtataactattcaaaggagaacggtataaacggtatcctaacaaaaacaatttcggcacctttgatttaaatattgaacgatctattgatcaacatcagatttttaaagtctagcttacggggcattacttcagagctataatacgtaactttaaatttaacatactagaaaaaaatgtattggcacttagaatatatttaattgtattttactatttactatattacataattaaaattttttctaaccaaatactgtttgaaattttacttgccttctttatgaatagtctcttgattacaaacattaggtttttgtactgtaaaataattaagtgggaatgaaactttaccaatagttataaatcctttaattttggttaaataattttctaattataatttataataatttattcccagtttcaatttttattacccactaaaatgtatgttaattttatggttatttttttattagtgttaattgtataaccagaaaatgatagtcttaatttatattgatacgagtttaatagttttcattatttagcccagctcattgaacaatttaaaatcaaattgatcacgacaaaagaataaattgaaataaagaattgttttcaagccccgtcgaaatcgatcgagacaaatgggaaagtgacacgaagccaaatttgaattaaacctaaaacaaacaagcgaaagccaattgatgcaaaccgttaaaacttgttggccagtattgtggaaacctgtttccagacacaaaggccacaagccagaatttcaaatgagaacattttagtgggtggctggacaggatgctttggtgagagacgcacctctttcagaccatccacagtgtcatccagattaataaattcatctcaacataggaatgtttcttacgtaggaagctgcctaacatatcaattcaaagcgatgggggtgtgtggtgcggttgaggggttttaagaaaccagctcacaagttatgatcgccattatcgatacagtttattagatcttaatctttatgggcctgctcgtggctggttatcaaacaaattaaaaatcacatatcggcgtaaaattcgcattcatattcaaaatgaacacaaaatcattttggtcaaatctcatcttgtttccccaactcacagatgaacgcggcattatcatgggcgagtttgggttcatcaccgccgatggtatctatcacgtgacggtctatgccaccgacgaggagggcaaattccggataatctccatgaagagctatccttacgcgggtccagttggttcaagtgagtattgacagaattcttgaccgattctgaatatttaattcgaattgcaatacgaacctatgacagcactaaaatatatgcttttggtctgataatattatttattaattcaaatcataaacccgattgaaatcagacttccattcagattatttcctttaaagtcatactggttttcgagctacgtttctaaatataaccaaacgtttttggtttgataagaataatcttaacttgtataatatgttttggtttgtttttaaatgtaatacattttatttggaaatttctaacagaggattgtataggtgatcaaggggaacttttgaatgacttgtaatattatttactttccagaaagtgttcctgtgacaacgactccaaaggtcctgcttcctgcagctccggtggctctgcccaagtacaacttcaactcggaggcctgttccggttgtttcctaaaaaagtcccctcccaagacggaaattcgcacactttcacagccattggctccagttcaaccaggtaagcccgatggctcttcagacatcggcctgaatgtgcagttacccttccgggaatccattgcacagactgtggcaagtcgtcttggtttgctccaagatacactgcaaacctccaacacaaacacgaacgcaccaaacactaaaacaatcgaacttggtctcaacatagcaatgagcacatactacacaacaaagaatgctgtaaccggacatgtgagcacgcagacctccaattcgcaaactccgagtgccaacacaaagatcgactacaatgtgggcgtggtcgagaaggcttcaccgccggtttatcggccattgaacatccggttgaacgaggacgttatgagacaagctattacatatggaaacacaatacctggccatgtgcccttgcccaatcagccacttgttgaaacctcattgcttccagcgagtcaagtaaaaatcttcgctttagatggaaatgcaaaggttccacttgccagtaacattcaatccgtagcacaacatccgaatgcgggccttaatgcaaaggttccacttgccagtaacattcaatccgtagcacaacatccgaatgcgggccttaatgcaaaggttccacttgccagtaacattcaatccgtagcacaacatccgaatgcgggccttaaaaacattaatagatcgggagtttcttctgcgaaaacattggccaatacgaagacaagaccaccacacacatttaacccacaccaaacacctcttttgagtaagctaagtcgggaacttataattaatgtattaattaattttagtattaaatgtcattacaaaatgcactgctacactacaacaaactaaagccatctagcggaaccatattgcactaagatcgtacactgcttacacgattcctaaactatttttgataaaggtatgtgtctctactaatacccttgggaattttattaggttcagccaccgccccgggaatttctggagtgacagcgaatacaccaaccggaaatgtaccctgtaagtgataagaggaaattatctccttaagcaagaaaatttaaaaagagacaatctaacaatcttagcaaatggtggaggcatcgcggcgggtaaagcgcctggtaatccacaagctggcggatctggaggtattatcggtgcaggagctccaggcggaagaaaagtctcggctggtggaattggttctggaagtgcaattggaggagtctctggaggaagcaaagcctcaggaaacggcggtgcaattggatctggaagtgcaattggaggaggggctactggaagcaaagcttcaggatttggattcggaagtaatattggaggaggtgtttcaggcagcaaaccttcagggtttggatccgaaagtaaaattggaggacctgattcaggcagcaaagctttaggatttggatccggaagtaaaattggaggaggtattactggcaccaaagcttcaggatttggcggagaaatcggttctggccgtggaagtgcctcaagtgcaacgggtgatctgtacaaattcaagtacatactggactacaatggacacgaggagaccggcggtcgcaatggtgacaagcagggtagctactttgcaatcggcgaggatgcagtgcagcggaccattgagtatattgcgaacgagtttggattccagccccacgtcagctggcggaaattggacgccaaggaggcgctgcccgaggagaattcactgaagcactacgagtttaaatggtttaatcaggaatagtaatgatacggtgattttccggtggattattccaagactagagtaggcacctcttttccccatgctgtacataacaatttttggttaatttcgaataaatacaacgttaaaagaaatgtttttttttttttttaaattgggttttattttgttgaaagtttttgccttaaattaactaaattcttagagggtttcggtgtgtgggcattgctgatgttcgtttttttttatatttgttttcgcatcgtaaagtttacattcagaatttaaaattgtatacacttagatcgttaacgattagttcgccttttgtcgtttttcgatttggtaaatacacatagttacacacatttaaatttgtatatatattttcctcgtattattatagttaaacttggacttaaatttagaatgttttcttttttacacacaaatatatagtatgtctagacttgggattaatatgtactcgtaatttatttcaatatttattcgtttgtaatttggtatttaaaaaatatataagagttttaactgtacaatcaactatcacagtcaaccatctcaaaacgataagttaaaaaagaaagtattcaaacccataataaaattcaatatataaattacgtaaacccaaataaactacattactgtctaaacatttttacacttaggcaaatatttatttacaaatcgtaaattgaagtgagaatgtggcaaacttttataactagacattcactgttgtgctgaacgttatttggaggatgatattgttattttgctatttacaaatgcgtccacacacaaaatgctaacaacaattgaaaaattctagagctatttcaagtcttagcctggaaaatgtctgctttgaatttgagaaaagagcttgtccttgatacactaaaaacacttagagtttggtttagcttcgaatgccaactatttcggttccgtttcttaattgtatattagtggaaagttagtttcttaatcc

SEQ ID NO: 22022 - DNA, 2296 bp, DROSOPHILA
atgcactttactagaactcaatctacaaataaatcaatacggaccaaaaatactcaggaacttttgtataaaaaatatcgaggatgcaaattacttagctcaagaggtgtgatgcgatctggccaatgctaccagctatgcgatccgacttggcgaaatacacaacgtgtagaaggcagagattcgcacgcacacttggccaacaagcagcggcaggttctcgtccgcctctaatgttttataatgtttacctaatattattaacattgtcaattcgctgccgaacatcgtggggtgtgtttcattctaaggcgcttgctccgtgccgataatctagcccctaaaattgatggcgtttgtctgtgctctgctgctcctgtgcaccttgacccatgtcctgtcggccgcgaccacagtgcgtccctacaagttcggcttcaccatcgacgagcagcagcatcgggcagagaagagagatgaacgcggcattatcatgggcgagtttgggttcatcaccgccgatggtatctatcacgtgacggtctatgccaccgacgaggagggcaaattccggataatctccatgaagagctatccttacgcgggtccagttggttcaaaaagtgttcctgtgacaacgactccaaaggtcctgcttcctgcagctccggtggctctgcccaagtacaacttcaactcggaggcctgttccggttgtttcctaaaaaagtcccctcccaagacggaaattcgcacactttcacagccattggctccagttcaaccaggtaagcccgatggctcttcagacatcggcctgaatgtgcagttacccttccgggaatccattgcacagactgtggcaagtcgtcttggtttgctccaagatacactgcaaacctccaacacaaacacgaacgcaccaaacactaaaacaatcgaacttggtctcaacatagcaatgagcacatactacacaacaaagaatgctgtaaccggacatgtgagcacgcagacctccaattcgcaaactccgagtgccaacacaaagatcgactacaatgtgggcgtggtcgagaaggcttcaccgccggtttatcggccattgaacatccggttgaacgaggacgttatgagacaagctattacatatggaaacacaatacctggccatgtgcccttgcccaatcagccacttgttgaaacctcattgcttccagcgagtcaagtaaaaatcttcgctttagatggaaatgcaaaggttccacttgccagtaacattcaatccgtagcacaacatccgaatgcgggccttaatgcaaaggttccacttgccagtaacattcaatccgtagcacaacatccgaatgcgggccttaatgcaaaggttccacttgccagtaacattcaatccgtagcacaacatccgaatgcgggccttaaaaacattaatagatcgggagtttcttctgcgaaaacattggccaatacgaagacaagaccaccacacacatttaacccacaccaaacacctcttttgagttcagccaccgccccgggaatttctggagtgacagcgaatacaccaaccggaaatgtaccctcaaatggtggaggcatcgcggcgggtaaagcgcctggtaatccacaagctggcggatctggaggtattatcggtgcaggagctccaggcggaagaaaagtctcggctggtggaattggttctggaagtgcaattggaggagtctctggaggaagcaaagcctcaggaaacggcggtgcaattggatctggaagtgcaattggaggaggggctactggaagcaaagcttcaggatttggattcggaagtaatattggaggaggtgtttcaggcagcaaaccttcagggtttggatccgaaagtaaaattggaggacctgattcaggcagcaaagctttaggatttggatccggaagtaaaattggaggaggtattactggcaccaaagcttcaggatttggcggagaaatcggttctggccgtggaagtgcctcaagtgcaacgggtgatctgtacaaattcaagtacatactggactacaatggacacgaggagaccggcggtcgcaatggtgacaagcagggtagctactttgcaatcggcgaggatgcagtgcagcggaccattgagtatattgcgaacgagtttggattccagccccacgtcagctggcggaaattggacgccaaggaggcgctgcccgaggagaattcactgaagcactacgagtttaaatggtttaatcaggaatag

SEQ ID NO: 22023 - protein, 77 aa, DROSOPHILA
MHFTRTQSTNKSIRTKNTQELLYKKYRGCKLLSSRGVMRSGQCYQLCDPTWRNTQRVEGRDSHAHLANKQRQVLVRL

SEQ ID NO: 22024 - DNA, 3153 bp, DROSOPHILA
gttctcgtagtttgtattaagaatttagtccacatttttaaatataatattcttagttggattattgcatttataatttccaattaagtttttccacgatcactgccacagtagttagatgtcgttggattaatgtggatgttttaagaatgtgagtggttagcggcgcgagtttcgttttatatttaacttattattgttaatatttttttagaacttttgaactacaccgctatacgttgggcgctaattaatcgtcccgattcagtctgatttttaaatcttaatcctaatccactcaacctcggccagaagcttttatttagaattctcttgaactttatactgaaattatttcacagcattatgaaattgaaatttgctgactggtgtttacgttaagtttggtcatttatcggatggttaagtgctggcgacaaaaacaaaaacaaaggaaatgctgctgagatcggggtatgaaatttgtttatcaacagagcagggtgctatatttacgggtgggataacttatatgtattgtaattaatcgcacatggggcggttatatatacatacaacttttattttaataaaattgagtttcacgttatcagatgcgctgagctgatatcttacttgtaatctcaggtatgcaacataaaataaataaaataaatagctattagataatgaatatattctgattcactcaaaattactttaatatggcaacttttgaaaatttgattataactagaaaaaatagcgctaaaatttggcattgttaagatttcaatattttagcgacagtccctctcttgtatagttgttgtgttatctaacaggagcattctaattttcagcaaaactgtggacggtatgcatatttaaaatcacgttgttctatggtataccatgtggtatagacccactcttgtccaaacaggcccttaaaatataaattgaaatcgatgggtcgtttccatatcgatattttctcaaatttttgagctgtccaaaacaataaatacatacattaaatatacctttaatacaatacattgaagtcaaaatacaattttaaattgctaatcactatttcgccgaatttgcataaacgcatgagaactatgaccgactaagcaagttatctgaatgcagtagctgaaccccgaaagctagagaacaaaaagtataaatgtcggaatcaatgtcaggtgatcacaaaattttattaaaaggacattcctcccaatatttaaaacttaatgttggtggtcatttatattataccacaattggaacactgacgaaaaacaatgacacaatgctgagcgcaatgtttagtggtagaatggaagtgctgactgattcggaaggtttgttacatgttcttatacggaataatattaatatacaaaattctaggatggattttaatcgatcgctgtggaaatcattttggtatcattcttaattatttaagagatggcactgttccattaccagaaactaacaaggaaattgcagaattgcttgccgaagccaaatactactgcattaccgagttagctatttcttgtgaacgggcactatatgctcatcaggagccaaagccaatttgccgcattccacttataacttcacaaaaggaagagcagcttttattaagtgtttctttaaagccggctgttattcttgtggttcagcggcagaataacaagtattcgtacacaagtacatcagacgacaacttattaaaaaatattgaattatttgataagctttctttgcgctttaacgaacgaattttgtttattaaagacgtaattgggccaagtgaaatctgctgctggtcattttacggacacggaaaaaaagtagctgaagtgtgttgcacttcaatagtttatgcaactgacagaaagcatactaaagttgaatttccggaagctcgtatatacgaagaaacgctacaagtcttgctttatgaaaaccgcaatgcaccagaccaagagctcatgcaggcaacgtcttcagcacgagtaggaagtgcaagtggaaccagcattaatcagtacacaagcgatgaggaagaagaacgcactggactagcgcgattacgatccaacaagcgtaataatccgtcctgatttacaaaactctattacatatgattgacattgttttttataaacgattaaaaaaaatatatatatgttttcttttcttaataaaacttgctatttctgctgtgtggtctgctataggtgtagttgaaataaaatggttttttttttggttatcctgttaagaagaaattccgtgttttccacatatgcgttaataagctttccttcccaagccaactgtagaacgatgctttgttaagttgatagttccgatcatattaactagaaatgacattccctttgcactgtacacctaacagtggattgcataagcgctattctgttccgaaaattactactactggtttaaagttattaataaaacctcttcagttcaaaactaaatatcacgttttatcagcgatgttttttaaattttccgaaacatcgatgtttaatttagactatcgatgattttaggatcatcactattcgaagaacaagaagaagagctataatttcttcagctaatttaattaacttaatttcaattattagcgtgcagtatatatatatttattgctttttaattgttggtgaaagctatgcaagtcgttggagatcttcatgcaaagcaggccaagtcatttctgatcgccgaactacattgaaagcttatgctgtgaacaaacttatgttcatcgacaaaattttggacatttctacaaaaaaattatgcgataaaatgaagataaagatgctcaaattacacatatatgtacactttaaataagatatatttatgaggcgtctggtaaaaccgatctcactgatttttaaattcctattattactaatttaagatgatgcatatgaaaagaaatcgcattgtttctaagtttgtaaaattattatttgttgagttgttttatattcaatttctaatcaattgaattcaaaaatatacggatacgccaccctggatcgcgaaggaaaggggctaaccattttctagtagtag

SEQ ID NO: 22025 - DNA, 1104 bp, DROSOPHILA
aaatttttgagctgtccaaaacaataaatacatacattaaatatacctttaatacaatacattgaagtcaaaatacaattttaaattgctaatcactatttcgccgaatttgcataaacgcatgagaactatgaccgactaagcaagttatctgaatgcagtagctgaaccccgaaagctagagaacaaaaagtataaatgtcggaatcaatgtcaggtgatcacaaaattttattaaaaggacattcctcccaatatttaaaacttaatgttggtggtcatttatattataccacaattggaacactgacgaaaaacaatgacacaatgctgagcgcaatgtttagtggtagaatggaagtgctgactgattcggaaggatggattttaatcgatcgctgtggaaatcattttggtatcattcttaattatttaagagatggcactgttccattaccagaaactaacaaggaaattgcagaattgcttgccgaagccaaatactactgcattaccgagttagctatttcttgtgaacgggcactatatgctcatcaggagccaaagccaatttgccgcattccacttataacttcacaaaaggaagagcagcttttattaagtgtttctttaaagccggctgttattcttgtggttcagcggcagaataacaagtattcgtacacaagtacatcagacgacaacttattaaaaaatattgaattatttgataagctttctttgcgctttaacgaacgaattttgtttattaaagacgtaattgggccaagtgaaatctgctgctggtcattttacggacacggaaaaaaagtagctgaagtgtgttgcacttcaatagtttatgcaactgacagaaagcatactaaagttgaatttccggaagctcgtatatacgaagaaacgctacaagtcttgctttatgaaaaccgcaatgcaccagaccaagagctcatgcaggcaacgtcttcagcacgagtaggaagtgcaagtggaaccagcattaatcagtacacaagcgatgaggaagaagaacgcactggactagcgcgattacgatccaacaagcgtaataatccgtcctga

SEQ ID NO: 22026 - protein, 301 aa, DROSOPHILA
MSESMSGDHKILLKGHSSQYLKLNVGGHLYYTTIGTLTKNNDTMLSAMFSGRMEVLTDSEGWILIDRCGNHFGIILNYLRDGTVPLPETNKEIAELLAEAKYYCITELAISCERALYAHQEPKPICRIPLITSQKEEQLLLSVSLKPAVILVVQRQNNKYSYTSTSDDNLLKNIELFDKLSLRFNERILFIKDVIGPSEICCWSFYGHGKKVAEVCCTSIVYATDRKHTKVEFPEARIYEETLQVLLYENRNAPDQELMQATSSARVGSASGTSINQYTSDEEEERTGLARLRSNKRNNPS

SEQ ID NO: 22027 - DNA, 3095 bp, DROSOPHILA
cttgcactcgccatcgaatccgtgggatacaattcccaccagggttctgctgccatcgtccaagaccatcggacctccggagtcgccgcgacatggcagacccttcttggaatcgatgcagatgaagccgttgtgcacgacctttttgcttttgccgcccagctgcttgttccactgcctctcgcactccttgttcgagatgatgggcgccctgatgtactggagcacctggctgggcagctgcttggtggtcagaccccaacccgaaatgatggctttgcgacccgtgtatgttttcttggcactgggcaacttggcgggttggatatacttgttaaatgtaagcttcttgggtaatttgatcagggctatatcgtttgtcacggtcttacggtcgaacttcttgtggacgatggtgtagctccggttgaccacgatttctttatcatcaaaggatttcacctttcccacgtggatcagcactttccagctaagtaggtgagaaatatagatatatataaatcggcggagtatgtgtatgttacttacagattagactttggatcctgcagacaatgggctgcggttataatccaacgattactgaggatagtgcccccgcacatattgggctcatccttggatccttcgaagtagcaaagtagtccaacctggtaaggcaactgcttcgcttttgccgctgtgccattcattattcgcagggagccagtctcctggccaaataccagggagaactgcacgataagcaccagctggagaatcatttcaattgatttacaactccaaacccttgaacagctttatatattgcccgtattcgtggttttcattgattgccccggttttatgattgcggcgtgttcgaacctctttgcataatctgcgtgcttttggtttattggttataataattacgggttgcttgaatagtcggatacatggtacatatacgtatatataagtaagataagattctcactcagtgagaaactccgaacttgtagatgacttcgtgctggtaactttcgccaggtcgcaaaatggtcgagggaaagttgctgtggttcacggagtcgggaaacttttgtgtctccaggcagaaggcacaatgcttggcataggcagctccatccttgccgggaatgggcgattcaccgcgttccacgtctggcataaagttggaggtgtagaactgcactccgggctgattgctgaccacctccagccagcgtccgctgggcggatgagtggctctggccaccttggccaatggttgtggtggactgaaggtcacacagaagttgtcatcgtagccgcgagctggctgcagcgccttgaggcgttcacccagattgctggacacacgtaaatcaaatcctgttccctctacgggtgtgatacggccggtgggaatggaagactgatccgtctcagtgattccataagcatttatctcgatggtgtgctcgtagagaccgttggctccagatttgtggccagctaggttgaaataggagtggttggtgagattcacgggagtggttttatctgctagtgcactcatctggacatggaggcagttatcctcgctgagggtaaagcttgccgtggctgtcaccttgccgggatagccttcgtgtccatcgggattggtgtgggacagggtaacaccatccacacgcacttccacaacttcccagtgagccttatcgaagcctacaaagccgccatggagctgaaacttgttgtctcggttcttagacacctgaactagctttccatcaagataaaagctgccattggcaatccggttgcaaacccgcccaatggttgctccaaaatacggatttctctcgctctgatagcccgccaaatcgtcaaatccgagggtcacgtcatctatttgaccgctggcatcaggcgtctttatgctggtaatggtggctccacgggtgatcaattgcacggacattccagctccatttgtcagggtgaaccgcttgatggtgtcctttgacttggtgaacggattcaccgctccgttggcgaagacgtcttccgtgacgttgaccattttggatccggctgcagctgtggaatgattacgagtgccaattgcactgcgtttttatctgaccctctccaagccgtaaaggttaatcagcactcgatgtgcgtatgtgtttgttttaattatcgcaaaaaagccgcaaacaaaatgtacatatgtacgtacatatataaacagatctagttatcacaaattggtgggaaagtctgcgataagggggatagacaccttgtggagtctttaagaattgtgcaatgttcgtattccaaatttagcggtaattcagaaaattcttacttaaattatcttttaatcgccgtagttgcaattcaaattttagagttgccttacctattttagaccagctgtttttacatgtgcgtagtaagtaaaaattcgcaggggcttgttttagtagttaaaaatttgttggtaaaattttttgatatttgcttattaagccttttaaatagaacaattttattaacatacttgaatacaatatacatttttttatatatatgtttaaatgcccatctttgctacacagtggtggcagttgcaaagatctggcagccctgctctagaaataccacacagcaaatagtccacctctaagcaacaggtcggttgtttattgaattcgtttatttaactttatgggtagtttggcaaatagaaagctagctaaccggtgcagttaaccctttttgttgacagagagctcagaggaaacggcagattagatccccctgagttcatccccacccaggcaccactaatccgacgagtataaatcccaaaatgcaattgacgtggcagagagatcagataaatctagtacttccgattgctctgatttgttgttgtcttttgatcgacgtaaccagcgctcaggaggcccaacaaccatggtacgagaatctgccagcggtggccatggactataaggtgtgtgctgattttaagactcctctagagcatcaaatttcaccgggaacgt

SEQ ID NO: 22028 - DNA, 1095 bp, DROSOPHILA
atggtcaacgtcacggaagacgtcttcgccaacggagcggtgaatccgttcaccaagtcaaaggacaccatcaagcggttcaccctgacaaatggagctggaatgtccgtgcaattgatcacccgtggagccaccattaccagcataaagacgcctgatgccagcggtcaaatagatgacgtgaccctcggatttgacgatttggcgggctatcagagcgagagaaatccgtattttggagcaaccattgggcgggtttgcaaccggattgccaatggcagcttttatcttgatggaaagctagttcaggtgtctaagaaccgagacaacaagtttcagctccatggcggctttgtaggcttcgataaggctcactgggaagttgtggaagtgcgtgtggatggtgttaccctgtcccacaccaatcccgatggacacgaaggctatcccggcaaggtgacagccacggcaagctttaccctcagcgaggataactgcctccatgtccagatgagtgcactagcagataaaaccactcccgtgaatctcaccaaccactcctatttcaacctagctggccacaaatctggagccaacggtctctacgagcacaccatcgagataaatgcttatggaatcactgagacggatcagtcttccattcccaccggccgtatcacacccgtagagggaacaggatttgatttacgtgtgtccagcaatctgggtgaacgcctcaaggcgctgcagccagctcgcggctacgatgacaacttctgtgtgaccttcagtccaccacaaccattggccaaggtggccagagccactcatccgcccagcggacgctggctggaggtggtcagcaatcagcccggagtgcagttctacacctccaactttatgccagacgtggaacgcggtgaatcgcccattcccggcaaggatggagctgcctatgccaagcattgtgccttctgcctggagacacaaaagtttcccgactccgtgaaccacagcaactttccctcgaccattttgcgacctggcgaaagttaccagcacgaagtcatctacaagttcggagtttctcactga

SEQ ID NO: 22029 - protein, 364 aa, DROSOPHILA
MVNVTEDVFANGAVNPFTKSKDTIKRFTLTNGAGMSVQLITRGATITSIKTPDASGQIDDVTLGFDDLAGYQSERNPYFGATIGRVCNRIANGSFYLDGKLVQVSKNRDNKFQLHGGFVGFDKAHWEVVEVRVDGVTLSHTNPDGHEGYPGKVTATASFTLSEDNCLHVQMSALADKTTPVNLTNHSYFNLAGHKSGANGLYEHTIEINAYGITETDQSSIPTGRITPVEGTGFDLRVSSNLGERLKALQPARGYDDNFCVTFSPPQPLAKVARATHPPSGRWLEVVSNQPGVQFYTSNFMPDVERGESPIPGKDGAAYAKHCAFCLETQKFPDSVNHSNFPSTILRPGESYQHEVIYKFGVSH

SEQ ID NO: 22030 - DNA, 2863 bp, DROSOPHILA
aaattccatttcggttttcgatataaactgtgaattggaacaggtcaccgtaataataaatatttatgataacatatagttacaagtcacactaactctatggatttataggcaaatgataaacgcaatattgaaagttacaaaattatatatataaagcatatatatttcaatacgaaaataaaactagttgaacgcatagtaaattacttgatcatttttacaagacaagccgcaaacgaaaataatgaaaaatcttaccaaaaagatacaaaaaaaaaagaacaaaaacaatttaacaattactttaaatttattattttctacggataatatgtgcatttttatatatttaaacgaaagataacaaattttacgctagttacaaacaaatttttctgaagtcttcaagcagccgtattaaaaaaataaaaactacaaacaaaacgaatcgaagagaaaacaaactaatttaatcagccgagttcttatcaacttattcgctttgttaactaacaaattgtatagcttttccacaatttcgtttacactttttgtacatatagggaaaatactaaaagaatcgttaaaagaaccaaattatatcactcaccattattgtactgaatcatttccatttatgtgtttgtacattttgagaactgcatttacgaaatagcgagaacaaataaggtaaattaaagcaagggggagaattgcaaataatcagcaacattaaccacactcacacgtaaaccaagcccacaaaacgagaacatctaaacattatcataaacaaattgtttaaacgacatgcaaagtcacaaataacatacaaatcgaaaccaacattaagaaatgataacaaatttagcaaagccacaagagaatattatgaaaatggaacggagaacgagaaagtgtatgggagtttgtatgaagtaataagaataaagcacacgtttgaaaagagattcgatttttaatgattccacatcaactacttaagtcctccagagtagtatttaatccacttgaggtaggaagaaacgcgtgtggatacgtcgggcagttttagcttgcactcgccatcgaatccgtgggatacaattcccaccagggttctgctgccatcgtccaagaccatcggacctccggagtcgccgcgacatggcagacccttcttggaatcgatgcagatgaagccgttgtgcacgacctttttgcttttgccgcccagctgcttgttccactgcctctcgcactccttgttcgagatgatgggcgccctgatgtactggagcacctggctgggcagctgcttggtggtcagaccccaacccgaaatgatggctttgcgacccgtgtatgttttcttggcactgggcaacttggcgggttggatatacttgttaaatgtaagcttcttgggtaatttgatcagggctatatcgtttgtcacggtcttacggtcgaacttcttgtggacgatggtgtagctccggttgaccacgatttctttatcatcaaaggatttcacctttcccacgtggatcagcactttccagctaagtaggtgagaaatatagatatatataaatcggcggagtatgtgtatgttacttacagattagactttggatcctgcagacaatgggctgcggttataatccaacgattactgaggatagtgcccccgcacatattgggctcatccttggatccttcgaagtagcaaagtagtccaacctggtaaggcaactgcttcgcttttgccgctgtgccattcattattcgcagggagccagtctcctggccaaataccagggagaactgcacgataagcaccagctggagaatcatttcaattgatttacaactccaaacccttgaacagctttatatattgcccgtattcgtggttttcattgattgccccggttttatgattgcggcgtgttcgaacctctttgcataatctgcgtgcttttggtttattggttataataattacgggttgcttgaatagtcggatacatggtacatatacgtatatataagtaagataagattctcactcagtgagaaactccgaacttgtagatgacttcgtgctggtaactttcgccaggtcgcaaaatggtcgagggaaagttgctgtggttcacggagtcgggaaacttttgtgtctccaggcagaaggcacaatgcttggcataggcagctccatccttgccgggaatgggcgattcaccgcgttccacgtctggcataaagttggaggtgtagaactgcactccgggctgattgctgaccacctccagccagcgtccgctgggcggatgagtggctctggccaccttggccaatggttgtggtggactgaaggtcacacagaagttgtcatcgtagccgcgagctggctgcagcgccttgaggcgttcacccagattgctggacacacgtaaatcaaatcctgttccctctacgggtgtgatacggccggtgggaatggaagactgatccgtctcagtgattccataagcatttatctcgatggtgtgctcgtagagaccgttggctccagatttgtggccagctaggttgaaataggagtggttggtgagattcacgggagtggttttatctgctagtgcactcatctggacatggaggcagttatcctcgctgagggtaaagcttgccgtggctgtcaccttgccgggatagccttcgtgtccatcgggattggtgtgggacagggtaacaccatccacacgcacttccacaacttcccagtgagccttatcgaagcctacaaagccgccatggagctgaaacttgttgtctcggttcttagaca

SEQ ID NO: 22031 - DNA, 804 bp, DROSOPHILA
atgattctccagctggtgcttatcgtgcagttctccctggtatttggccaggagactggctccctgcgaataatgaatggcacagcggcaaaagcgaagcagttgccttaccaggttggactactttgctacttcgaaggatccaaggatgagcccaatatgtgcgggggcactatcctcagtaatcgttggattataaccgcagcccattgtctgcaggatccaaagtctaatctctggaaagtgctgatccacgtgggaaaggtgaaatcctttgatgataaagaaatcgtggtcaaccggagctacaccatcgtccacaagaagttcgaccgtaagaccgtgacaaacgatatagccctgatcaaattacccaagaagcttacatttaacaagtatatccaacccgccaagttgcccagtgccaagaaaacatacacgggtcgcaaagccatcatttcgggttggggtctgaccaccaagcagctgcccagccaggtgctccagtacatcagggcgcccatcatctcgaacaaggagtgcgagaggcagtggaacaagcagctgggcggcaaaagcaaaaaggtcgtgcacaacggcttcatctgcatcgattccaagaagggtctgccatgtcgcggcgactccggaggtccgatggtcttggacgatggcagcagaaccctggtgggaattgtatcccacggattcgatggcgagtgcaagctaaaactgcccgacgtatccacacgcgtttcttcctacctcaagtggattaaatactactctggaggacttaagtag

SEQ ID NO: 22032 - protein, 267 aa, DROSOPHILA
MILQLVLIVQFSLVFGQETGSLRIMNGTAAKAKQLPYQVGLLCYFEGSKDEPNMCGGTILSNRWIITAAHCLQDPKSNLWKVLIHVGKVKSFDDKEIVVNRSYTIVHKKFDRKTVTNDIALIKLPKKLTFNKYIQPAKLPSAKKTYTGRKAIISGWGLTTKQLPSQVLQYIRAPIISNKECERQWNKQLGGKSKKVVHNGFICIDSKKGLPCRGDSGGPMVLDDGSRTLVGIVSHGFDGECKLKLPDVSTRVSSYLKWIKYYSGGLK

SEQ ID NO: 22033 - DNA, 3476 bp, DROSOPHILA
ataagcatgtcatcaccgccgctcactgtgttgacatgtaagtgaccagaagaaatactaacgatccaatcatcttaaggttctacattttgcagggcgaagagggccttggttttcttgggcgccaatgagatcaagaacgccaaggagaagggacaagttcgactgatggtgccaagcgaaaacttccaaatctaccctacctggaatccaaagagattaaaggatgacattgctatagtaagactccctcatgccgtcagctttaatggtgagttctggtccttaacaaagtgaactacctatctctgaaatatacataattttagagcgcatccatcccattcaattgccgaagaggcactacgagtaccgcagttttaaaaacaaactggccatcgcatctggttggggtcgttatgccaccggagtccatgcgatcagcaatgtgctgcgctacgtccagctgcagataatcgatggacggacttgcaaatccaacttcccgctatcctatcgaggtacaaatatatgcaccagtggaaggaatgcccgttcaacttgcaatggtgattcgggaggacctttggttctccaaaggaggcactcgaagaagagagtcctggtgggaattacatcctttggcagcatatacggttgtgatcgaggctatccggcggccttcaccaaagttgcctcatatttggattggatcagcgatgaaactggtgtaagtgcccaccaggataccacggaggcaatatttttcgaccagtatgtgagggaatatgggaaaccacgtcaaagccgacgcttggaaacggaggagcagttggaagacgatgtgcccgacgaactagatgtgcatccgagacccgcttccgatgaggacatctccgagaatgtcagaccgcgaacacggtcacgcccgcattccgaacacgagttctatttcttgtaacccaaaaataaacgtttattttaagatcaaaatcaacgcttagtcgccgttgttgaccacaccactcttctcttcgatccagtccaggtagtaggtgatacgggtgaagacaccgggccatcccacctcgcagccgagagcaatgccgaaggaggtggctccaatcagggtgttgctgccgtcatccaggaccaaaggaccgccggagtcgccgttgcaggtggaaattccgccggtggtcttgatgcaaatgttgctggcggcaaccagaccgaagtaccagggagagcagccgctgttgttcatgatgggaaccgtagcgtactgcaaaatgtcggtcgctccggtagcagctgtgtggaaagtaaggaaatatagtttagaacagttctaagatatttataggaactacgattaaaaacatttttgaagattaaaaactcattaaaaaattaataatagaatactaaactaacaaaggattataaataaagtgtaaaaacaatgttgcgaaataacaacaaaagcagaaaagagtccataaaaatcgaattttgataataaattttaagtggccttttaatccaaaggtaaaataaagcgtgaaattgggttttttcgatcgtaaattgcattaacgaaataccaaaaatagaattttctgataattttagtcactttctagaataattttggtttcttttacttagtatttagtatttaatatttagtgttaggatagatacattcgcctctattctacgacctaaactaactctctaacctaactctcactacatatttttcgagtgctaaacttgctggttacgttaaaagagcttaactttctctagtagttataaaattgtagttcaagggtgtaagggtcacttacagtcgctgatcttgccccatccggaggcaatggcattctctccgccgtaggtgctgtagctgtcggatttcacgggcagcttagcgggctggatgtactctgtaatgtatattagataattgagaatttctgctataaaaaccagtaacgaagcactcactgttgaactcaatgggcactggcaacttgatcagggaaatgtcgttggtgatggtctcggcgatccaatcctcgtgcacgatcacattctttgtctccacgaagatgatctgctgtccctcctccttggcgttggtgcgatcgtgggcgcccaggtagacatccactccggtggtcaggctgtccgtgcaatgggcggcggtgatgatccagcggtcactgatgatggtgcctccgcaccaggcagctcctccagtgatgtacagcagtagtcccacctggtaggggaactggttgggctcggcaatctgtcctccagtaatcctaccgctgggcagggtctcgccatggaccttgggcatcggggtctcgatgttcaggttcttgaccgaattccagtccacagcctgggccccaagaatggtggccaagagcagaaccgtagcgcaggcgaatttcattttgatcacaactaaagtgttggccaagaactcgggcacttttatacggattttaaaaggagcgtgggtatcgtaattcattgataatctttggtgaattaacccggctgtagttaaccgaggtgatttataatcgtctatttgccactactgatagagccgatgctaccgatattccaagtgataagcagggcaagcaaaccaagaagtgtgaatcgatttggcctatattggcaataaaacccaatcatgagcagattaatcagttcgtagtaggcttatctattgcagtgatgacaaaccaaaggtaattaaccatttaacgatggtatattaaaggttttctgaaactagtattatgttgacctaagacttataataataatttcttaaatagaatattttactagaacaaagcaaatcacctttggaatgttatattcttttgataatgtaattgtattatctttgctagagcttatctgtaacacttgtattggcggcgatagcaaaaccgccgacatcgattagcaaaggggttttgtgatttaattgcataacccatagtgcccacattcataattctaccagtttaaactgcgatgtgcctatgatatgagtaaacagtccgatcgtacgtgtgaacttcctgccgactcattatgatgtcataacagccgatgcacttccctcaattcaattaaaaggttcggtattttcaaaacaacttccaaacttaattaaagcatgatacttatggaatcaaatggaaataaaataagtaaaaaaacaaaacagctgaaacaaaagcggagaactaagcgagacatgaatcaaaacggaaatggatttaatgcaacaatttttgtttgctcaattgaaggtcgtcttaaagttgagcgggcccaaacaaaagccgtcagtcacaataatctggccgagacgaagtctaactggccacaagttcacagagaagagccacagagaacccccgtaccgt

SEQ ID NO: 22034 - DNA, 873 bp, DROSOPHILA
atgaaattcgcctgcgctacggttctgctcttggccaccattcttggggcccaggctgtggactggaattcggtcaagaacctgaacatcgagaccccgatgcccaaggtccatggcgagaccctgcccagcggtaggattactggaggacagattgccgagcccaaccagttcccctaccaggtgggactactgctgtacatcactggaggagctgcctggtgcggaggcaccatcatcagtgaccgctggatcatcaccgccgcccattgcacggacagcctgaccaccggagtggatgtctacctgggcgcccacgatcgcaccaacgccaaggaggagggacagcagatcatcttcgtggagacaaagaatgtgatcgtgcacgaggattggatcgccgagaccatcaccaacgacatttccctgatcaagttgccagtgcccattgagttcaacaagtacatccagcccgctaagctgcccgtgaaatccgacagctacagcacctacggcggagagaatgccattgcctccggatggggcaagatcagcgactctgctaccggagcgaccgacattttgcagtacgctacggttcccatcatgaacaacagcggctgctctccctggtacttcggtctggttgccgccagcaacatttgcatcaagaccaccggcggaatttccacctgcaacggcgactccggcggtcctttggtcctggatgacggcagcaacaccctgattggagccacctccttcggcattgctctcggctgcgaggtgggatggcccggtgtcttcacccgtatcacctactacctggactggatcgaagagaagagtggtgtggtcaacaacggcgactaa

SEQ ID NO: 22035 - protein, 290 aa, DROSOPHILA
MKFACATVLLLATILGAQAVDWNSVKNLNIETPMPKVHGETLPSGRITGGQIAEPNQFPYQVGLLLYITGGAAWCGGTIISDRWIITAAHCTDSLTTGVDVYLGAHDRTNAKEEGQQIIFVETKNVIVHEDWIAETITNDISLIKLPVPIEFNKYIQPAKLPVKSDSYSTYGGENAIASGWGKISDSATGATDILQYATVPIMNNSGCSPWYFGLVAASNICIKTTGGISTCNGDSGGPLVLDDGSNTLIGATSFGIALGCEVGWPGVFTRITYYLDWIEEKSGVVNNGD

SEQ ID NO: 22036 - DNA, 3026 bp, DROSOPHILA
tctgatccattgtccatccagaaaatctcctcgtctgtccaattccgcataatttcagatggagcgagcacgtttgcttctgcaaatggccagatgttgttaactattggcagcagcgatactgtgtttccctgtccagaactcgatacgtttggatatatttgagaaattttcaaacatcttcataataacctgtcaaacaaaagagaatatcagcataactggcacgtggttttaataatgcctaaaattggtttgccaatttgataatgataacatttttcgagcataacttttcttattttattagcattcgcattcaattaacatataaattaacatattaaatacagaattgctttaaaggttattccattatcatacatcagtaagaaatctatagtaaaatgtaaattttttttatttccagtgtaggtcatttgcatatgtgtagtatgttgatagattcgaaactcacgtgaatacagaatcaaattacttggtcaatgaatattattatgaactgttttttgttagcttttaccatatttgttaacaggctgatatattttttagagtgcaaataaagtagttacttaacgaaacatttttattattataaattatatattattataaactgttatcaaaatcatcgctgttacaaaataagaattataatattgcttgcatattataattcgatatatctatttctctcagtgcaaatttatgcgaacaaaatatagttttataatgcgtgcctccattgacttcgtcacatataaaaagagacgattctccggtgactcccagtatcaaaaataaagctatgaagaagttatttgcgggactcgcatgcatccttttggtggcattactactttggtaggtaaaaaaaaaacggattacagtgaattgcttctgatatattctgatgatttgtgacaggagttataaatacttttccggacaaaaaaccacaacaccgctcctgccgatggttatcaacacctggccctttgcggaagccaaaaaggaggcgtggcgactgctcaatgtgaaaaagggcggacttggacagacgagaagcgccgttgtgggcggtatatccatgtgcgaaaagctgcagtgcgccaagactgttggctacggcggcaatcccgacgagcgcggagatacatccctggatgccttgcttatggatggaggcaccatggaggtgggtgctgtgggcgatctgcgacggatcagaagtgccatcaaggtggcgcaacatgtcttggaacacacgcttcacaccctgctagttggcgatggggccgatgagttcgccaatgccatgggattgcagtacgaatcactaaactctgaggacaacatagagtcattgaaaaattggacgaggcacaactgccagccaaacttttggcgaaatgtccacccggatccgaggacctcctgcggtccctaccagcccttggtcacatgggatccgaatgccaagcaatcggatcggatcgaaattggtcccgataaccacgacaccatcaccatggccgccatcgatgaggagggtcacatccatgtgggcacctccaccaacggactacgctacacgctgcccggacgtgttggcgacgcctcgattcccggctccgctgcctatgcggataacgaagtgggcgccgctgttaccactggagatggagacatccttatgcgcttcctgccctctctcctggcggtggaggccatgcgggcgggcaaaacaccggcggaggcagtcgagttggtcatccagcgaatccagaagcacgtaaagtatttcgaagtcgccgttatcgttgcaaaccggcttggaacgtacgcagtcaggtgccatggtactggcatggccagggataatggaaagtttgcctatatggtcagtagtccgggacaaccggtgcgcacggaatcggttgagtgctcagcgaatcctgagaaatctccttccgaagacgatagacaagttatttggtaatgtttactaattttgttagactataaatcttataattgttatgcacttagccattttaaaatgtatctgaaaccaggagtagaagaattacgattagctcctgcataaaagaaaatgtgcctcagattagacctatcggtagattaaaaggctgaataaaagcatgttcattttttgcaaatggcacgcaaacattatctatcatatcatatctgaatatagaaaataataaaagttattatgcttgtatttgttgataactcagttcggtttctttaaaaggctcctgcagtcatgtagaatgaaccatagtttatcaagccgggaaaccaaacatcgctgctcagtccaacatgattcttagtcaaaatgatggcataaccgtacgagttatgaaggaggacgactatccaagagtgaaaaccttcatgacggactactttcactacgacgagcccatgggaatgggtctcgaggagcccattcacctgcagcatgaggaggaagtggataggcaatacctggcggtgatcaggcagggactatccatagtggcactcgacgataacaacgggggactactggttggcattgccgtggcggagacgatggatcccatcgaaatggccaagcagcacaaggaagccgaggaaatggagccaaatgctttgggtcgcagcaggaaatttatagccaaagtggagcgcgaagccaacattttcgaacgcttcggagtctcctcctacctgagtctgctggtcatctccgttcacccctcaatgaggcaaagaggtatcttggtcatactttccaaatgtctctttaaattgggtcgcctgcggggactccgtctgttcatcggcagtggcaccaatcactactcctcccgatcggcgatgaaagcgggatgtgagtgcatccattcggtggcctatgctgactacaaggacgaacagggccgaccgatatataatccaccagcgccccatacccacattcg

SEQ ID NO: 22037 - DNA, 1026 bp, DROSOPHILA
atggttatcaacacctggccctttgcggaagccaaaaaggaggcgtggcgactgctcaatgtgaaaaagggcggacttggacagacgagaagcgccgttgtgggcggtatatccatgtgcgaaaagctgcagtgcgccaagactgttggctacggcggcaatcccgacgagcgcggagatacatccctggatgccttgcttatggatggaggcaccatggaggtgggtgctgtgggcgatctgcgacggatcagaagtgccatcaaggtggcgcaacatgtcttggaacacacgcttcacaccctgctagttggcgatggggccgatgagttcgccaatgccatgggattgcagtacgaatcactaaactctgaggacaacatagagtcattgaaaaattggacgaggcacaactgccagccaaacttttggcgaaatgtccacccggatccgaggacctcctgcggtccctaccagcccttggtcacatgggatccgaatgccaagcaatcggatcggatcgaaattggtcccgataaccacgacaccatcaccatggccgccatcgatgaggagggtcacatccatgtgggcacctccaccaacggactacgctacacgctgcccggacgtgttggcgacgcctcgattcccggctccgctgcctatgcggataacgaagtgggcgccgctgttaccactggagatggagacatccttatgcgcttcctgccctctctcctggcggtggaggccatgcgggcgggcaaaacaccggcggaggcagtcgagttggtcatccagcgaatccagaagcacgtaaagtatttcgaagtcgccgttatcgttgcaaaccggcttggaacgtacgcagtcaggtgccatggtactggcatggccagggataatggaaagtttgcctatatggtcagtagtccgggacaaccggtgcgcacggaatcggttgagtgctcagcgaatcctgagaaatctccttccgaagacgatagacaagttatttggtaa

SEQ ID NO: 22038 - protein, 341 aa, DROSOPHILA
MVINTWPFAEAKKEAWRLLNVKKGGLGQTRSAVVGGISMCEKLQCAKTVGYGGNPDERGDTSLDALLMDGGTMEVGAVGDLRRIRSAIKVAQHVLEHTLHTLLVGDGADEFANAMGLQYESLNSEDNIESLKNWTRHNCQPNFWRNVHPDPRTSCGPYQPLVTWDPNAKQSDRIEIGPDNHDTITMAAIDEEGHIHVGTSTNGLRYTLPGRVGDASIPGSAAYADNEVGAAVTTGDGDILMRFLPSLLAVEAMRAGKTPAEAVELVIQRIQKHVKYFEVAVIVANRLGTYAVRCHGTGMARDNGKFAYMVSSPGQPVRTESVECSANPEKSPSEDDRQVIW

SEQ ID NO: 22039 - DNA, 2825 bp, DROSOPHILA
tgcacctatggagccagttacgtgaccatcagctatggagctgtgtggcgccaacagccgcagttcacccacgtttcatcggatctcattacgcatccggagtacgataccggtaaccggtaacgcatccggagtacgataccggtaacttgcacaacgacatcgccctgatccgcactccccacgtggacttctggtcgctggtcaacaaggtggagctgcccagatacgacgatcgttacaacaacttctatggctggtgggccctgctctccggttggggctcttcctctgatagcagcgggatgaccgactacctcaactgcgtggacatccaaatatcggacaacagtgtctgcctggactactacggcagccactatatcacctccaaccacctgtgctatgccactcccgagaataagggctcctgcagcggcgactctggcggaccactcgtcctccacgacggcaatcgtcaggtgggcattgtctccttcggctccgccgcgggatgcctgtccaacagccccaaaggattgacccgagtgaccggttacttggactggatccgcgaccatactggcatttcttactaataaagttcgctattttgagaaattaaacgaataaaaaagttcacttaaatcctttgttaatctttagctatcatagctacattatattttgccgtagctatgactaatcccaagatagataggtagattacaaacacatacggtgatttggtttctgtaccattttaaactacttccttaagctaactaaactatatcctctggaagaagagtccaagacttctttaaaaaatcgatttggttttgaaactaagtttcaccaaaaggagtttattctattaatatatatcgattagtatattacagataacaactaatactgcatttaacatgacccttaattaggcgctcaaatctaagcttatcatagcttatctattaagatcacactttcaggaggttgcaatatattttcattattttattaaaacatctttttaataagagatgccagtgttgtcgcggatccagtccaggtagctggtgacgcgcaccatacccttgggaccgttggagaggcagccggcggaggagccgaaggacacaatgcccacctggcggttgccgtcgtggatgaccagtgggccaccggagtcgccgctgcaggtgcccttgttctcgggagtggggatgcagattaggtcgccggagaagctgccgtagtagttctcgcacacggagttttcgccaatctggacatcgacgcagttcaggtactcggagacaccgccctcatcggaggtcttgccccatccggagaccagagcccaccagccttggtagttgttgtagcgatcgtcgtacctggggagctccaccttgttgaccagcgaccagaagtctacgtggggagtgcgaatgagggagatgtctccagatccgtgctcaatgaagtcgctacgtcccacccagtgggtgtactgtgcctgcaggcgccagagggctccgtagtagatggtcaccgattccatgccatcggtacaatgcttggcggtcatcacccaggtgttgccgataatggaaccgccgcaccaggtgcctccaccgttcttgctgaagcccaaaccgacaatgtagggcaccttgccttcgtaggcaggatatcccatggtgatcctaccttcgatcgaggccttgcccacgggcacatccttccagaaaaccggcttctcgaacgccgtggcggaggcaatcacccccaaaagtaggaccgctagcaccttcatgttccttaagttcagcacacttaataaacgcaaacaaacacagtcgccacatttatagcttcattttcaaccggaaacgaaataatccgctgggaaagtaatttacaactctcagataaccacggttcttttgtttttgtgtgcggagttagccaacttgacgaaatcttttgaatggaaattggcactttcgataagatttaaatgtggacattatcaaaggaggcttgtcaaatttgaatttattataacaataaaatatatttgctttattatactaaacgagaatatactttgttttatgttacaaaacaaatgaacacatttacgttccacttttgaactctttgataaataaaccaatagcagcctttctttttatcaaaaagaaaacatttacactacttgaatgcaacggctgcttacaagcagtgctaccactctggcagtaagcgaatgcaccaacccattagtccgtgtcacatttccttttcgcacagttgttttttttttagtgaaaaaaaagtttcggacataatcattaggcagcatacatttcatctgccaaagcccattagattcggtttcatgctattgaatacgctttattaaatgtgccacttattttgaatattccgcaaaaataggtaatcgatagctgttcatttatccgaaactatcggttttggctgaacccaagtacactacctatcgatacaattgtgactggttgaaccagctctaatccaagctgtttattttacaaaaagaacacaaaagttataattctgtcatttaattgtctgcaaaataggactttccagcatcattgcatgtagttaaatccagatttctgaaaaaccttatttggcagcgatatgtttagccaaaaaataggaatttgcggataaattaccccccggagtgacaaagatctgtattgtcatacagacgcctgcagaaaaaagggttttacaagaagaaaatgcgctattttgca

SEQ ID NO: 22040 - DNA, 825 bp, DROSOPHILA
atgaaggtgctagcggtcctacttttgggggtgattgcctccgccacggcgttcgagaagccggttttctggaaggatgtgcccgtgggcaaggcctcgatcgaaggtaggatcaccatgggatatcctgcctacgaaggcaaggtgccctacattgtcggtttgggcttcagcaagaacggtggaggcacctggtgcggcggttccattatcggcaacacctgggtgatgaccgccaagcattgtaccgatggcatggaatcggtgaccatctactacggagccctctggcgcctgcaggcacagtacacccactgggtgggacgtagcgacttcattgagcacggatctggagacatctccctcattcgcactccccacgtagacttctggtcgctggtcaacaaggtggagctccccaggtacgacgatcgctacaacaactaccaaggctggtgggctctggtctccggatggggcaagacctccgatgagggcggtgtctccgagtacctgaactgcgtcgatgtccagattggcgaaaactccgtgtgcgagaactactacggcagcttctccggcgacctaatctgcatccccactcccgagaacaagggcacctgcagcggcgactccggtggcccactggtcatccacgacggcaaccgccaggtgggcattgtgtccttcggctcctccgccggctgcctctccaacggtcccaagggtatggtgcgcgtcaccagctacctggactggatccgcgacaacactggcatctcttattaaaaagatgttttaataaaataatgaaaatatattgca

SEQ ID NO: 22041 - protein, 262 aa, DROSOPHILA
MKVLAVLLLGVIASATAFEKPVFWKDVPVGKASIEGRITMGYPAYEGKVPYIVGLGFSKNGGGTWCGGSIIGNTWVMTAKHCTDGMESVTIYYGALWRLQAQYTHWVGRSDFIEHGSGDISLIRTPHVDFWSLVNKVELPRYDDRYNNYQGWWALVSGWGKTSDEGGVSEYLNCVDVQIGENSVCENYYGSFSGDLICIPTPENKGTCSGDSGGPLVIHDGNRQVGIVSFGSSAGCLSNGPKGMVRVTSYLDWIRDNTGISY

SEQ ID NO: 22042 - DNA, 2669 bp, DROSOPHILA
acatagagtcattgaaaaattggacgaggcacaactgccagccaaacttttggcgaaatgtccacccggatccgaggacctcctgcggtccctaccagcccttggtcacatgggatccgaatgccaagcaatcggatcggatcgaaattggtcccgataaccacgacaccatcaccatggccgccatcgatgaggagggtcacatccatgtgggcacctccaccaacggactacgctacacgctgcccggacgtgttggcgacgcctcgattcccggctccgctgcctatgcggataacgaagtgggcgccgctgttaccactggagatggagacatccttatgcgcttcctgccctctctcctggcggtggaggccatgcgggcgggcaaaacaccggcggaggcagtcgagttggtcatccagcgaatccagaagcacgtaaagtatttcgaagtcgccgttatcgttgcaaaccggcttggaacgtacgcagtcaggtgccatggtactggcatggccagggataatggaaagtttgcctatatggtcagtagtccgggacaaccggtgcgcacggaatcggttgagtgctcagcgaatcctgagaaatctccttccgaagacgatagacaagttatttggtaatgtttactaattttgttagactataaatcttataattgttatgcacttagccattttaaaatgtatctgaaaccaggagtagaagaattacgattagctcctgcataaaagaaaatgtgcctcagattagacctatcggtagattaaaaggctgaataaaagcatgttcattttttgcaaatggcacgcaaacattatctatcatatcatatctgaatatagaaaataataaaagttattatgcttgtatttgttgataactcagttcggtttctttaaaaggctcctgcagtcatgtagaatgaaccatagtttatcaagccgggaaaccaaacatcgctgctcagtccaacatgattcttagtcaaaatgatggcataaccgtacgagttatgaaggaggacgactatccaagagtgaaaaccttcatgacggactactttcactacgacgagcccatgggaatgggtctcgaggagcccattcacctgcagcatgaggaggaagtggataggcaatacctggcggtgatcaggcagggactatccatagtggcactcgacgataacaacgggggactactggttggcattgccgtggcggagacgatggatcccatcgaaatggccaagcagcacaaggaagccgaggaaatggagccaaatgctttgggtcgcagcaggaaatttatagccaaagtggagcgcgaagccaacattttcgaacgcttcggagtctcctcctacctgagtctgctggtcatctccgttcacccctcaatgaggcaaagaggtatcttggtcatactttccaaatgtctctttaaattgggtcgcctgcggggactccgtctgttcatcggcagtggcaccaatcactactcctcccgatcggcgatgaaagcgggatgtgagtgcatccattcggtggcctatgctgactacaaggacgaacagggccgaccgatatataatccaccagcgccccatacccacattcgggtcttggcctcaaaactttaataaattagtacgaattcgcaaaactaagtaacaaataggggtgttttcttatatcgcaagaacctttggacttgacaattgatagagaccgcccaggtgaaaattcatgtccagatggagctaataaagtaataaaatttaagggctctactttattgtgcacagattgtgttgattatgaatttatcaagtacgaagtaagcacttttcactgctatgtaaaccacttgatgattgcaaacggcataagcctcttgtgggctcacaattgtactttttctttaaagtcgtcaaatttatgtttctcgtttcgaaagtgcgttgtattttatttctgtagtgtattgttttgtggtacatatagaaattttgtttgatttgtgtttcccttaaatgatatgctcactaatgtgatcaattttagaaagtacatatgtattatattcgctaagttatatgtattaaataaagcaattagaaaatgtcgaatccaaaattgaattatcttaatttaaaactaactgaaataaccggttggtgctgccagacctttaaagtgtccggtggtatattttctcaatgacaacaacggtcacactgcattctgctcttcaaaaaatatttactagataaaacacttggaattcggcggatttgagtgtagtttttcgactcacgcatctaatgcggcacagtaatgacataaggatcaagtgcaatatattgagtgtgccatttgttatccagtagcgcccctattacagcaggatgcaggatgccacggctccggatccggaacccagcagcaccaacggcaattgctccgttgaacatgacaatcggcaggatcaggatgagaaccacgtaggcgccgagcgggaagcggaggccaacgatgccaactgcaccgtttgtggtgccgccaaggcatcggcgcttttggatctgcgctccaaccatgtaatgcaacgtcgcctaagtcgcgactggaagattcatg

SEQ ID NO: 22043 - DNA, 669 bp, DROSOPHILA
atgattcttagtcaaaatgatggcataaccgtacgagttatgaaggaggacgactatccaagagtgaaaaccttcatgacggactactttcactacgacgagcccatgggaatgggtctcgaggagcccattcacctgcagcatgaggaggaagtggataggcaatacctggcggtgatcaggcagggactatccatagtggcactcgacgataacaacgggggactactggttggcattgccgtggcggagacgatggatcccatcgaaatggccaagcagcacaaggaagccgaggaaatggagccaaatgctttgggtcgcagcaggaaatttatagccaaagtggagcgcgaagccaacattttcgaacgcttcggagtctcctcctacctgagtctgctggtcatctccgttcacccctcaatgaggcaaagaggtatcttggtcatactttccaaatgtctctttaaattgggtcgcctgcggggactccgtctgttcatcggcagtggcaccaatcactactcctcccgatcggcgatgaaagcgggatgtgagtgcatccattcggtggcctatgctgactacaaggacgaacagggccgaccgatatataatccaccagcgccccatacccacattcgggtcttggcctcaaaactttaa

SEQ ID NO: 22044 - protein, 222 aa, DROSOPHILA
MILSQNDGITVRVMKEDDYPRVKTFMTDYFHYDEPMGMGLEEPIHLQHEEEVDRQYLAVIRQGLSIVALDDNNGGLLVGIAVAETMDPIEMAKQHKEAEEMEPNALGRSRKFIAKVEREANIFERFGVSSYLSLLVISVHPSMRQRGILVILSKCLFKLGRLRGLRLFIGSGTNHYSSRSAMKAGCECIHSVAYADYKDEQGRPIYNPPAPHTHIRVLASKL

SEQ ID NO: 22045 - DNA, 3186 bp, DROSOPHILA
actcggggctagtacggacagtggcaccgtagtagatggtcacggaggcggcactatattggaaatactctcattagacctggtcttgaaggacggaaaatgcacttacccgtcggtacagtgagcagcagtcagcacccactcgtttccgatgatggagccaccgcaccaccaactgccagcagagctggagaaactaagtcccacctggtaggggaactggccggcaacggcgtccttgccgttggtgatgcgaccggtgatggatggggtcgagaccctgtcacggggatgtacaggggcaatattgggcaggagcccagcggaggcggaggccagagccagaaccaaaactacgaaaaccttcatgctgatggttgctcaaactatgagtgattttccctttccaacacggcctcttttatacccagactgagaaatcttatctgcatagatggctgggcaagtccacttaaatgttctgattaagtgtcgcaaaaatttttttaagtttattatatggcgcttttgtaaaatttttctatttgataagatattaatgtagctactggcatttatttcttcatcacaaattagggactttcaaattgtgcgaataaaagataattactttggtagcattaccacttttgtgcttttgttttgctagttgggatttgcttggttaaaaacaattatttattacttatcaatatttctttatcttaactgcctatttacgttgtaacttaaagagtaagccataaagaataggactttataaaaagattccaaagcaaacatttgcttttattttatttaattcttggtaaattggaagcaatattgccataatgatgtaaggtacagtggttttaagacctttttaagcctatttaatggttaaagatttacaattctgttgtttcgctgctgatttcaaagacaatataaaatgatccttaataccagaaattgctcactctttaaagtgtattcgatccagatgaaggtttttgctgtcttggtcttggcaattgccacagtttctgctgatatcctgcgccaggacactccagtacatccccgtgatagctcagctgttccgtccatagatggtcgcattaccaatggaaacaaggcagctgctaaccagtttccctaccaggtgggactcagttttaaaagctcggctggcagttggtggtgcggtggttcaataatagcgaatacatgggtactaactgctgctcattgcaccaaagggtgagtaatttttttaaaaaatcgataatcgatttaagatttattctgttagagcctcttccgtgaccatctactatgggtccaccgttcgcactagtgccaaactgaagaaaaaggtctccagctccaagtttgtgcagcatgccggctacaatgcggctactttgcgcaacgacatctccctgatcaagactccatccgtcacttttacggtttccataaataagattgccctgcccgccatcgccagcagctactccacctacgccggacagactgcagtggcttccggatggggcaggacctccgattccagcattgccgtcgccacgaaccttcaatacgcacaatttcaggtcattaccaatgctgtgtgtcagaagacctttgggtcatctgtggtcaccagtggagttatctgcgtggagtccatcaacaagaagtcgacctgtcagggcgattctggcggtccgttggctttgaacaatagactaattggtgtgacctcgtttgtgtcctccaagggatgtgagaaaaatgcgcctgctggtttcacccgcgtcaccagctatctggattggatcaagaaccagtccggtgtgttttattagccgtaaagccacgcagtccagttttcatattcctaaaaagcattgcctatttttgagcggctataggaatgaacccaacagcgcaatctgaattgtaactgattatgttttttatgttggacatacccttatctttttcttatctaaaacaaatattttgagtattaattacgtaataaggaacctttttattcattccatacaagaaaataccaagaattttagaacgtttttttattattgttaaaaatattagaaaatggccttgatccagcccacatcctgcccaacctggcagccatcgggtgagccaaatgaagcaccaccagccgctctccgtaccgacgaagcttagtcccacctggtaggggaaattagagtttaaatggttttttttctacaagaaatctactaactacgtttaccttcccgtgtcaaacgattaagtttccgaaactggttggcttatcaagcagaaagctaaaatccgtatcaataaaaatctgtattagttatcaattggattgtaaattttcaagtgggtaatacccgaaattaatgttaccttatcttgggcaaatacaaagcgattaattttgggaattttcacttggacttagatttgcttgatataatataaaatgaacgttaagcttaataatatctacacaccttaaaatgtgattttaaatttttcacaatgaaataaaatgagtacgattattattatgttaagaaaatctatttgctatatacaagttacactattctatgaattgtttttcaaacttctataatacagtattgcctagactgatatttcttgtgttctccatttgcaaacggaaatggccgccgagcacttcagtattgtttgacttccatccaatggcggccgcatcatcgaacttttgtttgctttttgttcaatttttattagataccatttgtttgcgtgccttgactgttttgctacttgagccgaagctccaaggttcgagctctgtttttatgtttatgcggaaatctgcagaaattgtgtcaatatcaataaaattagattagtatcgacgaggacgacgccgacaaacaagcaaccgaagtgtggcaggcaacaaataaagtcccttccccttagcctgcctcccacttccttccctaagccaatttcatgtgttgtgggctgcttccgttttcgagctcacttccggcccacttcctttggttgtgtgtgagtgggtgtgtatgtgacaactgtttaaatgccttgaaattgttgcaattttgatccgtcccaattggataaagt

SEQ ID NO: 22046 - DNA, 846 bp, DROSOPHILA
atccagatgaaggtttttgctgtcttggtcttggcaattgccacagtttctgctgatatcctgcgccaggacactccagtacatccccgtgatagctcagctgttccgtccatagatggtcgcattaccaatggaaacaaggcagctgctaaccagtttccctaccaggtgggactcagttttaaaagctcggctggcagttggtggtgcggtggttcaataatagcgaatacatgggtactaactgctgctcattgcaccaaaggagcctcttccgtgaccatctactatgggtccaccgttcgcactagtgccaaactgaagaaaaaggtctccagctccaagtttgtgcagcatgccggctacaatgcggctactttgcgcaacgacatctccctgatcaagactccatccgtcacttttacggtttccataaataagattgccctgcccgccatcgccagcagctactccacctacgccggacagactgcagtggcttccggatggggcaggacctccgattccagcattgccgtcgccacgaaccttcaatacgcacaatttcaggtcattaccaatgctgtgtgtcagaagacctttgggtcatctgtggtcaccagtggagttatctgcgtggagtccatcaacaagaagtcgacctgtcagggcgattctggcggtccgttggctttgaacaatagactaattggtgtgacctcgtttgtgtcctccaagggatgtgagaaaaatgcgcctgctggtttcacccgcgtcaccagctatctggattggatcaagaaccagtccgcccacatcctgcccaacctggcagccatcgggtga

SEQ ID NO: 22047 - protein, 279 aa, DROSOPHILA
MKVFAVLVLAIATVSADILRQDTPVHPRDSSAVPSIDGRITNGNKAAANQFPYQVGLSFKSSAGSWWCGGSIIANTWVLTAAHCTKGASSVTIYYGSTVRTSAKLKKKVSSSKFVQHAGYNAATLRNDISLIKTPSVTFTVSINKIALPAIASSYSTYAGQTAVASGWGRTSDSSIAVATNLQYAQFQVITNAVCQKTFGSSVVTSGVICVESINKKSTCQGDSGGPLALNNRLIGVTSFVSSKGCEKNAPAGFTRVTSYLDWIKNQSAHILPNLAAIG

SEQ ID NO: 22048 - DNA, 3396 bp, DROSOPHILA
tttaaaagtttgtgcattttcggatcaaagatagatttttttggttctttaatgtgtagttttcgcctttaagttggtattttttcaattaactgccactcccacaccatttccgcccatacccacacacatttatccacatgtaggtcaaaaatggcagagcacaagcaaaagcgttgcataccttcgggctgtcaatttatttttcgcgcttcgcatgttcttgggccatgtttttccgattctcccgcgcctgtttttgcgtccttgaaatttatgccttcgacgcaggcaaagcgccaagtgttgagaacatcggagataggcacaagtgccacatggcatgtaatgcgctcattatgctgctgtacctacacgaatatatatatatatgtatatgtatctacatatagatggatgccacatgcaaaggatgcctaccgcctttcgcccttggaactgggccaatgtgaacggcattgtcttttgggtcgcctccgccggagagataataacaacaaattattacacttgccgagggaccgttatagtggagcaatgggatggggagcagaggtctttactggggtaactaaattaagcatatcgttgataacctaacgcagatcggacggcatgcgataaggcatagtcctttatcctggctggctctttgccagctcgtgctgtgggttgaaactgggtgggtggccttcatctctgcactgtgaaaaatatttggagattctgtttgcaattcaaacagaataaatataacatgcaatcatttcagttgagagctaatgtaaccttaatatttatttataactataactatcacagttatacaaaaagttcccgtgatcaagaaagtttccgaaaacgattcagttaagaaggttctgccctatttgttaaaaaaaagaaacacaattttatcgtagaccaaacacatagcaaaattttaaatacacaatacaaaattttccatacaaatacaatgcagaagcgtaaacgccgcttcctaaaaaaagggcagaacttgatgatgctgcggacgcttcgattggaaaaagccaaaaaggctgagctccagaaagagctgactatttacaatgctttaaccaaatgtaaattaacctcctcggaagttgttcccgacgtcaataagttacttaagagcaatacgataggaaacctggtggagtcccttggccacggaaataagaacaaaattcgagccgacgccgcagatgctttagctcatatagccagtggctcatcggagcactcaaatttagtgggttttatattattttctaggctattgctattattcctattatattgtaattaaactcttgcagattgcgaaggctggcgccgtgccacgattgattcgccttcttcagtcacccgatcctgaagtctgcgaaaagggtatattgagtttggggaatctcttgcactttgctccgaacctccgtgactatatcataagacacggacttatgcaaaagctgatgtctattattcaggataaaagcacttgcactttaatgttgagtcatgtaacctgggttctaagaaaactgtgcataagctctcaaccatcgccacctgataatgcagctgagatcattcaggcattgaacatagtattgtacaacccagaggccaacgttttagaggacgcacttatggcagtgcgtaatttggcccatggaaatgaaacgattcaaatgttacttgattttgaagttgtacccaggatcatatacttgctggagcatccgaacgttacggttcagaacgccgcactgcaagccctaataaatatagcaactggatccgaagagcagattcaagagttgcttaacaataaccttttgccccatttatcggctctgatgtccaatagtgatccagatattcgctgtcaagttcttaagcttttgctaaacatcgctgacggaaatatattccaaaggcacgccattatgaatgcaggtctcctgcataaaatactggagtgcttaaaagctgatgcgatttcattaaaatctgcagctgccttgacaatcaccacgttggccatcgataaggacaagaatctcctgtgctatcttatgagacagggagtaattccagagttctgcaatttactcttctgccaggaaagagacatcttatctaatgtgctcgatatactgagcactatgctagatgtggatccatctttctcggcagaggtgtccggcatcatcgaatggagtggagctttaaataatatcaggatgctccaaagcagcgaacatgaggaaatcgcagctgtggcacgtaaaatcattggtaactactttcccgccaaaccacacatcgcaactaaattctaatgtgcttttatatgaagtaacattaatcatacctttgtacttttccatccaaattccagaactttttctatataaagcgattttatattgagtgaatataaaatgatttgaagaacactctctcttagtacggccatggccttgaaaagagatgcttaaatactggccgcaaaagaatcgtttttatatgtatgtgtctgtatttttgtgtaggtcctgcatcaattgaacttccgcatgaaaaacaagtttcgtgcgaaagccagattattgcaatcataaatttttatgattttcccattggttgcagctcgaggcaagagtgtggaaagtgtgggcggtaaaagcgttccgtgttgcgtgggcagcgtgggaaaagtgctggcataccgcaccgaattttatgtgtatttaatagccttgcagatatgatgcagaaagttattatacccagcacggccgagtcctcccattccccaagcaatgctgtaggaaaccgataaagaaggggaaaataagctatatatacttatacattttcccatatcagcggcctgagtttgtgttttttcgacggccattaaaatgaaatttaatataaacttagcgccaaatgacgagggccgtaaaaagcatattgacattgccacaagatcaagccatcccatccatcaatcaatcaatcaggcctgacaccagctgtggcagccgcaaaaatgtatccacaggactctggtggcaggtagaggatgatgcaaaaaatgtaatctaatccaattactcaacactggcaaacaagggggaggggggcaagtattcccgaccgggcgctaatggacgagtccccaaacatgtcgcatatcacatgtctacaggaaagttaaataaccgagggcaatcgcaaagtatcaatagccaagaagaaagagtgcggatatggccaaagccacagggccatttacatcatcaaccccaactaaccaaacgaatgcgtttgatt

SEQ ID NO: 22049 - DNA, 1329 bp, DROSOPHILA
atgcagaagcgtaaacgccgcttcctaaaaaaagggcagaacttgatgatgctgcggacgcttcgattggaaaaagccaaaaaggctgagctccagaaagagctgactatttacaatgctttaaccaaatgtaaattaacctcctcggaagttgttcccgacgtcaataagttacttaagagcaatacgataggaaacctggtggagtcccttggccacggaaataagaacaaaattcgagccgacgccgcagatgctttagctcatatagccagtggctcatcggagcactcaaatttaattgcgaaggctggcgccgtgccacgattgattcgccttcttcagtcacccgatcctgaagtctgcgaaaagggtatattgagtttggggaatctcttgcactttgctccgaacctccgtgactatatcataagacacggacttatgcaaaagctgatgtctattattcaggataaaagcacttgcactttaatgttgagtcatgtaacctgggttctaagaaaactgtgcataagctctcaaccatcgccacctgataatgcagctgagatcattcaggcattgaacatagtattgtacaacccagaggccaacgttttagaggacgcacttatggcagtgcgtaatttggcccatggaaatgaaacgattcaaatgttacttgattttgaagttgtacccaggatcatatacttgctggagcatccgaacgttacggttcagaacgccgcactgcaagccctaataaatatagcaactggatccgaagagcagattcaagagttgcttaacaataaccttttgccccatttatcggctctgatgtccaatagtgatccagatattcgctgtcaagttcttaagcttttgctaaacatcgctgacggaaatatattccaaaggcacgccattatgaatgcaggtctcctgcataaaatactggagtgcttaaaagctgatgcgatttcattaaaatctgcagctgccttgacaatcaccacgttggccatcgataaggacaagaatctcctgtgctatcttatgagacagggagtaattccagagttctgcaatttactcttctgccaggaaagagacatcttatctaatgtgctcgatatactgagcactatgctagatgtggatccatctttctcggcagaggtgtccggcatcatcgaatggagtggagctttaaataatatcaggatgctccaaagcagcgaacatgaggaaatcgcagctgtggcacgtaaaatcattggtaactactttcccgccaaaccacacatcgcaactaaattctaa

SEQ ID NO: 22050 - protein, 442 aa, DROSOPHILA
MQKRKRRFLKKGQNLMMLRTLRLEKAKKAELQKELTIYNALTKCKLTSSEVVPDVNKLLKSNTIGNLVESLGHGNKNKIRADAADALAHIASGSSEHSNLIAKAGAVPRLIRLLQSPDPEVCEKGILSLGNLLHFAPNLRDYIIRHGLMQKLMSIIQDKSTCTLMLSHVTWVLRKLCISSQPSPPDNAAEIIQALNIVLYNPEANVLEDALMAVRNLAHGNETIQMLLDFEVVPRIIYLLEHPNVTVQNAALQALINIATGSEEQIQELLNNNLLPHLSALMSNSDPDIRCQVLKLLLNIADGNIFQRHAIMNAGLLHKILECLKADAISLKSAAALTITTLAIDKDKNLLCYLMRQGVIPEFCNLLFCQERDILSNVLDILSTMLDVDPSFSAEVSGIIEWSGALNNIRMLQSSEHEEIAAVARKIIGNYFPAKPHIATKF

SEQ ID NO: 22051 - DNA, 10170 bp, DROSOPHILA
gcgccaccccctgcaaccaaacaaccacccaagccacccactggggggactcaacttgttgaggagtgacagacccactcacttgcccgctcgtccgctcaccaactcactcactcgcacaccgaatgaatgaatgactgactgactgactttcctaccctcaaggttcatcgtcagtccgtcagtcactcaaactcgcatttcattccatttccatttcattcactttgcccgctgcccaaaacagccttgtctcgtctttcttttcgctgcttctttttgtttcagtgtagtttccgttggttgtagtaaatttttctcatttcgctttttgttggcgtggtttttatacccggtattaatagagcagacgggtatactgcattgtatcgacataaggggaatgacatttttaactctaaaggtttcctaaatttattccattactaatataacattttttttctgaataatgtgaaataacgttttctaaatagcgatatggtgtttaaacgcctggaagtaggcagcactttaccaggtatctcaaagtcgacttgtctcactttccggtttctacttctatttgcgctgttgctgttttgagtgttccactgcttgtgtgtgtttgtgtgtatgagtgctttgagtacgtcaaatgaagaaaaaccaactcacacaggcacagcgaatgagagaggcatagaatgaactagcggtaaatgcatgaacaacgccggcttgcccgtcatgaaatttgtatttgtatctcagcggctgttgctgccctcgttccctgcctttctgccgctctctctcctttcactctctctccctgttacactcacccccgcccgaccaacacgccgcaccacaccacttcttcttcttcttctgcttctggttccacgctctgctctgcgtctcgtgctcattttccgttgtactttttcgatgcagtcgccccgtggatttcattccctctgcgcacttcgaaccgatcgctcgtatcgctcccgggactcaaaatccgagtacggattcgaattcgaaacgaacccataaccgaaactcaacactcgccggacttcgactgcaattcaaataccatttacgcgctaagttattgaacactcgtgaagggcgcataaagttcttgaaattacgactttagcatattgtgcttgtgtttaaagagcaaagtgtaaacaaatccgaagagttatcttcacatcttaagaaaatgggtcgcctgttccaatacaatcgctttggcgccacggatggcatcaacaaaaacaccagcaaaaaggatactcagcaaaagaacaaaatggtaagattcagatataatgcaagtcttaagacacctaaagtaccgagccccttaaagaacagttatgtattttagttgagatttatgacttttttggtcctttaggcaggctaattataaataaataatagctttcgactacgcaccgcagtattcacatatgttaaagatatacaagcggatgcattaaacatactttagaatcctttcaagttccatgagaaagttcttccgcagtcccaatacctctctataaatatccatgcccttgatgactcaagctgatctctgtagaatctaacagtctatgcacatttcacactccccacacaccatcgaaatacctctttggacaaccacccacgcacacttagcactatctacagtgaactccccgccacgtcgaccggcggaggggcggaaacggggcatggccgtattcaaaacacgaacgacaacaattaaaatgatttagtgtcacagataccacgaacaacagctcggccacacaacgcagatacaacaagaacaacgacagcgcagcataataaactcgactgtcgacgtaaatcagtggaacactaaatcacatagggccaaataaatatgatttgcataaaaactaaatcaaagtatacacatatatatgcaaacagagggcgttcgaatagagggggtggcgatagttggcgacctaagccgagcgtaaatctgaattcaaataaatcaaattgtaaatgcagcctgatttctggcgataagtagaacaaacagcaacgttgcccgattcgggaattgaaatcaaaacatatgttggcctcataaagatagtgattgatttgatttgacaaaatgcatttctatatgcaaacaaggcgcatatgttatttgtttttgattccagataagcgctaactaggctttatcgtctagccgcgatgcccgaaaggcgataggccctatggcgatagcttaattaagacaaactgccttttcagctacctgaatgcaaagtcaactttccttcaagaccgcagctactttgcttcactaatctgcttatttgacttggcatccgtagttgctgcacacacactcacagatacaatagcattcgtaacaatgctccgacatctgagcagcatttatcaaaatatttgtttaaaagaaccacgacgaggagagtagagagagaaaagtttgtaattttaaactgaatgacagtttgcgttttgcccccgcctccttttatgccgacctttgcatttttcatccagtcatttttcactggaattgacacccatcgccttctgtatctcgtctcttcggattctctttgttttgatctatgaaaatctatcttcttcgtctcgcattcaattttaggtgtaggtgttggttgttttggctcccaaaaggattgtcttttgaaacgggaagtctgggtgtggccgcaacgggagttgttttaccaagaagactcgaggcccacaaaagactttttcaagctgaaaagtgcaggaatgcgccctcttatatcccttagatctccgagtataaatcgctcgacacctccccgaaaaccccaccgcatccgttatcaaaatctattaccagacacactctgtttacagagccaactggctgtgctgacaaacgatttcaattagccggttcgcaacagataaaagacatctcgcgtatctagcgcgggtcaaagatacaaaacaggaatcgtcacgaactgcagcaccgacaaattcacatatcgagagggaccagaactaataaaattgtcacacaactgtcgactctgtcggagttgaccatatgccgtatgtttgggtggaactgcaaccatattgctagattaaaatcggagacaattaagtcgaagatgataaaatcgactttgcagcgggtttattaaactgaactgcgctcgaaagtgtttatgaacaagagattattcgttggataagtatttgattacatttcattaggcaggcactttttaattaattaatcaaagggaaactttttccaagtcatttcatattccgcttcaagtataacgaaaatttatcagagcagtatcatggacccatcttcatctaatataattaaacaaaaaaaaatatttaaatagaaaaaaagcagcattaattacacaaataatagtagacagacatttgttaattaattttattatttaagcctaatgatgctttaaaattttttgttaaatattcatcagcagctaatcgtttataattaatttgggcatgcaaataccacagtttatgcatttggaaaattcgaaaatcagcttccgcataaactttcctgaacagacaatggtttcaagcgatttgtgctggggaaatcgggctgaaagcattttcctcctcgtgtggcttatgatgccatgctctggtgccttcaacgccctgcctaagtggatttcctcgactgccgagatcccgtgatgggcctcataattctcgatgagatgcagctaaaattaaatcaactgctggcgacgattagcagcaatgagctgaggcatttaaattctaaggcattttaatgcacttttcccgaagaactcgcctctggactgcctttcaagggcagtgattaatgtttatttggatgctcgtgttctacatatgtatttacatgcagactctttgatttttcgggggcccctggagaggaaatgctaaggatagaaaattaattgcatcgcttttaagtgcatttaattaggaatttcgaagcagacgccttgttcacaatgccccaagatttattggggaaactgcaatctgcaggctgcgcaaattgatgagcataattaaatagccggcgactgcattcgacttgcatgcattgtaatttatgctccatattttgcccaactaccgaatggtcccgtcgctttgagtaaacaacaatttcacttattttcatgccgtctgccgcctcgaccatcaactgtctgcattgttatttttacgctcgactcaatataaattttcgcttctcttcgttttgctcgccacatgccacgccatgaaaatgtaatgcaaatatgcaaaaaagctttcaacggtatccgaaccgcccaacccaactcaatacctcttctttttcagctcctagccccatgttccccctccctgatccaaccaaactccgctggctacaaatagtttttggttttggcttagtctggccatcagccggcaacagagaacggagtactgagtaccgagtaccgagtagctagccaacatcatcgttatcaccagtccgttgtccgtgtttgagtttcatatggcttcccaccaaggatttgtgtgcattagacgactagactcggggaaaactatttgcaagcccagttactagactttccacacacacaagagccgacgtattggagttgtagaaaaagttgtcagagtctctaattaaattgttcaccatctctcaaagtgataaagtccaagagttcattgcctgcctatgctcttcaaaaaatataaagaacatgagattcatctcttgaaaaacccacgcagcagagaagcagccccaaagcgatgtgcccataaaacgcaattaaaatttcaacaattttcatttgcatttaataaacccatcaaaatggtttttaaacacgcataaaacaaacggctgaaaagaaacagcttaattcgattcacatttcaataaatttttatatgacccaattttttacacctataaaaatgccacagaaaaaaagatacaaagggaggcccataaaaaagccaatgccacacgccacatgtgtctaagcaaaggattttccagccaaaggcaaagataattgtaataaaaaatttacaaaacataccaaaaagctgaaactataaacatttttcctggcatactaaactaaattagtgagaaaatcattttacgagtcccaaaaacgaactcgtttaaccaactaaatgaaaaaccaactcactgaaaaaccgaatttgttcgttcatagatgatggggggagttgggggagatatgtgtgcgggacgtgttttaaaaaatgtcataaactactcgtaagtccatgtatctctgacattttgaaagccccgacacgtgtgtccgtgctgggatcactttgagattcttttggtgtggcataaaactgtcaaattagctggaactaaaagcgagatgactacagagtattcaaaaacgcacgactaatggcccggagccaaatgaaatattactaatttcgataggaaaatgtcttaaggaattttcgaaaatttcattgatacacttggtgcagcatttttggaatgggtggtatttttaagggggatggcaactggaatgggaggagttttgttttggcagcacagctgctttggcaattgcccaatttgtgagcggataagtagccggttagtcggttattgcggttgcaatttaaaagccaccagtttgccagtgaaaaccacttccgaaggtggaaagttgtgggctgcttgagtggcagggtggttttgttttgtttaagacccttcagcagctgcttgattttccacagccagctcaaaaattcaggcatatgtcggtgggacctcgagtggcgcacaaaggaaacatttcaataaattcatcgactcactccgggcacttcaactaatttctgtaccccctctatctaaatgcacaataaatgaaaatttaacaactgtttttataagacgcgcagggcgaagaccaaagggtcctctacctaccttcttgtccgtcagctgtcgaaggtgcctcgattcggttacctgagtttttattgtaacacattttgattacgaaaatatgctaacacctcgcaggccaaacaaaagagctctttgaccaagaatggaatggaaagccggcccggggcgctgtttcatcatcaattagagctcaacctttccgcaggccaggatcggaatataaaaccaattgggtcgaggaggggatagacctatgattattgcattagcacgaacaccatcaaaccatcaaagatgaacagggccagcacgccaacacctttgagccactactgtgtgctggattttatttcgatcccaattttctttgggatctattatcattgaaattaccgcagtgttcccctttcttttgcttgactcggacttgccttgcataaattaaaactcatgtagctggcaagaatcgtagccattaaacgcttgttggcccattgtgtttgatttaagccgataaaaggtacacttttgaggcatttcacgccgcttttaccccacagccgaaaaaaaaaacaactttcaacagatttatgcgctgcgtggccacatcaaagaaaactcttttggccatggctcgttggccaggaattaatggtcaactggccaagatgtagcaacagtttttgggggcctcttcatgtttgttcacatataaacaagatattggaaatgcaaatcaatggcgatggcctgcaacggaagttctatgtctgcacttcctttgtttgcgttcccaaacctctaatttattgaatgtgtggaattataaagcaccccagccacttccaatcgaattccaatcgaatttcaacttcgagctctacctggtcgtcggatttccattgtgtcctgcactccttttcaatcgattgctcattactttgccatttttccttcgagtggtgtgtgcgtgccgaagggtgcaatgaattttcggttcacaatgcacaaaaacgaggggtgcatctgaagggagaagaatgttattgcacttggaattacgggaaagctaaagaggtcgaggtggtggcatccaaatccataatcattctttcgattcagtggacattataagccatcttcatactcagacttgcacttagtttctttaccaggaattactctattgatagtctagatatcaagaccttaactgacaagcaatcaaaacggttatcatttacctcaaacaaacaccgactaaagtgttgagttctcccacgtaaaggtgagaactatttaaacatttttaaagccaaagtaggtgttgaaaaaaaggaacccactagcaaccctccgcaggcgctgcatatgaatattttataagcgaaatgaaaggcaaatacgagcagggaaaacaacggactggcaaattgtacaacaatgaacaagtagagcaagcgcattacaaggatatcacagcagcagtgacccaaaagcattagcaaagcagtcatggggttttcagaagggaatgggaacgaaaataggactgagaaggggattggcctaacaaaggcgaaaacagaacaaagccgggataatgggatggcagtgtgtgttatctgcgcggttgttgcataagagcgtccttcgagtgaaatgggaaactccgacgtagataagatttatagggacagtccaaacactttttctacaaatttcctgaccataactaacaaaaaaaaatccatcttgtttgttctcgcccgacagctacgcaatgccatcaaatgtcctggctactcggacatctatggtcagtacaataaggactcgtccttcgagaagtgcgatgaatggagcaacaagctgcaattcccagccgccggagaaatggataaacaggaaccgatccagagtcgcacgcacaaggtctacgacagcatgaagagttttctgcagcgcaaactcttcgcgcaaccctcgcataaagagcagatcttaaacgaagaacccacaagcgactatgatgaggtgtgtattgtttatggtgcatttatattaagaactggtctataattagcaaactaggaatcccattttatctttgaaaaataatattttaatatgcggaaccattttcggctaaatattgtggttaaccgaaaaaaggttttcataagtgatatcaagaccagaagaaccctttcttttgaatggtattttaattggcttttctcctttcttttagcaggaccttctcgactcctcgtaccacgccgacgcggaagaagaggaggaggaacgcgatgcggactgcagctgcagctccaccggcagtagcagcaccagcagcagcagcccaaccacgccgaaacgatcaccccaaaagtccctgctgtccctcaactgctggcagagcagtcagccaagcagtgactccaatcccgaagaggagcaggatgaggaggcagaagaggactccgacgctggaatctccgattgctgtcaactcttagctgagaattcccccaacaccatgagcaaacgccgtcgagctgcacctctattcaccagatacatcagcgccaaccagaactccgacgatgatgaggacgaggagccggagctcctggcgtgtccctggtatcagcccaggatcacggccaaggcagctttggagcacctgcagcaggccacacctggaagctttcttctgcgacgcagtacgccgcgacatttcgaactggtcctgcgactcgagaggaacaacaaggtcaagacctatcccgtgcagtccacccggaaccagatgtaccgcctgaagggagccaagaaacagttcaccagcctgaaagcgctgatcacccaccactccgtgatggccgaacaactgccattggtattggatatgcccagggagcgtcatgtggtgaagccctcatcagtgcgctatgcagatgacttcgagccgctggagtccctgcagctactcggcatcctgaggagtctgcaggcgaaaagcattgagatatagaaaataattattaatcggggtttcatggggcgggtcaaataatatcgaactgcaaagggaacgataggtgaaagtaattaggaatttgttttgttctatgcataagtacatgtgatatagtttacggaattgcgggctgagcaaccctcgaatttagttaggcctaccaactaattgaaatattttgtatccgacatagggctaagttttctattgtgaaagtgtaatatgaataaaaatcaaacaatggcattcagcaaaaacgcaaccctcgagtgtttaatgtatccacgccccggcaatcgaggcgcttcctgttctcccccgtccgccaggaaccctcctccatggatgagggttggccagagaacgcttcacttacatgtgattagcgattcgagtggctctcattaatttttcaagtgcggctcgtggagctctcgacgcaattcaaccggcaacatgttgctggcaacattttagtggcatgaataattagagccactatattagctacaacattcagggggattcccttctgcgttgcaaggtgtcgacgtcgcacgcaactgaataacttatgtgcacttagtccgatttttacatggcacttttaatgttttattgttacaaaatcgaattttttcacactctaaaagtgtaattgaaatcaagttttttacatatcagcaaatattatacatgcctttgacattcgatcctttttctacacacgaattctacactccaataaactgtaagcccttaaaagtatgctatggtttcattgcatctccaaattatgatgtatcctaaaagcagatagctgaaagaaaaaaggaataaaatcgcagagaaagaagtaaagaaattcaataaatctgtaattgtcatgggcttaataaaactatttgacaacattacaaacaatccccaatgtcggcacttcgctaaaccatttcctgtttaaccagtgtgaaaaacaacctttttatggcct

SEQ ID NO: 22052 - DNA, 1380 bp, DROSOPHILA
atcgctcgtatcgctcccgggactcaaaatccgagtacggattcgaattcgaaacgaacccataaccgaaactcaacactcgccggacttcgactgcaattcaaataccatttacgcgctaagttattgaacactcgtgaagggcgcataaagttcttgaaattacgactttagcatattgtgcttgtgtttaaagagcaaagtgtaaacaaatccgaagagttatcttcacatcttaagaaaatgggtcgcctgttccaatacaatcgctttggcgccacggatggcatcaacaaaaacaccagcaaaaaggatactcagcaaaagaacaaaatgctacgcaatgccatcaaatgtcctggctactcggacatctatggtcagtacaataaggactcgtccttcgagaagtgcgatgaatggagcaacaagctgcaattcccagccgccggagaaatggataaacaggaaccgatccagagtcgcacgcacaaggtctacgacagcatgaagagttttctgcagcgcaaactcttcgcgcaaccctcgcataaagagcagatcttaaacgaagaacccacaagcgactatgatgaggaccttctcgactcctcgtaccacgccgacgcggaagaagaggaggaggaacgcgatgcggactgcagctgcagctccaccggcagtagcagcaccagcagcagcagcccaaccacgccgaaacgatcaccccaaaagtccctgctgtccctcaactgctggcagagcagtcagccaagcagtgactccaatcccgaagaggagcaggatgaggaggcagaagaggactccgacgctggaatctccgattgctgtcaactcttagctgagaattcccccaacaccatgagcaaacgccgtcgagctgcacctctattcaccagatacatcagcgccaaccagaactccgacgatgatgaggacgaggagccggagctcctggcgtgtccctggtatcagcccaggatcacggccaaggcagctttggagcacctgcagcaggccacacctggaagctttcttctgcgacgcagtacgccgcgacatttcgaactggtcctgcgactcgagaggaacaacaaggtcaagacctatcccgtgcagtccacccggaaccagatgtaccgcctgaagggagccaagaaacagttcaccagcctgaaagcgctgatcacccaccactccgtgatggccgaacaactgccattggtattggatatgcccagggagcgtcatgtggtgaagccctcatcagtgcgctatgcagatgacttcgagccgctggagtccctgcagctactcggcatcctgaggagtctgcaggcgaaaagcattgagatatag

SEQ ID NO: 22053 - protein, 378 aa, DROSOPHILA
MGRLFQYNRFGATDGINKNTSKKDTQQKNKMLRNAIKCPGYSDIYGQYNKDSSFEKCDEWSNKLQFPAAGEMDKQEPIQSRTHKVYDSMKSFLQRKLFAQPSHKEQILNEEPTSDYDEDLLDSSYHADAEEEEEERDADCSCSSTGSSSTSSSSPTTPKRSPQKSLLSLNCWQSSQPSSDSNPEEEQDEEAEEDSDAGISDCCQLLAENSPNTMSKRRRAAPLFTRYISANQNSDDDEDEEPELLACPWYQPRITAKAALEHLQQATPGSFLLRRSTPRHFELVLRLERNNKVKTYPVQSTRNQMYRLKGAKKQFTSLKALITHHSVMAEQLPLVLDMPRERHVVKPSSVRYADDFEPLESLQLLGILRSLQAKSIEI

SEQ ID NO: 22054 - DNA, 3683 bp, DROSOPHILA
tgtactacttcctgatttcatccacaaagctggaggacaagctaagcaaattcgattactacgttaaggtgtaccatgataacctagtggagcacctgaaaatcctcaaatattccaagccactgccaagcctgcgagatatccataagtctctatacaaatacggaacttttggtatgcataactgagcacaataatagaatgtatttaatactagtgtccattattcttcagcatactctgtggccacaggtgtaatggcagccgttctcgtcgatccaacggagagcgccagtttcgaaaactttgttggcgattccgccgagggagcggacttccagatgaaaatgtacaacaatccccgctatcggaagcacatgcaggctatcctgccctggctgctcaaccgaggtgccctggactttaattaggaaagtaatgattccatcatacgactccaacacactccgacttatattcaaaaaaaacctcattatccaactaactcagcttggtgcagcctacgcgtgaagtattgtaaatgtattaaaataaataaatacaagttttttaaaacattaagctgcttttaaaatgtttattgaatagcttatcttaaaaacagcaaatatttacggctgcatacattagtatgtaccaagtactgggaatacaactccaaatttggtcaatcgcgaatacggatactgggatcttttgtgatacgatttgagctctgctaaattacactgctcttcgccccggaatattggtatattagtgtaatatagtttcagcgatgtacacatatgtattatgtttaatttactcaaaactagacaaaaacttgttcgctagataattaactaaagtttactcagaaaagcttgtacggcagacagtgaaaagcccactggttctacgagctgaattaggaaagctccccaaacgatataaaactattgatcctccctgactggcctcagtccactaactgtggaataacggggcgtatacgtgctttctgcttctgagaacaaatcaactattatctacaatggcgtccagtaaaatccccgattgggtaactgcagaaatatttgaagatttgcttaaggcaaatgtggatggatactcaaaaattaagaactttaaggcggacattggatccgctgcaggtgaaaattatgccaccattatgcttcgagtcaaaatcgaagttgagctgcagggtaagttactgcgcctgatgtctaagaaaactgtctcatttgcaaaccttagatggcaaatcgaaatcggtatcctacatggttaagttgccccaccaagtggaggctattcaggagatgatgaaacgaaccaacatcttcgaaatcgagcgtaccatgtataacgaggttgtacctgaactagaggcgctttacaaggcagtaggagtggacatcacattcggcgccaaaaactatgatctcaagaatgccaagacagactacgtggccctggaggatttggggttgaaagggttcaagaatgccaaccgcctcgaagggctggatcaagagcacacggagagggttctgcgaaagctatcccaatggcatgctgcatcagctgtacgagtggccaccaaaggaccctatcccaaaatcctacttcaaggcttctttaaggaggaaagcaggcccgttatgtctgaaatgataaaaggaatgggcgcgaatttcgttaaaagctgcgccacctacgaaggtcatgaggcttatttagacaaagtcgtaagtagtaaatacttcaaacgcccaattagtcgcggaaaatatttaattgttctttcctctatcagaaagcgttacagcctgttgctatagataagatttttgagttcgccaaggtcgagccaacggagttcaacgttctgaaccacggcgattcgtggtcaaacaatataatgtttcagtatgatgcctttggaaagatcaaggaggtgtatttggtcgactaccagctgcccaagtacggaaccgtggcacaggatctgctctacttcttgctctcatccacaaagctggaggataaactggccaaattcgattattatattaaaatttatcacgataatctggtggagcacctgaagattttgaaatactcgaaacccattcctagtctgcgagatattcatttggcgctgttcaaatacggctacttcggtaaggatttgtaaggatgctcttgggaaatagataataattttattacattccccaggctacacggtcgctactggtgtaatgtctgctgttcttttggatcccacggacagtgctagtttggaaaacttcataggtggcagtgacttccagatgcagctctacaacagtccccgttaccgcaaacacatccaagccgtcatgccctggctgttaaatcgtggcgccttggagctctagtgccgccaacgaagtgatttcaatttttcacgataaacaatcgaaattgagtcagaacaatgtggggcactatgatagtgctatcagtatctgtgcgcgataatggcaacgagtataaataaacctttaacaataaaagacttcaaacatttcaccaaacttgtcatgaatttcgcatttttagaaggaatgtggtcatgataatgggaaccaatgtttaaagttaacttaatggctaagtcattcaagtcaatgtagctatattgataacagcttaattatcattagatctacaggtacttcacaaaatatgagaaccagatttcgattaaaaagttcattgccattcagttagaaaataagtatactgggtagtacaatataccatatatggtcacaacaaaccagcgtagcaaaacataacttaaagaacaggctttataagcttttgtggctataacttcttagtactaagagaacacctttttgggcatcaacaaataagcgaatcaaaacaaaacgaatgaagataaccccctcattataacagaagagctatctgcaaaattcggaagagcaaactacacaaccgtataccttataaggcatgtgaacagggtagcaaaacaaaacataaataaaagctatagagcttacctctattaaattgttttatctacttacacacatacgtatgtatgtatatataccttgattttatggcgtactacacagagttataagcttgcaggtggtagtttttatacagcaagcttaattttatttaactattatgaaattgcccaagtaagacacgcaattcgtactacttgtcgttgattatcgcatcggtacacagatgaacggaatacggaccaaaaagattgttaaactttctcgctcagtaacgggttacagatagtctacgaaatcgactaatgcgttatctcttgtcctatatataatcttcaatttcgagaatttttggattattttttaatttgtaatgtcacgcttaaaacgactttatgggctggtttacgccaacttatatgtacgtggataaacttgcaatgtcatattctaattaaagctgtctgtggcgattgagataatatatgtatatctctcccatctcatatcaaaaccaaacctatttaatgaagtgacttgcatagcaagtgctcagtaagtacgatcaagtctagtagaacaactaattaaaaatgc

SEQ ID NO: 22055 - DNA, 1505 bp, DROSOPHILA
aataacggggcgtatacgtgctttctgcttctgagaacaaatcaactattatctacaatggcgtccagtaaaatccccgattgggtaactgcagaaatatttgaagatttgcttaaggcaaatgtggatggatactcaaaaattaagaactttaaggcggacattggatccgctgcaggtgaaaattatgccaccattatgcttcgagtcaaaatcgaagttgagctgcaggatggcaaatcgaaatcggtatcctacatggttaagttgccccaccaagtggaggctattcaggagatgatgaaacgaaccaacatcttcgaaatcgagcgtaccatgtataacgaggttgtacctgaactagaggcgctttacaaggcagtaggagtggacatcacattcggcgccaaaaactatgatctcaagaatgccaagacagactacgtggccctggaggatttggggttgaaagggttcaagaatgccaaccgcctcgaagggctggatcaagagcacacggagagggttctgcgaaagctatcccaatggcatgctgcatcagctgtacgagtggccaccaaaggaccctatcccaaaatcctacttcaaggcttctttaaggaggaaagcaggcccgttatgtctgaaatgataaaaggaatgggcgcgaatttcgttaaaagctgcgccacctacgaaggtcatgaggcttatttagacaaagtcaaagcgttacagcctgttgctatagataagatttttgagttcgccaaggtcgagccaacggagttcaacgttctgaaccacggcgattcgtggtcaaacaatataatgtttcagtatgatgcctttggaaagatcaaggaggtgtatttggtcgactaccagctgcccaagtacggaaccgtggcacaggatctgctctacttcttgctctcatccacaaagctggaggataaactggccaaattcgattattatattaaaatttatcacgataatctggtggagcacctgaagattttgaaatactcgaaacccattcctagtctgcgagatattcatttggcgctgttcaaatacggctacttcggctacacggtcgctactggtgtaatgtctgctgttcttttggatcccacggacagtgctagtttggaaaacttcataggtggcagtgacttccagatgcagctctacaacagtccccgttaccgcaaacacatccaagccgtcatgccctggctgttaaatcgtggcgccttggagctctagtgccgccaacgaagtgatttcaatttttcacgataaacaatcgaaattgagtcagaacaatgtggggcactatgatagtgctatcagtatctgtgcgcgataatggcaacgagtataaataaacctttaacaataaaagacttcaaacatttcaccaaacttgtcatgaatttcgcatttttagaaggaatgtggtcatgataatgggaaccaatgtttaaagttaactt

SEQ ID NO: 22056 - protein, 338 aa, DROSOPHILA
MVKLPHQVEAIQEMMKRTNIFEIERTMYNEVVPELEALYKAVGVDITFGAKNYDLKNAKTDYVALEDLGLKGFKNANRLEGLDQEHTERVLRKLSQWHAASAVRVATKGPYPKILLQGFFKEESRPVMSEMIKGMGANFVKSCATYEGHEAYLDKVKALQPVAIDKIFEFAKVEPTEFNVLNHGDSWSNNIMFQYDAFGKIKEVYLVDYQLPKYGTVAQDLLYFLLSSTKLEDKLAKFDYYIKIYHDNLVEHLKILKYSKPIPSLRDIHLALFKYGYFGYTVATGVMSAVLLDPTDSASLENFIGGSDFQMQLYNSPRYRKHIQAVMPWLLNRGALEL

SEQ ID NO: 22057 - DNA, 3680 bp, DROSOPHILA
tgttggaaaagtagattgcattgcgacaataagaaacaccttcacactttatctgcaagaggttattgttctcagtgtgcaaaatcattgtgatttcctcgatcggaaaatactttgttgtgagcgagatgacagtaagcgaggttctactggttatactggttatgcgtaagtgatgtaacccaattactttattatgcttatctaccaattttctttatttatacttataagccactggtataatcactgaagttcagcgctgtggaagaccgttggaaaatcagctttacaacgacaaaacattcgcggaacaggatgagcatccttggctgggacgtatactcttcagggatggaaatcaatttaccacctgctatcgctgcaccgtcgtactgctcaatccgcgtcgtggcctagcgccagctctctgcgtggatggaaggaccaaagacccttattctagtgtctttggaaggaccatccgcggagctcctttgcatccagacgctatcctggcaggagttcgcctagtaaatggggaaccgagacagtactatattatccggcagctcttggccaaatttgattcggttttttcaggagcagatcttttcatgtacatcgcaccctacattaattggatagaggcgagaatcaacgtattaaacgaacgtcacatttcattaaaaacatatatttaattagttaaaagagtaaatttagaaaccattaagaaactgcataaatacgatttttgctttaactttatttatcaattttaaatgtcttgatccaactgtgataggcattaacgggtctcaacggttaattttattttttattttaaaagttttgtgcaaagaagaaaacaatacatttaaaataggggtagtcaaccttagagctgtcacatcgcagaacaatcgattaaggaattcttatcgatatgtggcgctgctgtgcgacttatcggcggttgcatgagaatggctagcatcaccaaagaagaagaatttccctccaaaatattagtttattttgccaacatcgatctcaaggattgtttacgaggttatgaccaccattctagataactttcaacgcgccgaaaagattggcgagggcacctacggtatagtttacaaagcgcgtagcaactccaccggccaggatgtggccctcaaaaagattcggctagaagggtgcgtaatccaggtggagcaggactgtgatgctgttcatggcaaccataggaaatattatgtgacatatggacatattatccttgacgaatgtcatccacctgcaccccgcagcccgaattatgtgggagctgcgccgtttccgtaatccgtagcaccacatgattcggcttcgtggtacaggatatcatcggtttttgctagcaaacgggtaatcacgattgccagtatttagctttatttaatagcataattccgattcacagcgaaacggagggtgttccttcgacggccattcgagagatctccctgctgaagaaccttaagcacccaaatgtggtccaactatttgacgtagtcatttccggcaacaatctgtacatgatattcgagtacctgaacatggatctaaagaagctgatggataagaaaaaagacgtgttcacccctcagttgataaaggtaagtacactagtttgcagcccattaaaatattttcacattgccactttgcagagctatatgcatcagatattagatgccgtcggcttttgccacacgaatcgtatcctgcatcgcgatctcaagccccagaaccttctcgtagacacggcgggcaaaataaaggtgagactaaaggttttacccgctgttggttctgtgataataacgaattccaactccagttggctgactttggcctagcaagggccttcaacgtgcctatgcgggcgtacacacacgaagtcgtcaccctctggtaccgagctccagagattctgttgggcacgaaattctactccacgggcgtggacatctggagtctaggctgcattttctctgaaatggtagtgttatatggaatgtacattccaagcggatctgattactaaacctagaattacagattatgcgccgctccttgtttcctggagacagcgagatcgatcaactttataggattttccgtaccttaagcacacctgatgaaacaaattggcctggtgtgacgcagctgccagactttaagaccaagttccctagatgggagggaactaacatgccacaacccataaccgaacacgaggcgcacgaactcataatggtgagtgcagaaaatgtacatccccaatggaaatccactactctgtaccttacagtcaatgctgtgctatgatcccaacctgcgcatctcagccaaggacgcactgcagcacgcttacttccgcaatgtgcagcatgttgaccatgtagccctgcctgtagatcccaatgccggcagcgcttcgcgtctaacgcggctcgtctgatcgtgtccaatagccccagatctagcaaattacttgtgttttctagtatagtaagttcgatgtctatctcactatctttaaggcgaaactagtaaaattatttgaatatctaatctattttacagctgccacctcattatcatgcattccccatcctaactcgcacgtaacatacgataaatacacgatcatccataagtaaagagtttatagtttatagcttagcatggattaccaggagctcagccgggcaaggtgtcgttgatgatggcgtggcgaaactttggcggcggaatcgttagcccctgctgcatcgctagcgagtctctggcgctggcgggtgtggctatcgtcgcgcatatacgtgccaagagtattgcgcatgctctcggagagcggtgaatgggcttcgacatcaccatcgtcgtcatcgctagtcggtgcatcgctcggtgcgctgctgtctgtttcctctgctgcatcttcattctcaatgggatgctccggtttgctgacttctaatagcttcgtcaatgattggcccttggccgacaataggggcagtggtcgaagtagggtcacctttctggttccgagtcttctcattacgggcgcctcttcctcatgctcgccttccacatcctctgcctccctaggcggcggaataaaaagctgccgtaaaaattagattggaaatcctgaggactgaagcgctgtactccgtagtagctaccggaattggtgtcgtagaagaacatcggctcggcggaccgcggcggagaaggtggcacaaagtagggatcgtaagggctgtaggcatcatcgttctccgccgagtcgtagctcggtcggcgcttttgttgcttgcggcgctttcgcttgcgttttttggtagcctgtgaggccacttgagctggttcctcaagctgcagctcctgatcttcatcgtaggactgcagataaaccggcgacgtctcgatgatgttcgtactgccatcgttaaagaagttggccaacggattggtcaggttacggaaactgaaagcgggctgaacactgcggacgaagctattccaaacacgaaccaacgggcgttcagttgttgtaggagctgcttttcccagactatgaatatagcgccttctgtatccaccacgagcactcg

SEQ ID NO: 22058 - DNA, 1187 bp, DROSOPHILA
caccaaagaagaagaatttccctccaaaatattagtttattttgccaacatcgatctcaaggattgtttacgaggttatgaccaccattctagataactttcaacgcgccgaaaagattggcgagggcacctacggtatagtttacaaagcgcgtagcaactccaccggccaggatgtggccctcaaaaagattcggctagaaggcgaaacggagggtgttccttcgacggccattcgagagatctccctgctgaagaaccttaagcacccaaatgtggtccaactatttgacgtagtcatttccggcaacaatctgtacatgatattcgagtacctgaacatggatctaaagaagctgatggataagaaaaaagacgtgttcacccctcagttgataaagagctatatgcatcagatattagatgccgtcggcttttgccacacgaatcgtatcctgcatcgcgatctcaagccccagaaccttctcgtagacacggcgggcaaaataaagttggctgactttggcctagcaagggccttcaacgtgcctatgcgggcgtacacacacgaagtcgtcaccctctggtaccgagctccagagattctgttgggcacgaaattctactccacgggcgtggacatctggagtctaggctgcattttctctgaaatgattatgcgccgctccttgtttcctggagacagcgagatcgatcaactttataggattttccgtaccttaagcacacctgatgaaacaaattggcctggtgtgacgcagctgccagactttaagaccaagttccctagatgggagggaactaacatgccacaacccataaccgaacacgaggcgcacgaactcataatgtcaatgctgtgctatgatcccaacctgcgcatctcagccaaggacgcactgcagcacgcttacttccgcaatgtgcagcatgttgaccatgtagccctgcctgtagatcccaatgccggcagcgcttcgcgtctaacgcggctcgtctgatcgtgtccaatagccccagatctagcaaattacttgtgttttctagtatagtaagttcgatgtctatctcactatctttaaggcgaaactagtaaaattatttgaatatctaatctattttacagctgccacctcattatcatgcattccccatcctaactcgca

SEQ ID NO: 22059 - protein, 314 aa, DROSOPHILA
MTTILDNFQRAEKIGEGTYGIVYKARSNSTGQDVALKKIRLEGETEGVPSTAIREISLLKNLKHPNVVQLFDVVISGNNLYMIFEYLNMDLKKLMDKKKDVFTPQLIKSYMHQILDAVGFCHTNRILHRDLKPQNLLVDTAGKIKLADFGLARAFNVPMRAYTHEVVTLWYRAPEILLGTKFYSTGVDIWSLGCIFSEMIMRRSLFPGDSEIDQLYRIFRTLSTPDETNWPGVTQLPDFKTKFPRWEGTNMPQPITEHEAHELIMSMLCYDPNLRISAKDALQHAYFRNVQHVDHVALPVDPNAGSASRLTRLV

SEQ ID NO: 22060 - DNA, 4308 bp, DROSOPHILA
aaaggcccacctgtccgacaggtgctgcaaaaagtgcacaaacattttttattaaaattgataataaaatcagctacgtgggcggctgcgatggctgtggtttcgcaggggcgtgtttgcatacacaaatatagggaatacgctcaaatcatttttgcgaaactgattaaaaaatggcaaaaacatgcaatatgtatacgcaaacagacatcaagtgattattatttttcgcgtttttatcaattctgctcgttttgtacggctagtgctgagtggcagatgcatcagacagacgtactatacatatctgaatgggggcagtcggattaaatgttaatgtttgggtagggaaatcgagggtcggctgccgggatttggagtgcggatgcggaatgggcaaagtggattctttttgtatttgatgcactcactttgcggtgcagtggctagatagacttatatgggaagtaaatgaataaccaattatattgtaactctatgtattttgtaataaagttaatggaaaaccttttcaaatagtattgtttattttctgatctatagcatgcaatatacatacaatcacgttgaaaatgaagcattggcttaaaggtagaacattttataatatttaacaacaaatttgttttgaaataatgtgagtgggtaaggaaagtttaaatttcccgcacattatcgatagctctttcgatagaatcggtcggcaatcggctcgcaaactcgctagagaactgttaaccaactgtcatagtttgagttcacgctacgctccattctaaaagttatcaatatctcgaaataaataaactgtgggttatagcaggctttgttttattatttgcaattaggaacagtgcaaagataacaaagatgtactaacaattggtcaataggcgcagaagcgaccctgaaattggagtgtgacctcgctaatagccagatgcggcggggaattcgccaagcccgcaacactgtaccctgaaggccagctgccgccgcttcccgcgcattttcttcgacccaggtaggtcgcattgggattcgcttgcatttggtgttttcactcgcctccaaaccgccgtagcaacaccatctagacaacgtggaactcccgctgaaccagagaccggcattatttccattgtgagtgtgagcagaactaagctgcatcaccggcgtccctaaccttatatatatttcttacacacacacacaaacgcactatttccagtttcggtgacaaaaaattgtgaaaatacaagctaaaatgccgcgcagaaaggccctgactaataacaacaatgccggcgaagcggagcagcagccaccgaaggcgaagcgcgccagaatcgcttttcatctggagctgcccaagcggaggaccgtgctcggcaacgtgctagtctgcggcaacggcgatgtgggccaacttggtctcggcgaggacatactggagcgcaagcgtctcagccctgtggcgggcatcccggatgccgtggacatatccgccggtggcatgcacaacctggtgctgaccaagtcaggggacatttactcattcggttgcaatgacgaaggtgctctaggccgtgacaccagcgaggatggcagcgagtcaaagccggatcttatcgatttgcccggcaaggctctgtgcatttcggcgggagactcgcattccgcttgtctgctggaggatggccgtgtcttcgcttggggctcgttccgggactctcatggcaacatgggcctcaccatcgatggtaacaagcgtacgcccatcgatctgatggagggcactgtctgttgtagcatcgcgtccggcgccgatcatttggtcatcctgaccactgccggaaaggtctttaccgtgggctgcgctgagcagggacaactcggccggctgtcggagcgttccatctccggagagggtaagtcttggcattcaaattttcaacgaaattcgtattaaaaaaatgttaacccccaggtcgtcgtggcaaacgcgacttgctgcggcccacccagctcatcatcacgcgggccaaaccttttgaggccatctgggccaccaactactgcacattcatgcgcgagtcacagacacaggtcatctgggccacagggcttaacaacttcaagcagctggcccacgagacaaagggcaaggagttcgcactgacgcccatcaagacggaactcaaagatatccgacatattgccggcggtcagcaccatactgtcatcctgacaacggaccttaagtgttccgtagtgggtcgtccggagtacggtcggcttggtctgggcgatgtcaaggatgttgtggagaagccaacgattgtaaagaagctgaccgaaaagattgtgtccgttggatgtggcgaagtctgttcctatgccgttacaattgatggcaaactgtattcctggggctccggtgtcaacaatcaactaggcgttggcgacggcgatgatgagctcgaaccgatcgtggttgtcagcaagaacacgcaggggaagcacatgctgctcgcatctggcggtggtcagcacgcaatctttttggtcaaagcggacaaacaggaccagaaggagaatgttccagtgaaggtgtctggcagcagcagcatcagtaaaaaggacaagaccccgccgcaggataatgtcgacaaggaagccgagaatgtagataagcaggagcagaaggaaaacttgccggcgaaggcgtcaaccagcagcaaaaagaacaagacgccgccgcaggataatgccgacaaggaagccgagaatgtagataagcaggagcagaaggaaaacttgccggcgaaggcgtcaaccagcagcaaaaagattaagacgccgccgcaggatgatgccgccgaggaggtcgaagaggagtctgctcaggaaccgactcccaagaaggccaagaagcctgctgccaagcggggcggtaaaaagacataagattgagtataaatacgctgactttcccactttgtttttggtaacactaagttacgaacccgtacgcttaccctacgcttaaggaaggcaatgagtagcccagattcgtaagatagatcggaaattttgcttattgtacgttaagatctacgaactgaatcctgttaagttctttttattttgataaatagatgcccgcttatatcttacaagtctgcctaaagacgaaaacttctttatcaatccaactaagtgtttattatatatattcgttcgcaatacgaagccgtagtaaatttgtatttgaacgcaaaaggaaactaaatgagatttatttacaaactaattaacttgattatatcatacacaaagatatacatcctactcacagtgtattataaattcttggctcaggcggggcaaatgggagattaccggcaaaaaagctacaaaagattgggagattgtctcgtaagcgcgagacatcatttactcaataatatcaggaaacacgaaattgttactcttatggtaggtcttaagatttatacaaaaatatgtatttgcttggagggtggttcgatttgcaatgaagggaaacatcttaaaattacctttaaaagcaaaggtgtctaaacaattcgcaggacccgggaattcatgaatgcaagccattgaagtatgtaagaaggctttaatatttgtagttttcatacctggcaagggtcaaaatggattattacgtgtacagaggtgaacaagttgcatttactgctgaacaaatcgaaccaccctggcatgcacagttgagggttttggcttcactacgagtagtaacacggctgacgattgcctctgcctgagtcgactgtggctagggaggtggttatggtagtggtggtggagtttccgccgtagttgcttcccaggtagaagctcacgaacaagatgccgcacagcagcgatagcgaaagaacgacgcgcaccatcttccttgcgaatgcgatgaatcccagcaaatggccgccggcagcaacgccgcccagctgccaatcaccagtgccctgacagctgaggcacagctgcagatgcgcctgtatcagtgcctcgaggcattcgccatcgtattggtccatcgtatcggcacagtccagacctagattcatcaaatcaacagcacaggcacagttctccagctctggacagtcgcagtcgtcttcgttattgttgtggctatcgcgagcggcaatgtctagctcctgcctggtcaaattgcacgggctaagtaaatattatttgcgcttagcgcacgaatac

SEQ ID NO: 22061 - DNA, 2161 bp, DROSOPHILA
tgaaggccagctgccgccgcttcccgcgcattttcttcgacccaggtaggtcgcattgggattcgcttgcatttggtgttttcactcgcctccaaaccgccgtagcaacaccatctagacaacgtggaactcccgctgaaccagagaccggcattatttccatttttcggtgacaaaaaattgtgaaaatacaagctaaaatgccgcgcagaaaggccctgactaataacaacaatgccggcgaagcggagcagcagccaccgaaggcgaagcgcgccagaatcgcttttcatctggagctgcccaagcggaggaccgtgctcggcaacgtgctagtctgcggcaacggcgatgtgggccaacttggtctcggcgaggacatactggagcgcaagcgtctcagccctgtggcgggcatcccggatgccgtggacatatccgccggtggcatgcacaacctggtgctgaccaagtcaggggacatttactcattcggttgcaatgacgaaggtgctctaggccgtgacaccagcgaggatggcagcgagtcaaagccggatcttatcgatttgcccggcaaggctctgtgcatttcggcgggagactcgcattccgcttgtctgctggaggatggccgtgtcttcgcttggggctcgttccgggactctcatggcaacatgggcctcaccatcgatggtaacaagcgtacgcccatcgatctgatggagggcactgtctgttgtagcatcgcgtccggcgccgatcatttggtcatcctgaccactgccggaaaggtctttaccgtgggctgcgctgagcagggacaactcggccggctgtcggagcgttccatctccggagagggtcgtcgtggcaaacgcgacttgctgcggcccacccagctcatcatcacgcgggccaaaccttttgaggccatctgggccaccaactactgcacattcatgcgcgagtcacagacacaggtcatctgggccacagggcttaacaacttcaagcagctggcccacgagacaaagggcaaggagttcgcactgacgcccatcaagacggaactcaaagatatccgacatattgccggcggtcagcaccatactgtcatcctgacaacggaccttaagtgttccgtagtgggtcgtccggagtacggtcggcttggtctgggcgatgtcaaggatgttgtggagaagccaacgattgtaaagaagctgaccgaaaagattgtgtccgttggatgtggcgaagtctgttcctatgccgttacaattgatggcaaactgtattcctggggctccggtgtcaacaatcaactaggcgttggcgacggcgatgatgagctcgaaccgatcgtggttgtcagcaagaacacgcaggggaagcacatgctgctcgcatctggcggtggtcagcacgcaatctttttggtcaaagcggacaaacaggaccagaaggagaatgttccagtgaaggtgtctggcagcagcagcatcagtaaaaaggacaagaccccgccgcaggataatgtcgacaaggaagccgagaatgtagataagcaggagcagaaggaaaacttgccggcgaaggcgtcaaccagcagcaaaaagaacaagacgccgccgcaggataatgccgacaaggaagccgagaatgtagataagcaggagcagaaggaaaacttgccggcgaaggcgtcaaccagcagcaaaaagattaagacgccgccgcaggatgatgccgccgaggaggtcgaagaggagtctgctcaggaaccgactcccaagaaggccaagaagcctgctgccaagcggggcggtaaaaagacataagattgagtataaatacgctgactttcccactttgtttttggtaacactaagttacgaacccgtacgcttaccctacgcttaaggaaggcaatgagtagcccagattcgtaagatagatcggaaattttgcttattgtacgttaagatctacgaactgaatcctgttaagttctttttattttgataaatagatgcccgcttatatcttacaagtctgcctaaagacgaaaacttctttatcaatccaactaagtgtttattatatatattcgttcgcaatacgaagccgtagtaaatttgtatttgaacgcaaaagg

SEQ ID NO: 22062 - protein, 547 aa, DROSOPHILA
MPRRKALTNNNNAGEAEQQPPKAKRARIAFHLELPKRRTVLGNVLVCGNGDVGQLGLGEDILERKRLSPVAGIPDAVDISAGGMHNLVLTKSGDIYSFGCNDEGALGRDTSEDGSESKPDLIDLPGKALCISAGDSHSACLLEDGRVFAWGSFRDSHGNMGLTIDGNKRTPIDLMEGTVCCSIASGADHLVILTTAGKVFTVGCAEQGQLGRLSERSISGEGRRGKRDLLRPTQLIITRAKPFEAIWATNYCTFMRESQTQVIWATGLNNFKQLAHETKGKEFALTPIKTELKDIRHIAGGQHHTVILTTDLKCSVVGRPEYGRLGLGDVKDVVEKPTIVKKLTEKIVSVGCGEVCSYAVTIDGKLYSWGSGVNNQLGVGDGDDELEPIVVVSKNTQGKHMLLASGGGQHAIFLVKADKQDQKENVPVKVSGSSSISKKDKTPPQDNVDKEAENVDKQEQKENLPAKASTSSKKNKTPPQDNADKEAENVDKQEQKENLPAKASTSSKKIKTPPQDDAAEEVEEESAQEPTPKKAKKPAAKRGGKKT

SEQ ID NO: 22063 - DNA, 5283 bp, DROSOPHILA
acagctcatggaggaggggaggggcaaaaagtaggggatcccgtcaattgcgataagagcaacaaacgggggaaactggcaatgtttatgaggtttgtgcaggcgactcttcgggaacttggtttttatgatactcgctgtggttttctttgcgatatatgacgtatctcgtagtatcctagtatctcgcatttagctgtggaaattctttgcggcttatctcgtctcgatgtgggaagctaagtctactgggctcgattattcccaatcaattgacagtcgctgattgcggtggctgtaattgatatcaaagagcaacggttattgcataataacaaactttttttttttgtttttagattgcattctaattgcacatatatattgctaagcaaaaatagcccacattttaatcttatcaaccttatgagctttaatttattagccagccagagggattaaaggtgtactattctataattgcaaaaattgtactgaatatacagtttattaaggaccagagttcaaaatataaacattttgtagactagttaaagtaagcaagtcttagcaaaaatgcgcatttgttacaaatggtgttatttttattatatttgactaagtgcacaacagttgcttacttacagactttttttaattggcattaccaattatgaagaagttgttatatttaaatatatagtgtaatcaaaaaatcaatacattccgttaaataaattgtttcttaatttatgaattggccatttaataaaatcaaatcatgtgcaatatgtgttgcgcgtttgttgttgttttattgttgacattgaaaagagatgggaggcaacagctaacaataacaaaaccgaagaaatttacatatcgaaagctcgattcctcgcaaccgaaacccccgccatttggaccaccatcccaagccaaatcgaaatccaagaactttcgctgcctgttctcttctggcccagttgtgatgtttacgtgaaaacgtgcgtttctagtgcgaccacgtcctcgccatttatccggatgcggatgcagtgcagccagttgtgagatccccccaattcccgagatgaagttcgccgagcacctgacggcccacataacgcccgagtggcgaaagcagtacattaactatgaggtgagtgccgaaaatcgccgtttgaaggtgcagaaaaatatgtatccgtgagatacacggacgagtgtgcttttcccgctgtcactctgccagctgtgacgtcacgtgccccatcagctgtggcatccaactgtcaaacggtagagctttcaacgcgcatgcgccctgttgagcggcattctgtgttttgctctcctcggacgtaaacaagagaggatgggctgggtggagtggggtggcaaaagaacgagaaagtgaaaacacacgatacgatgagcaggagatatatagatacagtgggggccaaaagtataggtcctttgtttaagagatttatcaaaatatataaataaattttattaaaatatttcttatcattttttaggaaatgaaagccatgctgtatgcagccatcgaacaatcgccctccgcagaactcgtggagcgcgagatggtgacgcgatactttgccaaattcgatgaggagttctttcactactgcgacaaggagctggccaagatcaacacattctactcggagaagatggccgaggcgacacgcaaatatggcagtctgcgcagcgagttgaccgaagccctggaaatgggacacccaaagaaactgcccgcgtggaagaggcgaacgccgctgggcaagaagaatgtgccggcgcgcaagatacaggatctcaagttggcatttagtgaattttatctgggactgatactgctccagaactatcagaacctcaacttcacgggtttccgtaagatacttaagaagcacgacaagttgctgagcgtcgactatggtgcacgttggcgcacggatcacgtggaggcagcccacttttacaccaacaaggacattgatcggctgatccaggagacggagcaggctgttacccaggacatcgagggaggagatcgtcagagggcaatgaagcggttgagggtaccaccactgggcgaacagcagagtccttggacgaccttcaaggttggtctcttttctggcgcctttgtggtgctcttcattacggttgtgatcgctgccatgttctacggattcggcgagaactggcgggccggaatgaggatgttccgcgcaccattcctcatcatcgaatgcctcttcctttggggcgtcaatgtctacggctggaggtcgtccggtgtgaaccacgtcctcatctttgagttggatccacgaaatcacctgtccgagcaaaacatcatggaagtggcatccgtgtttggagttatctgggcctgctgcgtcctgagctacatcttttgcgatcccctcggcatcccacagtacgcagctccgctttgcctctacacattgatggctgcctttttgctgaatcccacgaagacgttccatcatgaggcccggttttgggccataaggatcctcatccgggtaatcatggctccgttctgctttgtaaactttgccgatttctggctggccgaccagctgaacagcatggtgccagcttttctggatataccctttctgatttgcttctttggtcgaagtcccacatggcacaaggctggcaagggtaagtagcacagggtttccgatgctgaactcaatttgaagtaaaagtaggggaaaaatcaaagatttccattcctttttatgagcattcaataaaagtttacaatgctactcgttctgcttgagaccagcttgtcggtttggtcctttccccaattctatttaattgaaaattcatgctgaatggtttaattatagactacaaagtgtttaatttaccatcattgttttgcttgtgcaacagctgccagccactgtgtggagtacgtgtctctgttgcatcccattgttgccataatgcctgcctacttccggttcgcccagtgcatccgcagataccgcgacacaaaggagtcatttccgcatctggtcaacgccgccaagtatgcaacgtccttctttgtggttatatttgcccacaaatatcacacgaccaccggtaagtggattcattatacgaagcatgagttcattagggcacatcgcaattgcaaatatatatatatgtacacatatatacattatgtgtgctatttacggtccagtgccaattagtgtcgaaaattcatgtagattgtattttggcggtatcgcacgtacattcctctttcacccaagccattgtcttctcatctccagacacctacccgctgtccaaggagaatccttggttctactgctggattacggccgccatcttctcgtcctgctacgcctacacatgggacatcaaaatggactggggactgttcgactcgaaggcgggcgacaatcgattcttgcgtgaggaaatcgtttattcatcgacggtgagtccggttgggtggagttttgtttttttctcctatttggagtaggggggcagtccccacaaaataatggccacgataaatatttgggcaaacggcacgtaaaacaatctttcaaagcgttcattatctctcctcttgtcggtgcccagtggttctactactttggcataattgaggatttaatactgcgcttcagctggaccctgtccatgagtctaattgaggctggctacattgagggcgatgtgatgatgaccattctcagtcccctggaggttttccgtcgcttcatttggaattactttcggttggagaacgagcatctaaacaacgtgggcaaattcagggctgtcagggatatatcggtcgctccaatggattgctcggatcaggtgagtctggtagccaagcaacatacctattggatttatttcaataggattttgatttttatataagttaaaaagcttagtttaaagcttactcaggttatcaaatcatagcaaaaatgaaattcagatttaagctgcaagctctattttagcatttgaatttaactccaccataactttctcttaaatttcagaccacgattttgcgcatgatggatgaaactgatggcgtgttgaatcgaaggcgtggaaaagccgctggcggcaaatccgcaacgaagaagaacaaacaggagcagcgactgctccttcaaggggaatccattgaggatctttgctcgtagttgggttacccaataaacatctatctctctgtgtgcacaaattttacgtttatggcaataaagcacttcagttgcatttgcggacactgaataaatggtccaaatggttccaatttcattgattttgcatctgtgagcaagaaagtttgagcaacaccatttctcggggtcatttgtataccatatgtgggtggtaatggcgattgatgacgagcactagttcaattttcgtgacagttgaacaataaactttgggtaaacttccgttccatttgggtgtgctattttgggtgcctaaaaatacatttgggtttgttgtggtagtcatagcaaatttacgaaaacgctaccatgcgagattattgctgacattacaatgcatgcgtgatatgttttgataatgtattcgaaacaggataaatggatgaccaccaatgagaaagattcagtcttcttaaatatatattttttttttggttcagcttgctttccaggaattttatatgaatatttctagatattaaaagaatttctatattttgcataatagatttacaggaaagttcggtcggtggtgtttgctgttgacaaacaaatttgatgtatttcaccgtgaatttccgttgggagttgaaaaggtttcgttcacagcagctgtgtgttgattgattgatggatttttttttcatgtttccccgcttcctctcactgtaattattgaataaaactttgaagggtatttgagcactgctgattacattcttatcaaaagtccttcatattgatagttcattgttgggggtaacgtacaaaataattggttaaatttaaagctttttggcagtggagctgaccgccaagaatttcatgcgctcttctggcgtcataaaccacatttttgcggtccttctgaaataaatggtaataataaatgattatttaatttaatatgtgctcaatttaataatgcaaacgaaaacttaccaagttttggcgagag

SEQ ID NO: 22064 - DNA, 2109 bp, DROSOPHILA
tgaaaacgtgcgtttctagtgcgaccacgtcctcgccatttatccggatgcggatgcagtgcagccagttgtgagatccccccaattcccgagatgaagttcgccgagcacctgacggcccacataacgcccgagtggcgaaagcagtacattaactatgaggaaatgaaagccatgctgtatgcagccatcgaacaatcgccctccgcagaactcgtggagcgcgagatggtgacgcgatactttgccaaattcgatgaggagttctttcactactgcgacaaggagctggccaagatcaacacattctactcggagaagatggccgaggcgacacgcaaatatggcagtctgcgcagcgagttgaccgaagccctggaaatgggacacccaaagaaactgcccgcgtggaagaggcgaacgccgctgggcaagaagaatgtgccggcgcgcaagatacaggatctcaagttggcatttagtgaattttatctgggactgatactgctccagaactatcagaacctcaacttcacgggtttccgtaagatacttaagaagcacgacaagttgctgagcgtcgactatggtgcacgttggcgcacggatcacgtggaggcagcccacttttacaccaacaaggacattgatcggctgatccaggagacggagcaggctgttacccaggacatcgagggaggagatcgtcagagggcaatgaagcggttgagggtaccaccactgggcgaacagcagagtccttggacgaccttcaaggttggtctcttttctggcgcctttgtggtgctcttcattacggttgtgatcgctgccatgttctacggattcggcgagaactggcgggccggaatgaggatgttccgcgcaccattcctcatcatcgaatgcctcttcctttggggcgtcaatgtctacggctggaggtcgtccggtgtgaaccacgtcctcatctttgagttggatccacgaaatcacctgtccgagcaaaacatcatggaagtggcatccgtgtttggagttatctgggcctgctgcgtcctgagctacatcttttgcgatcccctcggcatcccacagtacgcagctccgctttgcctctacacattgatggctgcctttttgctgaatcccacgaagacgttccatcatgaggcccggttttgggccataaggatcctcatccgggtaatcatggctccgttctgctttgtaaactttgccgatttctggctggccgaccagctgaacagcatggtgccagcttttctggatataccctttctgatttgcttctttggtcgaagtcccacatggcacaaggctggcaaggctgccagccactgtgtggagtacgtgtctctgttgcatcccattgttgccataatgcctgcctacttccggttcgcccagtgcatccgcagataccgcgacacaaaggagtcatttccgcatctggtcaacgccgccaagtatgcaacgtccttctttgtggttatatttgcccacaaatatcacacgaccaccgacacctacccgctgtccaaggagaatccttggttctactgctggattacggccgccatcttctcgtcctgctacgcctacacatgggacatcaaaatggactggggactgttcgactcgaaggcgggcgacaatcgattcttgcgtgaggaaatcgtttattcatcgacgtggttctactactttggcataattgaggatttaatactgcgcttcagctggaccctgtccatgagtctaattgaggctggctacattgagggcgatgtgatgatgaccattctcagtcccctggaggttttccgtcgcttcatttggaattactttcggttggagaacgagcatctaaacaacgtgggcaaattcagggctgtcagggatatatcggtcgctccaatggattgctcggatcagaccacgattttgcgcatgatggatgaaactgatggcgtgttgaatcgaaggcgtggaaaagccgctggcggcaaatccgcaacgaagaagaacaaacaggagcagcgactgctccttcaaggggaatccattgaggatctttgctcgtag

SEQ ID NO: 22065 - protein, 671 aa, DROSOPHILA
MKFAEHLTAHITPEWRKQYINYEEMKAMLYAAIEQSPSAELVEREMVTRYFAKFDEEFFHYCDKELAKINTFYSEKMAEATRKYGSLRSELTEALEMGHPKKLPAWKRRTPLGKKNVPARKIQDLKLAFSEFYLGLILLQNYQNLNFTGFRKILKKHDKLLSVDYGARWRTDHVEAAHFYTNKDIDRLIQETEQAVTQDIEGGDRQRAMKRLRVPPLGEQQSPWTTFKVGLFSGAFVVLFITVVIAAMFYGFGENWRAGMRMFRAPFLIIECLFLWGVNVYGWRSSGVNHVLIFELDPRNHLSEQNIMEVASVFGVIWACCVLSYIFCDPLGIPQYAAPLCLYTLMAAFLLNPTKTFHHEARFWAIRILIRVIMAPFCFVNFADFWLADQLNSMVPAFLDIPFLICFFGRSPTWHKAGKAASHCVEYVSLLHPIVAIMPAYFRFAQCIRRYRDTKESFPHLVNAAKYATSFFVVIFAHKYHTTTDTYPLSKENPWFYCWITAAIFSSCYAYTWDIKMDWGLFDSKAGDNRFLREEIVYSSTWFYYFGIIEDLILRFSWTLSMSLIEAGYIEGDVMMTILSPLEVFRRFIWNYFRLENEHLNNVGKFRAVRDISVAPMDCSDQTTILRMMDETDGVLNRRRGKAAGGKSATKKNKQEQRLLLQGESIEDLCS

SEQ ID NO: 22066 - DNA, 4373 bp, DROSOPHILA
gaaggattttattttacgttgttttctgcgcttagggaacggcagccgccactttcacttgactttcttcacttttacccgctgggataccattttatttcgtttcccgccaaacggttaatttgcttgctttacttgtttttctttagacaagtttttattcggcactcgacagataaatatctagaatttctctttgctgtttgcgggacactgccacataatttcatacacaagacgcgcagatttatgacactgatttatgtggcatgaccgggcatagttacgcggaccgcagtgtgggttgccaaaatgccaggacgcgatattccgaggagaaccgtcgccattgaaagtcgcatcgggactggctaagtagtcctcatgcgatggcgaaatgctttcaatttcgaaatgtactcgcacatacgttttatgaatgaaagttcgaaagtgggattgtgtggcccacgcatgcgccatctgcaggcgaagaacggcaacaggtggtaggattgctgaaatccttgcattctagctgcggctcaccgaattttcatgcaattaaccacaaactgtgttggcttagccaataccgcaaattagtgctatggattagttctctattggatttgccgagcctttaattaacgtgtaaaacgctctgcaggcggtctttgaatgaacaaactggcatggaggaagtggtggcgtcaaggagtcgggttgagttccatgacaatgcccatttcttgctccagttgctgccagcgaaacggaaatgaaaggaaaagtagcttaggcactcaaatggaaaatcaccaagtcatccgttgaaaagaatggcaccagaatttaacaagtcacagctgattaaatagttttgttcccgtgatgatactgaatttaatctgattttcgatgtatacaaatgactccattttttttttaaagcaaataatgccactttaacatctcattttccgtaaatatattaaacatgaagctacgatttattagtcagattttcaatttttccctgtgcttcaatatggcaaatgacgaaaagggaaatgcatcgacggaagatgatgacaagccgaaaaagagggaacacagggatcaggggcaacagtcaaagctgaagaagatgtaggtagcgatgctatatagccaggtataagctaatatcttatccaagcagaaagtattacattgagccggataaagtggacattggaatacaggcgggtgattcgttggagaaggtcaaagtgacctacgtggaaccagatgacgaagaatcctcgcatggcttcttttggggaaagaagaaatcggaaacatcattaccgcgtcgatcgtgggagacggatgactatatagatttcgatgacctcctgccaatgatcggccagtttggccgtttccagattaggctgttcctgttcatgatacccttctgcttcatcacagccttcgtgtatctgggccagatattcatgtgccttaccccaccgaagtactactgttatgtgccggaacttttacatacgccggtggagctgcgcaaggagttgtccattccaaaggagaaggatggatcttacagtcgctgccggatgtacaataccaattacacgaagatccattttgcggagaatccgagtgcctatatcaacacttcactgccaacgattccctgcaagaagggatatgttttcgagcaggagggcagagcatttgaatcggccaccatggagtttggctggctgtgcgatgacgacaagtacgccacctatgcccagatcatcttctttttgggttccatattgggcggacttgcgtatggccactttgcggatcactgcggccgtgtggcggcgctggtcagtagctgcttccttgctctggtaggcagtctggccacttcgatgtccacggacttttttacctttgcaatatcgagatttttagttggtgcctcctacgatacctgctttacgatggtatacattttgggtaaaaaagtgcacataccatgtgtaccatgtgatatatttcctctgcaatcttatctgctataatacctctgtttttaagtgctcgagtatgtgggtcccaagtaccggacattggtggccaatctatcactggccttgttctactcacccttcacgatggtgatgccgtggatagcgctttcagccggaaattggaggagattttcctcgtttacatccttgcccattgtgcttgccatgttttccttttgcctgctaccggagtctgcgcggtgggtattcaaattgtggcaactttaagccaagaggtcccatctatacaggcatttttcgattacagatggctggtatcggtgggtgagatcgacaaggccttggagatattgaaaaatgttattgaggtgaacaaaaagcaagtgtccaaggagatactcgatctcttcgaggcgagctgcacgcagttctacaaggaggagctcgatggacgcgattttacagtgctttccatatttaagaggaagcggatggcccgatatatgatcctgatgattctcatctggatgtccatctcattggtgtacgatggacatgttcgagcggctagtgtcctggacagtgagaatatatttctgttctttaccatcgcctgtgccactgagttgccgggtaatatcctggtgatccttactctggatcgcgctggacgtcgatggtgctcctttttttacacctcgttgagtggagtgtttagcctgttaggggccagctttcagaatcgggcaaatatgaggatgtcagcgttagctggaagattcttttccaacatctgctataatataggactgcagtgggccgctgagatactgcccactgtggtgagggctcagggagtggccttcatccacacgatgggctttgtggcaatgttgatgtccccaccagtggtctatctttccaaaaagtccctttccagcacgctgatagttttgggagccctgggtatctttggtggactgctggccctgtttctaccggaaacgttgaatcacgaactcccggaaactctcagtgatggcgcacaatttgggaagaatcaaaggatttggcacatgccctgctgtggcccaggatcaagaaaatcccatcccaggcacaactggcaccagggctcgagcttaaggaccttatcgaaggacgagttccgctccagcaaaatgtatcgcaagacgaaatacaggtttgagtcccacccgagtccatcatcgagtgattataagggcactgaggaaaaggaaatccgaacgtataaatatggcaacggttcaaagtggccagaagataagagctgaggttatctttgagttaactccctgttttataaatacttttctaattaaagattacatttgattattttttaaattgaacaaaaattaagaatcaattctatcccgtgcctgtaaaaatgtacattgccaaagctttattcaaatacaaagatttctaccattctgagaaaatgaaacttttcttccttttgctaattaataaatagcttactaactttcgtgacgaatgctttagttatggggaaattctgttaagttttccgtataagccagaatctaaatcattcgctattgccattagcaactggaaggtattttccaaatgctcggaaggattgcgttgttcttaactataatttatgtggtgtttaaagcaatgtttttgcgttgggttattgaaaagcccccctttaaattcgatgacgatgaggagcactttaatgctacgttagcgaaactactaaagcctcgatctgtgggcagcaaagggcatgccgaggttcaagatttcatcgagacggaactgaagcgtttggatttcatcacattaaagaatgacttccaacaaggagtcaatattaccaatttggtaggcttttggaatatgagggctaagttttatctgatgctaacctgtcactacgacagcaaaaagccagaaaatgtgaccaccgatgagttccttgcagccgcagaaggcgctgtatcgtgtgccattcttcttaacgtggccaaaacattgagacaatttttaatagataggtggtctgaaaaaaagtccgtgggactggctgtaagtaagtcataaacttgcgttgcaactatttaattataaaataggactttaaagtttatcttcttcgacgggcacaattccttaagctcagatccttatgacgaaaatgaacttttgggcgcaacacactttatagatgaagaatttatacctttgcgcgacatggtaatatatcaaaatgcataatctttacttgtagcccat

SEQ ID NO: 22067 - DNA, 2217 bp, DROSOPHILA
atgaagctacgatttattagtcagattttcaatttttccctgtgcttcaatatggcaaatgacgaaaagggaaatgcatcgacggaagatgatgacaagccgaaaaagagggaacacagggatcaggggcaacagtcaaagctgaagaagataaagtattacattgagccggataaagtggacattggaatacaggcgggtgattcgttggagaaggtcaaagtgacctacgtggaaccagatgacgaagaatcctcgcatggcttcttttggggaaagaagaaatcggaaacatcattaccgcgtcgatcgtgggagacggatgactatatagatttcgatgacctcctgccaatgatcggccagtttggccgtttccagattaggctgttcctgttcatgatacccttctgcttcatcacagccttcgtgtatctgggccagatattcatgtgccttaccccaccgaagtactactgttatgtgccggaacttttacatacgccggtggagctgcgcaaggagttgtccattccaaaggagaaggatggatcttacagtcgctgccggatgtacaataccaattacacgaagatccattttgcggagaatccgagtgcctatatcaacacttcactgccaacgattccctgcaagaagggatatgttttcgagcaggagggcagagcatttgaatcggccaccatggagtttggctggctgtgcgatgacgacaagtacgccacctatgcccagatcatcttctttttgggttccatattgggcggacttgcgtatggccactttgcggatcactgcggccgtgtggcggcgctggtcagtagctgcttccttgctctggtaggcagtctggccacttcgatgtccacggacttttttacctttgcaatatcgagatttttagttggtgcctcctacgatacctgctttacgatggtatacattttggtaccggacattggtggccaatctatcactggccttgttctactcacccttcacgatggtgatgccgtggatagcgctttcagccggaaattggaggagattttcctcgtttacatccttgcccattgtgcttgccatgttttccttttgcctgctaccggagtctgcgcggtgggtattcaaattgtggcaactttaagccaagaggtcccatctatacaggcatttttcgattacagatggctggtatcggtgggtgagatcgacaaggccttggagatattgaaaaatgttattgaggtgaacaaaaagcaagtgtccaaggagatactcgatctcttcgaggcgagctgcacgcagttctacaaggaggagctcgatggacgcgattttacagtgctttccatatttaagaggaagcggatggcccgatatatgatcctgatgattctcatctggatgtccatctcattggtgtacgatggacatgttcgagcggctagtgtcctggacagtgagaatatatttctgttctttaccatcgcctgtgccactgagttgccgggtaatatcctggtgatccttactctggatcgcgctggacgtcgatggtgctcctttttttacacctcgttgagtggagtgtttagcctgttaggggccagctttcagaatcgggcaaatatgaggatgtcagcgttagctggaagattcttttccaacatctgctataatataggactgcagtgggccgctgagatactgcccactgtggtgagggctcagggagtggccttcatccacacgatgggctttgtggcaatgttgatgtccccaccagtggtctatctttccaaaaagtccctttccagcacgctgatagttttgggagccctgggtatctttggtggactgctggccctgtttctaccggaaacgttgaatcacgaactcccggaaactctcagtgatggcgcacaatttgggaagaatcaaaggatttggcacatgccctgctgtggcccaggatcaagaaaatcccatcccaggcacaactggcaccagggctcgagcttaaggaccttatcgaaggacgagttccgctccagcaaaatgtatcgcaagacgaaatacaggtttgagtcccacccgagtccatcatcgagtgattataagggcactgaggaaaaggaaatccgaacgtataaatatggcaacggttcaaagtggccagaagataagagctga

SEQ ID NO: 22068 - protein, 738 aa, DROSOPHILA
MKLRFISQIFNFSLCFNMANDEKGNASTEDDDKPKKREHRDQGQQSKLKKIKYYIEPDKVDIGIQAGDSLEKVKVTYVEPDDEESSHGFFWGKKKSETSLPRRSWETDDYIDFDDLLPMIGQFGRFQIRLFLFMIPFCFITAFVYLGQIFMCLTPPKYYCYVPELLHTPVELRKELSIPKEKDGSYSRCRMYNTNYTKIHFAENPSAYINTSLPTIPCKKGYVFEQEGRAFESATMEFGWLCDDDKYATYAQIIFFLGSILGGLAYGHFADHCGRVAALVSSCFLALVGSLATSMSTDFFTFAISRFLVGASYDTCFTMVYILVPDIGGQSITGLVLLTLHDGDAVDSAFSRKLEEIFLVYILAHCACHVFLLPATGVCAVGIQIVATLSQEVPSIQAFFDYRWLVSVGEIDKALEILKNVIEVNKKQVSKEILDLFEASCTQFYKEELDGRDFTVLSIFKRKRMARYMILMILIWMSISLVYDGHVRAASVLDSENIFLFFTIACATELPGNILVILTLDRAGRRWCSFFYTSLSGVFSLLGASFQNRANMRMSALAGRFFSNICYNIGLQWAAEILPTVVRAQGVAFIHTMGFVAMLMSPPVVYLSKKSLSSTLIVLGALGIFGGLLALFLPETLNHELPETLSDGAQFGKNQRIWHMPCCGPGSRKSHPRHNWHQGSSLRTLSKDEFRSSKMYRKTKYRFESHPSPSSSDYKGTEEKEIRTYKYGNGSKWPEDKS

SEQ ID NO: 22069 - DNA, 2372 bp, DROSOPHILA
ggacgtttgctttgttgacttccagctcccaaaatatggtaaactgaaggaaaattccaaaatatttaattgtaataataatactcctttccaggcacacccgcccaagatcttctatgcatactgatgacctcacctaagttttcaatcaaactggacaaattcgactatttcatagagtattatcaccagcagctagtcgaacacctcactatgctcaattacaatcggaatgcacccacactatccaagttccacgcccatctacaccgatatagtctctggggtaagatcgttattagaagcttctttcataggaattctatttgaaacctcacctacttgtttgtagctttcatatgcgcccagcgaatgcttccaattgttctgctcccgcccgatgttgattcacatataggcaacgtaatgggtaattcggaggaggcgatcgcgtttaagcgtaagatgttcctgttgccggcttacgtggatcagataaaagtcatattgccatggctcattaaccggggttacataagatagacggaggatgcaatgataaacaagtttctagagaacgaatagtgtaataataatattgtattgcattcatacaaacatgttgttcacaaactatctcaaaatgctaggtgttagtataagctaatacgagagggtttttttaaataaatgtgcatagttttacaaaaaattattttcaatttgtatgcaggctcaatttgaagaattacagtgaaatcgctcgttgtgaaataaacaaaggcaaacgacgctctttcagctgccaaaatatttagaatgcaattagcggagcttttgagagaagatcgagagaaatcggccgcgcactacgaaattaaaaagctccacagatgtgtagagtctaatactcggctttcatcagtctacgcaagaccgtcacactggacgtatatgtgttttctgctcgatttcaaaatacttatcccgattatctacaatggcggctggcaaaatacccgattgggtcaccgctgaacgtttcgaagatgttctcaaatcgaatgtggacggatattcgaaagtgcgaaatttcaaagcggaaatgggatccgcggcaggtgacaactacgccactaatatgttgcgagttaatatcgaagtggagctgcaggcatactctgtggccacaggtgtaatggcagccgttctcgtcgatccaacggagagcgccagtttcgaaaactttgttggcgattccgccgagggagcggacttccagatgaaaatgtacaacaatccccgctatcggaagcacatgcaggctatcctgccctggctgctcaaccgaggtgccctggactttaattaggaaagtaatgattccatcatacgactccaacacactccgacttatattcaaaaaaaacctcattatccaactaactcagcttggtgcagcctacgcgtgaagtattgtaaatgtattaaaataaataaatacaagttttttaaaacattaagctgcttttaaaatgtttattgaatagcttatcttaaaaacagcaaatatttacggctgcatacattagtatgtaccaagtactgggaatacaactccaaatttggtcaatcgcgaatacggatactgggatcttttgtgatacgatttgagctctgctaaattacactgctcttcgccccggaatattggtatattagtgtaatatagtttcagcgatgtacacatatgtattatgtttaatttactcaaaactagacaaaaacttgttcgctagataattaactaaagtttactcagaaaagcttgtacggcagacagtgaaaagcccactggttctacgagctgaattaggaaagctccccaaacgatataaaactattgatcctccctgactggcctcagtccactaactgtggaataacggggcgtatacgtgctttctgcttctgagaacaaatcaactattatctacaatggcgtccagtaaaatccccgattgggtaactgcagaaatatttgaagatttgcttaaggcaaatgtggatggatactcaaaaattaagaactttaaggcggacattggatccgctgcaggtgaaaattatgccaccattatgcttcgagtcaaaatcgaagttgagctgcagggtaagttactgcgcctgatgtctaagaaaactgtctcatttgcaaaccttagatggcaaatcgaaatcggtatcctacatggttaagttgccccaccaagtggaggctattcaggagatgatgaaacgaaccaacatcttcgaaatcgagcgtaccatgtataacgaggttgtacctgaactagaggcgctttacaagg

SEQ ID NO: 22070 - DNA, 1158 bp, DROSOPHILA
atggcggctggcaaaatacccgattgggtcaccgctgaacgtttcgaagatgttctcaaatcgaatgtggacggatattcgaaagtgcgaaatttcaaagcggaaatgggatccgcggcaggtgacaactacgccactaatatgttgcgagttaatatcgaagtggagctgcaggatggcaccaccaaagagttgtcatacatgatgtacaatctggttgttcctgagatggaggctctttataaggcagccggtgtggaggtcacgtttggagccaagagctatgaactgaagaatgcccagaccgagtacatatctctggaggatctgtgcatcaaaggatttaagaacgccaatcgccttgagggcctcgatcaagcgcacacggagcgggttctccggaagttggcccagtggcatgctgcaaccgccgtaagggtggccactaagggtcagtatccggaaatcgtgctgaacggattcttcaaggaggaaaacaggccgatgatgaacgatatgatgaatggcatgggacaggtgtttgtcaaatgctgtagcacctacgaaggtaacgaggcctatatagaaaaagtcaaagctcttaaggacgtgatgatagacgagttgtttaagatgtgcgtagtcgatcccacggagttcaacgtcctgaatcacggtgattcttggtccaataacattatgtttcagtatgatgagtctggcaaaatcaaggaggtgtatatggtcgactttcaggtctcgaagtacggcactgttgctcaggacttgtactacttcctgatttcatccacaaagctggaggacaagctaagcaaattcgattactacgttaaggtgtaccatgataacctagtggagcacctgaaaatcctcaaatattccaagccactgccaagcctgcgagatatccataagtctctatacaaatacggaacttttgcatactctgtggccacaggtgtaatggcagccgttctcgtcgatccaacggagagcgccagtttcgaaaactttgttggcgattccgccgagggagcggacttccagatgaaaatgtacaacaatccccgctatcggaagcacatgcaggctatcctgccctggctgctcaaccgaggtgccctggactttaattag

SEQ ID NO: 22071 - protein, 385 aa, DROSOPHILA
MAAGKIPDWVTAERFEDVLKSNVDGYSKVRNFKAEMGSAAGDNYATNMLRVNIEVELQDGTTKELSYMMYNLVVPEMEALYKAAGVEVTFGAKSYELKNAQTEYISLEDLCIKGFKNANRLEGLDQAHTERVLRKLAQWHAATAVRVATKGQYPEIVLNGFFKEENRPMMNDMMNGMGQVFVKCCSTYEGNEAYIEKVKALKDVMIDELFKMCVVDPTEFNVLNHGDSWSNNIMFQYDESGKIKEVYMVDFQVSKYGTVAQDLYYFLISSTKLEDKLSKFDYYVKVYHDNLVEHLKILKYSKPLPSLRDIHKSLYKYGTFAYSVATGVMAAVLVDPTESASFENFVGDSAEGADFQMKMYNNPRYRKHMQAILPWLLNRGALDFN

SEQ ID NO: 22072 - DNA, 5167 bp, DROSOPHILA
tacacctcgttgagtggagtgtttagcctgttaggggccagctttcagaatcgggcaaatatgaggatgtcagcgttagctggaagattcttttccaacatctgctataatataggactgcagtgggccgctgagatactgcccactgtggtgagggctcagggagtggccttcatccacacgatgggctttgtggcaatgttgatgtccccaccagtggtctatctttccaaaaagtccctttccagcacgctgatagttttgggagccctgggtatctttggtggactgctggccctgtttctaccggaaacgttgaatcacgaactcccggaaactctcagtgatggcgcacaatttgggaagaatcaaaggatttggcacatgccctgctgtggcccaggatcaagaaaatcccatcccaggcacaactggcaccagggctcgagcttaaggaccttatcgaaggacgagttccgctccagcaaaatgtatcgcaagacgaaatacaggtttgagtcccacccgagtccatcatcgagtgattataagggcactgaggaaaaggaaatccgaacgtataaatatggcaacggttcaaagtggccagaagataagagctgaggttatctttgagttaactccctgttttataaatacttttctaattaaagattacatttgattattttttaaattgaacaaaaattaagaatcaattctatcccgtgcctgtaaaaatgtacattgccaaagctttattcaaatacaaagatttctaccattctgagaaaatgaaacttttcttccttttgctaattaataaatagcttactaactttcgtgacgaatgctttagttatggggaaattctgttaagttttccgtataagccagaatctaaatcattcgctattgccattagcaactggaaggtattttccaaatgctcggaaggattgcgttgttcttaactataatttatgtggtgtttaaagcaatgtttttgcgttgggttattgaaaagcccccctttaaattcgatgacgatgaggagcactttaatgctacgttagcgaaactactaaagcctcgatctgtgggcagcaaagggcatgccgaggttcaagatttcatcgagacggaactgaagcgtttggatttcatcacattaaagaatgacttccaacaaggagtcaatattaccaatttggtaggcttttggaatatgagggctaagttttatctgatgctaacctgtcactacgacagcaaaaagccagaaaatgtgaccaccgatgagttccttgcagccgcagaaggcgctgtatcgtgtgccattcttcttaacgtggccaaaacattgagacaatttttaatagataggtggtctgaaaaaaagtccgtgggactggctgtaagtaagtcataaacttgcgttgcaactatttaattataaaataggactttaaagtttatcttcttcgacgggcacaattccttaagctcagatccttatgacgaaaatgaacttttgggcgcaacacactttatagatgaagaatttatacctttgcgcgacatggtaatatatcaaaatgcataatctttacttgtagcccatattaatctttaactaggctgttgcagtaactctcagctatattggcgcgccaaatcaaacctttttgagcttctttgaagttaccaatgatttgcacaacctgattgctgacatcgaacaggatctcagaaaatccggagaactcgacgactgtcatgtgttattccaaaagaaaacacattacgacaaagatctgcttgacgatcatattgtattcgacgaacaaggtaatatcatagttaattttatactactattttataacgtgtatttgttcatctatagatgtgccagtcattcatgtgagtccacatgaatttccaaatgttctttatacgccagcggacaatgtcgagaatctacactatcctaccattcgcaatatgatcaaaattattcgctgttttgtgcatgatttctatgaaaagtggcaatactttatgaaatggcgacaagcttttgcaataaattatgatttttatgatgactaaattcaattagattacattttttataaaacatatatagcattaaaaagtgactaattcccaaaatgtatattatacacctaaaataactttcgaatgaaaactttggtttagtatgagacattttaaacttagtgttcattctagactttaagtgcatagtcactaaacgtacactaatgtaattaaggtaattatcgttatcagcaccaattagtcggctcacttttccccaacgaacgcggctttaaagctttttgcatttaccgcaacatcaacatgattcactcttaaaaactctcttgaacgaaggttcaaagctttcgaagtgagtttgccgccaaagaggcagcggaaaacgaaaacaaaagccatcagcatcggaaaccacaacatcaactacggtaaagatcgatttttcagccaccgatcgggctttagtgcgtcgccgagctctgaagcgtatagatggcgatcggttccgtagtttttgccgccgcaggcttgctgctcctcctcctcccgccgtcgcatcagcaagcgacagcgggaaacgtaagtaccccaagcattgtgactcacttgggaaaccaggcattgttaggttaaccagagagacccatctatattccagattggatcccagtggcgcgacgatgaggtccatttcaaccgcaccctggactccattttggtgccacgcgtcgttggcagtcggggacatcagcaggtgggtgataaagcttcaagtgtattacttggcgttataatattaacatttcaaacaggtgcgcgagtacctggtccaatcgctgaacggccttggcttccaaacggaagtggatgagttcaagcagagagttccagttttcggcgaactcacgtttgccaacgtagtgggcacaatcaatccccaggctcagaactttctcgctctggcctgccactacgacagcaagtacttccccaatgatcccggctttgtgggcgccactgactccgccgtgccctgtgccattctgttgaacaccgccaagaccttgggcgcgtatctgcagaaagagtttcgcaatcgcagcgatgtgggacttatggtaagttgcttacttagtgcccattaacacagaccttggtggctaaataaattttccatgaactccagttataccaaacctgagcgaaaacaagttgcatgtttggtattcaaatctccatttgaaattaggcatacgacattagtattacattgaaaaagttgatttatgttaataagatctagtagagaatttttcctatagttattgaaaatccaaccttcttatccaccagctcatattcttcgatggcgaggaggcctttaaggagtggaccgatgcggactctgtatacggatcaaagcatctggccgcgaagttggctagcaaacgcagtggttcccaggcgcaactagctccacgcaatatagatcgaattgtaagtcaatgacctttgcgagaattatcagcttgctaagattgtatcaataacaggaagttctggtgctgctggatctaattggggcgcggaatcccaagttctccagtttttatgaaaacaccgacggactgcactccagtctcgtgcagattgagaaatctctgcgcactgccggccagctggagggcaataacaatatgtttttaagtcgtgtcagcggtggtctagtcgacgatgatcatcgaccgtttttagatgagagtaagtttgatgtctttagtgtgtatccataatcacagacgttttccatacagatgttcctgtgctgcatttggtagccactcctttcccagacgtctggcacacgcctcgggacaatgccgccaatctgcactggccttccatacgcaatttcaaccgtgttttccgtaatttcgtttatcaataccttaagcggcacacgtcaccagtgaatttgcgtttttaccgaacatagtttatgttttgtcttatggctaagatttattaagcataagtgtaaagtgtttttcgttaattaaagtgtcctaaggcatgtgtaattcttcctagcgacgtttgcgaccggcttgcgccttcttgcccggagccctttgaccacgattgcccttggacttcttgcccaccgccttgcgactgcccttgcccttgggcttcttgccgcccttcttgcctggttcattctcagcctctgcttcgcgtctgttgaggaaataaaggtttaagctttagactatgctcatttaacgataaaggttaaacttacgccaagcgattgtcgcgcttctccatcgataccgccttgctcacgtccagtttgggcttcttgttcagcacgctcttgatgagatccaggttggcctccttctccggcgtttgtgtgatatgcgactgcttgcgtttgccgccgggaatcagctctttaatgcccagaccacgtgcctccttctccttgggcagtttgttttggaatttgccgactgaggctgtggaggatttggccacagtgacggccgttaacaactggctggatgaggcagcctcgggtcccaagtaaccgctgcgtggcatgtcgatcttcttggcgcgcacaatgttcttcatccgctggatctcattcttggccaccttctcgttgcgcaggtcgatcttcttctggaacatgtccgtattgggatcggcgttctgtggcacctccagcacccaatccttggccttctcggcctcggcacgcttaaaaccatatgtaggcacccatttctataaagattcaaggtttagattgtgacttgacaagattaaagagcaaaaacttgcatccatggtctcatcgtaggtcttcttgtccttcttcttcttgctgatacccttctccttggcgaacttctcccatttggtgagcggacgtggacctggcggcttacggaggcggggcagtaccgtcgtgggttccggcagcttggccacaatgctctcgtctacccgttcggtgggcaactcccaaatggcattgaccaaaagttgggtgttctcccgtgtc

SEQ ID NO: 22073 - DNA, 1964 bp, DROSOPHILA
atgtttttgcgttgggttattgaaaagcccccctttaaattcgatgacgatgaggagcactttaatgctacgttagcgaaactactaaagcctcgatctgtgggcagcaaagggcatgccgaggttcaagatttcatcgagacggaactgaagcgtttggatttcatcacattaaagaatgacttccaacaaggagtcaatattaccaatttggtaggcttttggaatatgagggctaagttttatctgatgctaacctgtcactacgacagcaaaaagccagaaaatgtgaccaccgatgagttccttgcagccgcagaaggcgctgtatcgtgtgccattcttcttaacgtggccaaaacattgagacaatttttaatagataggtggtctgaaaaaaagtccgtgggactggctgtaataactctcagctatattggcgcgccaaatcaaacctttttgagcttctttgaagttaccaatgatttgcacaacctgattgctgacatcgaacaggatctcagaaaatccggagaactcgacgactgtcatgtgttattccaaaagaaaacacattacgacaaagatctgcttgacgatcatattgtattcgacgaacaagatgtgccagtcattcatgtgagtccacatgaatttccaaatgttctttatacgccagcggacaatgtcgagaatctacactatcctaccattcgcaatatgatcaaaattattcgctgttttgtgcatgatttctatgaaaagttcaaagctttcgaagtgagtttgccgccaaagaggcagcggaaaacgaaaacaaaagccatcagcatcggaaaccacaacatcaactacggtaaagatcgatttttcagccaccgatcgggctttagcttgctgctcctcctcctcccgccgtcgcatcagcaagcgacagcgggaaacattggatcccagtggcgcgacgatgaggtccatttcaaccgcaccctggactccattttggtgccacgcgtcgttggcagtcggggacatcagcaggtgcgcgagtacctggtccaatcgctgaacggccttggcttccaaacggaagtggatgagttcaagcagagagttccagttttcggcgaactcacgtttgccaacgtagtgggcacaatcaatccccaggctcagaactttctcgctctggcctgccactacgacagcaagtacttccccaatgatcccggctttgtgggcgccactgactccgccgtgccctgtgccattctgttgaacaccgccaagaccttgggcgcgtatctgcagaaagagtttcgcaatcgcagcgatgtgggacttatgctcatattcttcgatggcgaggaggcctttaaggagtggaccgatgcggactctgtatacggatcaaagcatctggccgcgaagttggctagcaaacgcagtggttcccaggcgcaactagctccacgcaatatagatcgaattgaagttctggtgctgctggatctaattggggcgcggaatcccaagttctccagtttttatgaaaacaccgacggactgcactccagtctcgtgcagattgagaaatctctgcgcactgccggccagctggagggcaataacaatatgtttttaagtcgtgtcagcggtggtctagtcgacgatgatcatcgaccgtttttagatgagaatgttcctgtgctgcatttggtagccactcctttcccagacgtctggcacacgcctcgggacaatgccgccaatctgcactggccttccatacgcaatttcaaccgtgttttccgtaatttcgtttatcaataccttaagcggcacacgtcaccagtgaatttgcgtttttaccgaacatagtttatgttttgtcttatggctaagatttattaagcataagtgtaaagtgtttttcgttaattaaagtgtcctaaggcatgtgt

SEQ ID NO: 22074 - protein, 626 aa, DROSOPHILA
MFLRWVIEKPPFKFDDDEEHFNATLAKLLKPRSVGSKGHAEVQDFIETELKRLDFITLKNDFQQGVNITNLVGFWNMRAKFYLMLTCHYDSKKPENVTTDEFLAAAEGAVSCAILLNVAKTLRQFLIDRWSEKKSVGLAVITLSYIGAPNQTFLSFFEVTNDLHNLIADIEQDLRKSGELDDCHVLFQKKTHYDKDLLDDHIVFDEQDVPVIHVSPHEFPNVLYTPADNVENLHYPTIRNMIKIIRCFVHDFYEKFKAFEVSLPPKRQRKTKTKAISIGNHNINYGKDRFFSHRSGFSLLLLLLPPSHQQATAGNIGSQWRDDEVHFNRTLDSILVPRVVGSRGHQQVREYLVQSLNGLGFQTEVDEFKQRVPVFGELTFANVVGTINPQAQNFLALACHYDSKYFPNDPGFVGATDSAVPCAILLNTAKTLGAYLQKEFRNRSDVGLMLIFFDGEEAFKEWTDADSVYGSKHLAAKLASKRSGSQAQLAPRNIDRIEVLVLLDLIGARNPKFSSFYENTDGLHSSLVQIEKSLRTAGQLEGNNNMFLSRVSGGLVDDDHRPFLDENVPVLHLVATPFPDVWHTPRDNAANLHWPSIRNFNRVFRNFVYQYLKRHTSPVNLRFYRT

SEQ ID NO: 22075 - DNA, 3635 bp, DROSOPHILA
tgatgccaacgttctccaaagctgttgaaaagaatgtgatgatgatatttaaatttatgatttatgttaattgactctgcaacactcacttagaatataaatgggaacgaagcagtagttcattgacagtccagccacaaatcggctggcagcaaagcagggaaagtccttgcagaccacacttacgcaaccgccgatcatggaacaggagttggccagaaatagtgcaggcaagcgaccggaatgatcggttatgaatccaaagcagaggcaaccaacaatacagcccacaaagtagacaacgacgctatatgtcccgaaatcccttttgtcgcacacccaattgtactcggtagcgatggactcgtagggcacctccttgcgatcatagatccaaccattgttgcaaggtatcgggctccttgtctgattcgcatcgttggtcgcatttgagtcgtagggcacattgtacataaaacaattctcgaaactgccatcttgctttttggggattccccgattcttttgttcactttccggcagtccctctagttctcgtactctgcaccagtgattctttggcaacagtatcataaatatctgaccaaagtaggtgaatgcgaacagaaaggcggcgggcatcatccaaaacagcagtcgcttctgaaaggggccaaagtccccaatgaacagcaagaagttctcatacttttcacaatctctggggggcatttcgacatttaatattataaatatgtactaaacaaaagccaacttctttaaagccctctttttgaaccttaaatagttaaatatatgttattttgaataaaccattcaaatatcaactttttgaactccacttttttccgccaattttcgattactttctaggccttctattttagcttcatgttcggctggtcacacaaatgcacatagatatcgataattgacaacatccatatctaatttgcgcgcgaaaaaacttttaataacaatggatgtggatttactgccgctgagaaagcgaataacaaacaccttcaagctatgtggattcctgatccgctcggagaacagttcctacctggcggagcagctgctaccctttgacgcagcggaacgggacaaatggctgacggtgatcaccgagaatctccaaagccaaaagcttttgacgcctcatgtggagcgagccgccctggagaaggccatcaatgaacttaaccgggtgggattggatgaaggggagacggtctttgccctgatcgatgcctttacggtgccccgttttcggtacaaccagcggataaagaaattcgaactggacactcagccgcgccagttgctgaccgccccgcgcatgaaatcggactacatgcagcaacgatatgccatgttactacagaaaactctgcgacacgatctctttgccccagccgtcatacaggatggcgttggggccgaggcccaggccaagaaatttaagctccagttcgcggagaacctgctggccacgtcggcgatgaaggaggcagttgttttggggctacttacccagcttaaagagggcaagttctatgtcgaggatcccacgggttgcgtccagttagatctcactggagcccgtttccatgccggcttcttctgcgagggctgctttgttttagccgagggcaactataacaacggtgtgctcaagggtaagtagcccaaagtatttaataactacatctcaagagtttcttatgtttccccagttgatggcctgggctttccacctgcggaaccggcaaacagcagtcgagcatttttcggcaccgccaacacttggggcggtgaatctgctaagctgctgaagtactcagccggactacaggaactggagcgtaccaacacggaaacaaccattgttttcctttccgacgttcggttggatctgccggttgtcatggagaagctgcgccagttgttcgtgggctatgattcctgtccgccgcaggctatagtgctcatgggtcccttcacggccagcacaaggaatcatcatgaactgaggcatcacctggatgcattgggtggcttggcagctggctgcgagcagctgaagaagcaaacggatctgatactcgttccctcgtccgaagatcccacggcacctaatattctgccccgtgctccaattcccgaatgcctggcagccgggctgctaaaggcctggccacgcacccagttggctacgaatccgtgtcgcctgcagtactgcacccagcagattgtggtctgccgtctggatttgatggccaagttttgtcgcaacaccttgcattttcctgaagacacgtcccagatcgagcagcattttgccagaacgattgtgtgccagggtcatttggtgcccattcatccgattgccatgccagtgcactgggactacgatcctgctctgtggttgtatccactgccggatctgattgtcatgggcgattcgtgtcagagctttagcagcagtcaacatggctgcactgttctcaataccggctcctttgtcaagtccaagttcgcattcaaagtgtatataccagcgacgcgaacgattgaggactcggagataccggacgaattggagtagttatgatatagttaaccttaacgtaagtttgaataattatttaattacatatgtcgattactctttggatttcgggctatttgggcaattttttttttgttttaaacaactgcaagcctatatttagaaagaataccatcaatttaacaatttggatataaacttctttcgggagcttagctcactgcgacctcacatgttgcttggcccgccagctcgaaacatttttcggcacccagtgcgtgtggctgttccctcgtgataagcggcccagtctcatcatcaccgtcgtcagtcatcatatgcgcacagcatgtgttccacaatcgtctcctggctgtgcggctgacgcgcctcgcaatctgctttttacggcgaccgggggttgtctattacttttcatgacttaaagccgatttggaaaaatattgttactctgcccgatgccggccacttagggtcgtggaaattcaatttcccaggctggcgcgcaactcctcggcagctgaaacggcaattttgataatgcgtttgacctgaggacatcgatggcccccatttgctgtcacatgaccagttgccgaatcgtttttttaagacatcattagccgggtaggatgtggaagtggggaggtttttttttcctcctgccgaacggctcgaagcgttttgctctcctattgatttatgatttatgagtgcaacttggctagttgtatgccgcacgtccctgggatcaatttccaaaatgtgtccaccatgagtgtcaattcgatttggtgggcgtggtcagccttgggtgctaactatattttcattttatcccttcgagtgttgaacatttatattcctctgtatacatggtttctctccagctcctcaatgcagaaaggcagattcaaaatgcttgctgtgcgacagcaatcttgcttctgcttcatttaactggtaacattggcaacttttgaaatttaaatattgttttgcggttgctctgcaa

SEQ ID NO: 22076 - DNA, 1578 bp, DROSOPHILA
atggatgtggatttactgccgctgagaaagcgaataacaaacaccttcaagctatgtggattcctgatccgctcggagaacagttcctacctggcggagcagctgctaccctttgacgcagcggaacgggacaaatggctgacggtgatcaccgagaatctccaaagccaaaagcttttgacgcctcatgtggagcgagccgccctggagaaggccatcaatgaacttaaccgggtgggattggatgaaggggagacggtctttgccctgatcgatgcctttacggtgccccgttttcggtacaaccagcggataaagaaattcgaactggacactcagccgcgccagttgctgaccgccccgcgcatgaaatcggactacatgcagcaacgatatgccatgttactacagaaaactctgcgacacgatctctttgccccagccgtcatacaggatggcgttggggccgaggcccaggccaagaaatttaagctccagttcgcggagaacctgctggccacgtcggcgatgaaggaggcagttgttttggggctacttacccagcttaaagagggcaagttctatgtcgaggatcccacgggttgcgtccagttagatctcactggagcccgtttccatgccggcttcttctgcgagggctgctttgttttagccgagggcaactataacaacggtgtgctcaaggttgatggcctgggctttccacctgcggaaccggcaaacagcagtcgagcatttttcggcaccgccaacacttggggcggtgaatctgctaagctgctgaagtactcagccggactacaggaactggagcgtaccaacacggaaacaaccattgttttcctttccgacgttcggttggatctgccggttgtcatggagaagctgcgccagttgttcgtgggctatgattcctgtccgccgcaggctatagtgctcatgggtcccttcacggccagcacaaggaatcatcatgaactgaggcatcacctggatgcattgggtggcttggcagctggctgcgagcagctgaagaagcaaacggatctgatactcgttccctcgtccgaagatcccacggcacctaatattctgccccgtgctccaattcccgaatgcctggcagccgggctgctaaaggcctggccacgcacccagttggctacgaatccgtgtcgcctgcagtactgcacccagcagattgtggtctgccgtctggatttgatggccaagttttgtcgcaacaccttgcattttcctgaagacacgtcccagatcgagcagcattttgccagaacgattgtgtgccagggtcatttggtgcccattcatccgattgccatgccagtgcactgggactacgatcctgctctgtggttgtatccactgccggatctgattgtcatgggcgattcgtgtcagagctttagcagcagtcaacatggctgcactgttctcaataccggctcctttgtcaagtccaagttcgcattcaaagtgtatataccagcgacgcgaacgattgaggactcggagataccggacgaattggagtag

SEQ ID NO: 22077 - protein, 525 aa, DROSOPHILA
MDVDLLPLRKRITNTFKLCGFLIRSENSSYLAEQLLPFDAAERDKWLTVITENLQSQKLLTPHVERAALEKAINELNRVGLDEGETVFALIDAFTVPRFRYNQRIKKFELDTQPRQLLTAPRMKSDYMQQRYAMLLQKTLRHDLFAPAVIQDGVGAEAQAKKFKLQFAENLLATSAMKEAVVLGLLTQLKEGKFYVEDPTGCVQLDLTGARFHAGFFCEGCFVLAEGNYNNGVLKVDGLGFPPAEPANSSRAFFGTANTWGGESAKLLKYSAGLQELERTNTETTIVFLSDVRLDLPVVMEKLRQLFVGYDSCPPQAIVLMGPFTASTRNHHELRHHLDALGGLAAGCEQLKKQTDLILVPSSEDPTAPNILPRAPIPECLAAGLLKAWPRTQLATNPCRLQYCTQQIVVCRLDLMAKFCRNTLHFPEDTSQIEQHFARTIVCQGHLVPIHPIAMPVHWDYDPALWLYPLPDLIVMGDSCQSFSSSQHGCTVLNTGSFVKSKFAFKVYIPATRTIEDSEIPDELE

SEQ ID NO: 22078 - DNA, 31214 bp, DROSOPHILA
tatcacatagacatatatatacgcacagatatataaaacaaaaacgatcgcttctcgtgccagcgcgtgtgattgtgtgcgttcccatgttgcatatatatatgcacaaaaaatatatatatttatctagagccgactgttgcgacgacttttctatataatcggctagtgagcacgcagacatcgaaaaggtgcacaaatacatcagcagatgcgggtatatatgtattgcacatatatctagccaaagccaaagtagaagatatatatgcgtataagctgaacgcggcgcactctgctctgttttttcttttataattacttttgtctaaaattagaagacgtgtgtgttgtgtgtgccccgtccgtgtatccgtatccgtgagatacgcgagagtgtccgcgtctgctatatcgcacatcatcatcgccgtacaccatccgccgtccaatatccaccatcatcatcatcatcatcgccatccccatcatcatcgtcgtcgtcgtcatcagagatcagagatctgcagcggtgtgtgtgccagaaaagacgactcgtgaatcagactacggctacgactacgggtgcgactacggctatataggcgagagatcgcgtatacggccagacaaacattatcgtatatctggcgccgaggattacaattacaagagcagcaaacgcaacagcagcagcaggagcggcagccgaagttaaagccgaatacgagtacgaatacgagtacgaatatccgagccccacaaacgaatacgaatacaaatacgaatccgaacccgaatcgaggcgatacgaaacgatcgcgcgcgtgaaaagcctcgtgaagaaaagcgctacgaaaaaagtgggggaaaaatcaaacgccacgcgaccttaggcccgtccaattttgggggggggcgtgcagcggggcgtggccgtgcgtcgactcctagcgatcgctcaagtgaaacgcggcgaaattctgttcagataacaaaaatgagtcaccaaaataagcagcaacagcaacagcagcagcagcaacatcaaaagcaacagcaacaatcgagtgcggcaaagtgttcataaattaatgctaggcatacagtgtgttagaccagtccgaaatacactatccccctctctctcgctctcgaacagtccgtctctctcttgcccctgctgtcgctcaaaatgctacgaaactatcgaaagtatttgcaggataaacggaaatacgacaagccacaacgacgaggcagcgaattttacatttgtcacgtttaggcaaattgcaaggacaaaggacacaccaaccccccagcagcagcagcagcagcagcagcagcagcagcagcagcatcacgcagcaatacgcagcagcagcagcaaagcgcagcagcaacactcgctatcgagattttgtacataaagtcggggcaatagcagcaacaactttggaggacgccatgtatgcgcaacatttgcgcaaatggagtctaaaaacaaaaaagcaactaatgccattgatattgctaattatcagctacatgttgctactaaacacatgtgtgttgtcgtcgtcggcgacgacgcagcagcaacaacaacagcagcagcagcagcagcatcttccaagattatgggaaggcagtgccgaagaaagcagctactatataccactgagttcggataatggcagcgggagcagtgaaagctccgccgagagcggtagcagcagcagtagaagcagcagcaacaacatcgacaacaatatcttaagtaggctgctcagcctcaacagcaatagtcttagtagccgtagcaatgttaagttaaagccagcaacagtattcgacgccggcagcagtacacccgctcagcaggagcaacatgtggctgccgtgccagagcagcagcagcagcaacagcagcagcagcagtcaatgcaaaaagttccaaatacgttaatcaatagtcaaatatataatttattatacaatggcatgcccagcgaggcggcgagcagcaaaatgcgtcgccacattcaaccatcacagctgccacatcagccagagagcagagcgcaattaccgagcaactacagcagtcggccggcggtgcggagctatctaatcgagtcctacgagatgccagagagcatgttagaggatcgcagtccggagcaggcggcgcgaagtcgtcgggatggcagcaacaccaacggcagccggcagcaacagcgcaccggccaccggcaacagttgcagcaggacaagcgcgatcaccgccgccagcggcaggatcagcagaaggagcagcgccagcagcagcagcagcgtcagcacaagagcggcaacaagcaccagcagcagcagcagcagcgcaggaagcaccagcggaagcaccagcgatacaaccgctattgctccgcccgagatcccgcccagttggcctttgcggcacccaccgttttccagggtgtcttcaagtcgatgtccgccgatcggcgggtgaacttctcggccaccatgaaggtggagaaggtgtacaagcagcagcacgatcttcaactgcccacgctggtgcgattgcagttcgcgctgagcaactccagcggcgagtgcgacatctacagggagcgactgatgccgcggggcatgctccgctccgggaacgatctgcagcaggcgtcggatatatcctacatgatgttcgtgcagcagacgaatccaggcaacttcaccatcctcggccagcccatgagggtcacacatttagtggtggaagcggtcgaaacggctgtgagcgaaaattatagtgagtggatttcgattttaaacctaaagtgggtgggcctagaataagtttttcaaaagcaagtttttggtttgataagaaaagttagccaccgatcattgaacccccaacgagtagagtagcaaatcttggaaatattgccttcaactaaaagacatgacatggaaatctcccgaaaattgctccctttctctcgccacctttctttcggcttcctcccattacatttctttcttgccgtctcttttgcgccatggcagctgcctctttctactctccacgttgctggttgttgtttaatgaaatttagctgctttttgcagctgaatttcttatttgccaacttcacgctctgctaatattcaccagaccgaaataattttatgcaatacactcacaccactgctacacacacacacacacacacatgcagggaaacgttgcgcatgcgcctgtgcgattgcagtttttgttgttgttgtttttttttttttttttgcaagtctaggctctggtcttcttcggattcttctactggattcttttctttgtgcccgactcaatttggttgctgtgcaacaaaaatgctcacatctagaatttattattgccgctgcctcggctgttgctagttgcacattttaattaaattcgcattaactttgctcgctgctcccggcttcttctccctatcccccttactcccttactcccttcctgcctcctgaaaagtgggaaaaactttgaaaactcatttctgtccgcccgtctttttagctccaatgtgcaactcacaacgtcatcgtcattgtggtggtttgttgttcttgttcttgctgttgttgttgttgtctgcattcgacctttgcggttggcagacccaacccaaccctacgttcttctcccactgctgttgttgtaattattcttgcgtcgcggttcatggagttttgcgtctgtaatgcgactaagtgcgatcacccggccccgcccctcgccgcctcccccgcctttgccttgcctttcccttcacaccctcgaagggggtatttcaattttggctagcaacaaaggtagaaatatgtttttcgaatctttttaggtattatatatacatatgtatatgagagaccttcaatgtcgatataatttcacattatatagaaattttgaattactatatcattgttcttgaacccttggcagggcatataaacttcgactaccttgagctaacttcctttccttttatttatttatgtttgttgctgttgtctttattgtcttctccctctcggattgtgtgctttgtttcatcgcgggcgcaattagatttttaattcattttctctctccacatcgctccttagctgctgtttcagcttctggctcttccgtcatggctcccgcacacggagtgggagaaaaagaaacccccctccggtatacccaagatccccagatacatggtcacatatacggacacgtacatacatgcatatgtaagacccaacccttttcggagctccccccgcatcgaaatcagctgcaatcagctgttctctcgcgctttgtctttttgggttttttatctggtgtttatttactttctggcctttgcttccttctctctctttttgtttcaccctccctctctctctctctctctctcttcgccgacttcacagacctcatcaatgaacatatagcattaacaggatatttacttttggccccgactgatttattttgactgcgaacgcagcaaatgcttgggaatcgattcgcaactggtagctggccgttctacaagcaaatgtatattaaaaatcgattactcatcgaaatgcatactaatcaatccacccacacagcagcagaccaaattttgccaactcctttcactttgccaatttcctcgctggccaagagctagccaatttgcatatgaggccataaagcctgaaaatcgtcagccggatcgttaaaatctatagtccaatcaaagccgagaaatggaatcaaatcgttcagatcaatcaaaatctgactcggatcggttattttatagcctgaactattttcggtggctcaaagttgaaattagcgcgaggcgatgcgaaggcagggatttattattatgcatacgccccgtgtgacgacgcagcttacggtctgcttgaaaccaattaaaatgccttcgaacctgactgaatcggtagtatcatgaattaactggtcgcattttatgcccaatttacacccacgccgtgaacgtcagttgccgccagcaagagtgtgacttgaatatgcgaaaaaaaaatatatattagtagcagggaaaacacaaagaaggggccatgtgaaaagtaaataaagtcacatcttttgtatttagctgcggggctactacggtttgttcttcgcctgtgctggccattgttgttgtcgaggtgttaagtaaattagctgctcataaaacatgatttgatctggcagaagttggagtcgcaaagcagaatcatcggcttcgctcccgatgtttgttgtttgctggtttggtttggtttatttgcttactggtttgcttggtcatccgaaagcggagacaaactggcagtattggcagtactaacagtatatatggatatgtatatttaaatgtttgccgctgcattatataataatatacatatttgtcacttgggcggctgcacgcagcattgaatattcattttctcattgcggtctctagtttgtcaccttgccaaagcaccaccaataatctcgaaaagatttttcattgagaaaagcaatacctggtgtgtgttcgttctacagttttgaaactgagaaaaagcaagaaacaccgcagagaaccttgactgctgggattccattacttgagtcgacatggacaacctgcgactctggtttcggtttctcttctgggttctccactccggttgcacttgctagaaaatgggaaatgtgttgtgttgtgttgtgtggtgtttggcaagcgattacaaaacggaaaacagaaagaaaacgccagagcggaaaatgcttttcagcagcatagcgacacagcgcagttcgcatatttaggtcaacgcctacgagtggaagcgacaaacttacccaacggcacccacaattcatcatttctcagctcatctcctcatctcatctttttttttttttttgggtgtctggtctacctggtcataagattttccacgtcgatgggtggggggcggtttgctcatttagcgtcacgccagagaagagacaagttttcgttagtcttcttgtctcgtctgcgatggctctagttgattttgtttttctttttttatttcattttttttttttttggtaattaagtatgaatggcggcgctagatgacgaaccttggttcgtttaggtagtaagtgtaaaggggttgactcagctccctgaccagaccagcccagcccgcccctttttcgactactcagtagtgtctggcactcgaaaaaatcgttttccaaataaatttgatcaatctagaagacttgtctatgtagaaagaagatctatttgatatgtttccatatttaactaagaagttttgcttaaccaattttttcattccaaactgagatttcaagctctgattttcctaagtatctcatctagaacatgagggcaataagtgccacaggcacccaaattcttagggccacttgtggatattttctgcgagtgtaggggccccttgggacttggctggcgggccgtttggcatgcgggaaatagaaaattataacgaaatgaaattttcaaatggcatgccatgtttccttgccttgcctcgcgactcgactcgcttgcctcgtttatgagttttatgctatttctggccgcgccgacagcagagcagcaacagcaacatcagcagcagcaacatcacgcagctgaaagccattcgagagtaggaagacatcttggtcgccataggcttgccaaaaaaacaaaacgtcccagtcccccttcccggcaaccgaaaaaaaagtaaattcgaaaaatcaagcaactagaaaatctgcctgcttgttagccctgcctgcaatttgcatttcagttgcaccggcagccgggtttttctggtccatcctcccaaatggcgctaatggagcaatcttggccagataggaaaatcgaaaaaaaaaaaaaaacggaaactggtcgatcaatgagcccctctgttgttccgatccatccacatccactcgagcactcgagcagcggatgtgacataatctgattgccggttgcattgcatatgcaacgtaccgccgaaatggataaaccgaatggcattcataaggtctctcattggacccatcaatgggtccatccagatctgtgtcggcgcgatatcaaaggccccctcaggtggcgcttcctcaagcggctgatctacataattcgatcagggcgaatatgaaatgccctaccaaaaataatgacaagatatatgataaattgtcacagcatgactcttcgaagttcggtttctatttataagtatctatatatagtatagtatagtatagtataccccccgtttggcaaacttcacctcaattagccattcagcatttgcgttaatttgcgcggcacttgcggcacattccctaataccaaaacaaaaaaaaaaaaaaaaacaaaacgaaacgccattcgtaaaaagataaatgataagagatgtgttcggacggactaattgttttggttggctgttaatttctgcccgcataatcgcactgccctcggccaccttctgctccacaaaaacaaaaaagcgcttcaacagttgcgcacgcggccaagattaatggccaaaaagtcggcgaccaaccgatcgaccggccaagtcgaccgacgcacagatagatattgaaattgattgatatttgaaaaatcatttcggttcgtacggcttggactcattattagtttcccatggatcattttcacagctaatggttggcttgggagcacgagcttcccagcaagtcgcattccaaatatgttttttttttctatttttcggctgccaagtcaattcaatttgcgttggcggctctggcgctttgaactcgagaggaaaaaaaaaatcctaaaacggtgggaggagttggccaaaatcgtttaccactagtttttgaaaactaggctagtgactaaaacaagcggagttcaagatcgctgaccgctctgaccgcgtatcccttgtcctttccgcgactggctatcttaattacgcattaattacatcaaacattaataattccacatgccagccgagcgagcggctgctcatctatctacttcagtggcagcaacacctcctcgatctgtggatcaggatggggatcaggttggggatcgggtatcaaggcgggcacctcctctgtatctgtatattaaactgtctgtcaccccctgcccatctgcagcgccctgcatcaaattgcaagccatcctggtcgtcgtcgtcgtcgttgagtcggatctttggatcgttggatcgccatcgccggatcgctctgttctctgtctgccttctgaattcgcgatggcaagttgagaaatttgcctttgatatcgaccacatgtgtgcacagcgaaaaaatattaggtggaaagttgaaaatattccgaattattcacaatatcatctgcaggattcttatttttaaaagcttccgatattacaaaaacactttcttggttgtaaatattttactgaatttgtgtaatttttctgtgtgcaaatatgcagccagttctggatcttccgaatcaccctgccttcgcgttttgcaccccgtcgctgtggagccatattttctttttagctgacgatttagtccatttcccgctcataatcgcatgaagttgtttgcctccaccgaatggcttaatccgccagatcgatgcgcctgtgttgactcaataattccctaacaactctttttacgcattttattgaaagtgccgaagttagcgggcatttcacttacctgcgtgggaaaatcgactaatctgcgaccgccccgaggagtcagtttttgtttttagagcggtaaaggacaggtaacgggccacatgtctggccggaaattccccgttgacccctgaccccgtgtccttatgacgaattcgtcacttggcgtgagcacacctggatttcccaccgcttagccagcggaaattccaaaacacctccggcccactggccctcaaaattgttatatgctctgctacgatgaagcagaagcagaagcagcagtgttttattggcggaagcatccgccaaattgcacccaatctgcagtttgaagtgctcaaaacccccaccgctcccctgtgaatttccgccggccggcaaggtgaccgtgtgctaaaacaaaatttttatatcgaaattgccgccggtcaacgcgcgcgcctgcccaatggccactttaaccacgtttcagcgcgtgttggcctttttggttcccaagctttgtttggcccacacagacagacactctactctgtccgcgtatatgcatgtgtgctcttacactcactcacacacacactcacacacacacaggcacacacaaaagccatttcggacaagttggagttgcatttttagcagcatttttgtttttctgcggcattttattcgtcgccgctggctacaaatttgtggctgctgtggcaggcttctcgcatctcggatctcgactctcgagtcgccactgccaccggttggccaccaattccagcctctcggcttcaccttgtgccccaaaagctatttaaatggtatttaaatgtgtctaaaagtaattttttgcgcatttaattcgcattttttgttcgacgagtatttggcaaagcacttaacgacatttatgagtatatttcattaaaaatgaaaacagcatcgagtgcctgacataatgcgtcataattgaggcggtttttgttcactttttttgcattgttgatggtcaaacgcgttgcaagaattcagttgacaggcggcttggctgcaaacgatggaatctagggggttaattaaatagccttttggaaaactcagcctacgataaaccgaaagcaatatacccttgctgtttgttttagttaatttaggttttagattagagaactatcccaaatgagtaattatttgttatagctcatgttgttgcatgtgcagccagcattcaaaatgttgctattctgccgcaaaatattttcacacacacgaaaatgatttcaacttgccaccagcaaccataataacagctaacagcggcaacaagtggccaggtagtcgctgcatgccacacacagcaaacaaacagcaactgtttttgctgctgctgttgctgctgcaattgctgctgctgctgctgctgcctcctgcaacaaagaaggcaactagaaactatccaatggccaccagcagcaatagcaatagcaactgcaactgcaacatcagcatcgccacatgcttgaccagccgacgagaccaaagcgagcgcataaagcataaaaaagcgcaaagccacaagaagttgcaagtcgaaaaagtcattatatgcgacaaccaagtcgtcgatattggcagcgacgccagcagcacactgagagaaatgcgtccaagaatcttgaactgcaatgtaatgtaactgcagattcatattgtttcagatgttttttcatcaatataattttgcactttagttttgccagctgcaagttttctctctgtgcagctggcagcaaacggcgactttggctttggctgcgacacatttgcttaaatagcaacagcaacagttgctgccgctgtttgttgcttgtttgggtgctgcggcgcaacagcggcagcagcaacaacaacagcagtgcccattttttttattgccgcagttggaaaatgcaaggcggacgcaatcgggggtatcttggatttccagttttcggttcccacaatgcaaaattaggtacgaagcgtcgtccccatgacgtaattagcatagagcagtcgttgttgttgccgttgtcgggagcccataaagcgtatttaccgcacaacgcgccagacgcactgcatctggaatggcaggggggaggggggtcgaagaggtgatgaagtggggatgcggtaaaggggaaaggggtcaggtggccaggttggaggggctgtgttgcctttcagtcaggtgagccattgccattgcgcatgtgtggcggcgggagaaggtggagcaggcggagcagctggacgaggacgttgccataactcatatatgtggcctggtcgccggcaattgtcgtggccgtcggggccagaaataaaaacatttcgtttaacgatctttatcgatgcgattattgattgtgtgttcatggcctggctgttgtggcagcaacattgcagctgcagcaacatgttgccggcgcagcagcaacatagcgctgctcgcatacaatttggttataactttcagaggcagcatgtggctttatctatgaaaagaccatgtcctcggttctctctctttaaccttcaattcaaattactatattaagcatgttctatttgatttgcttggcttatgtcatatatagaatggtgtcaatgacgaatatgctttaataaaataatttaattcgaatttgttctatggatgagatagttttgagttaagtagaatccgtcaacttttagattgacttaagttattagataattgctctggcaatttccatcagcgagttactcacctagtggtttatctcttcagatcgccagatcaccaagttcctttgccccacctcattgttaccgcaaccagctttcaattattagattaactttgaggcggctcagaagcaggttgcacgctcatctcagttcattttcacctggccatgcagcaccaccgcactccgctcgcttcccatttgaaattcttggcatactttggctgacagccgggcaattgtcggccatccgagtgctcctgccttggccactgtccatggagcggctgcctcctgccaaccacttattacgtaattatttagccacatcgagctgcagcagcaggaggagctgaagtgccagatgcagcatcgccctgggcacgtgtgtgccaactgacttgggcacctgtttcagccgagttcgagcccgaatctctttggtatttatgctataatttctggcatgcagccgacgagagaaactgagatgctgcagcagcatcaattcaatttgcatgccatgccctcgagctcgctgatcatccaagttcgccactgctgatcctgataagccatcgccatcgattcgaaattggatggcagatgcagtgaggcggtgttcttaagtaccagccaatttagttgcagtccagcggacacgtgggtatcgttttgggttgggaaaatagtgcggcagtgagcagttaacggcatttgataactgtttcacgcttttgcgtttgcaattaagccggatggcatagaaacttttgatcgtttcatagaccataaagttggctcgacacgctctcacccaacgaaaccgtcaaacggcgccgggcaacagtgcgtatgagcaatgcagcaggtggattttcggaaccgattgtggttaaaaataattagacatccttttacaacttatacacattcatagtcaagaaaggatggaaatacatagcttaaagtgaacatttatctttacaacaagccttctaacttgttaggttgttccttttgggcgtttattttatactcgctcattgatcgttcgaccaagccaagattttccaaaacattttttgtttgtttatttatttcgacattagttaatgcgtttataatgcgcaaaggaaacacggcggccgaaaagcaacaatgaccagagaatttgtgcgctgctactattggcgcctgctaaacaattgaggggcaattcccacgctgcgtatgaaataaattccccagctgaaattgtgcgcacaactctttacattttaatgatgccaccgcgcactgggcgaaactttgaagcagccgcgattcgctgccgagtcatttacttgttgtcgagcgccccattataaatctgctagccagcctatgacagttttgttgttgtttttgtttttgtttcgccttacttgcctcggtttctgtatcatttttcttaggctttttctcgtttttggttgacacaagaaataaactcacaaaatcacaccaaaatgtggtttctgggggccattgctcgaccggctgacgcctgatgtgattgcaaatgagcggatccgaatgtggaagacaaaatcggaatcagataaccagtatatacatatgtcttagccgtggcccgaaagtgagagcccagcgatatgtgggtgctgacggaaaaaagatagttagatcgatatcttatcgggactatcacacgcatatttccaagaaatgtgcgaactttacgcccatgacgtagttatgtttcggatgctcttccgatacaaaaacccactgagtaatgccgactagacattcgtactttttgcggcaaaagtagttcccctattggcaatgttataaatagaaacgtgcagttatcaagtgcggaagataaacaaattgagaacaataaggtgatttaatatcataaattaatataccagaagtggcacaacgaacttgtttgaaaagattaggaggagataagatgaataggaactagagaaatatagcaaaaaatgcaagcaagtatatttgagatagtatcaaaatgtaataaaattgcaattataactctgttaagctagtactagctaactagccttattatccagtgacagcgaatgtcgcataaggatcgtaatttttgatgataacccaaaggtgccttctgcttatccccatcagaaaataacttacttttccccacgacgatctgcactcgatcgcggaacgattacccgatgtgaagtggccactttcgagcggcgattacccaggcaggcagcaactaccgggttgctgatgcagttgatcttgctgcagttgcagctgctgctgctgctgttgatgttgccagactcaacgcatctttatttagacacaaaaatgttgcatgtttcgcgcttttcaccaaatgcgctcgccgatccacattattatgcaaagagggttgcactatttacccaaaaatggccatggctaatgatgatgattggccggcaaaagaagaggagcgaagcggagttgcacttgccactggcaacaacaataacagcaatatagcagcagcaacaatcgacaacttgttgctgcctcgcagcaaaatgtggggctgcaaatgttgccagcttttgtttgtatgtcgctgacaattagttagtgcatttattgtttacggcaacagagctcatactgtttagctttctggtaaggagaaaatccgtataaacattttgctaatttttggcaattttcggaatttaatatttccatagaaattgcgttggttcgatgatttgtagaggtgcgcggtggaaaactatctgatgagaggaaagttctcacatgacgaaatatttatttgaaatctttcatgtttcataaatttatgtgcaatttatttttaaacaacaaccgtcgacggcgcgacgacaacgtctgacaagccgaaaaggggagaaagaccctgatggcactcatctcccactctacttctggcccccaaaaatttccctctagacacaaaagtgtgcctaattagagctgcaacaaccagaggaagatctttccgtggcgccacgtttgttggttaggcactagaaaaaggagagcgcggcatatggatgagcatgagatgcggggagcgaagagatcaaagggccgcaattttcattggcgccctgtcggcctcgattgcgaaaaagcaaaacaagccgaacgaccgaagggtggcagaaaatggagttaatgaaatcaaagggcaatttaccagccgcccacccacacacctggattttcccgcttcgccaccgaaaaacttccatcagtgagtcagatttttggccagcgataattacaggtgttgagaacaagcaaccatctctcgggggtgtcgttatcagaaagaagaatctctcggcaagactctctcttggggggttggaaagtctgaagagtctaaggagtctagagagtctggagcgtccgggggattcagcggagtctggggaactgatatgaaagcaattagcagcagcgacttggcaaccagctggcttttttccacagaatttgtcaagctgtgactttgatctgcggaaatgttcggcagcaacaactttgaatttgatttgaaaatgcagccgcacctccatccaaaaaataaataaaagaaaaaaaaacaaaaattaaagaggagaaaaaaccaaaaacaagcagcagtaagtagcagcagcagggtcttttcttatttatagccacaatttttatgctccatttcaatgggcctgcggaggaggcggctgtggagaatgggcaggggatcggctgagcaggccgtcgtcgcccctttgaagattgtgtgctggtgctaccccctagccctctaaccacttgattgcacttttcgcagcataaaatatacatttatgtgcgtctgcaatcggagaaacaaaacaaaaacaagcagacacacagtgccacagagccgcacactcactcacttattcatttgtagcgagactagaaaactatataaaattgatttccccacccgcacaatggccgatcgggccgacaatgaagcgccattgaagcgcaaccaaattaatctttcaacgacaattacaattaattataaacgcccccttcggcttctctgcaccaacaacatacacactctcgtccagctcacaaaagccttagaatttccaaaataaaaaactgggggcaaaaaaaaaagagtccaattggcttgctgaaagttcgtctgtgtgcttgccaccgagtgtgtatgtgtgtgtgtgtatcgacagctggtggccaccacgtctggcgtttgaatttggttcaaacaggtcagctagacgaagcctgaatgttcttaccaatatttaaagcttgcacccataaacaaaacagtttaaagcattgcttacaactaattaagccttaacaggttactcttttgaaaacttaagtgaaagatgagtttgggagtattttaatattcagctatttgttatatttaattactatacattgtcccatttttgtcatcatatagttgaaatctagaaatcaattctaccaaaactctctgaaattaagacatacaagtcaatggattggctatgtggaagcgtatgtgtaaacattttctcggctggtgttttaattttcatctgtctagcgctctgccccatacacaaagcaccatcaagtcggatccgtatctgtatctgcagctgtagctgtagctgtagctgtatctgtatccattccatccatcggtccatctatctttttatctatcagtctcagcgctcgcctaattacgaaaagatgaaagcgctgtttgtgggccagcgtccgtccatgtgggcccacccacccatccgaagcatccatcgaaaacaacaccttggtggatcgatcggtggaccgacggatcggtggttcggtggagcggcgggatcccttgtcgggggctgacccaccgactgtgccgcttgttaacggcagctacttaatttcgtattaataaacatcacaaatgttgtaatagtttggcactttatttatttattttccattttatggccggaaagccaacgattggcggcaaacattctgatttctgagatatcttttcatcgatgccaggcgatttcttttcgcaacaacaaactttacacactcaaatgattgacggacagcgatctagcaaagttgttgaaacaaatttcgttgattctcttggctagttgtgcaatttggatttggattcggattcggacgcttccatcagtgaaatcgagcaacaatgttgattccatttcgaatttggatattgactttggtgtttcgactgggtgtggaaccttttcggtattgaacctattgaggcgttactatttcgagcgggttctacgtcagtgtaaatttgattcaattgaaaagcttgttttggttatccacttttcaacacatcgttagctttggtcatggaaatgtatgaaagaaagatatttttcaatttcaaagaatttatcatgagatttggcagccacaacaattctgcgaaggcatttcaagtattttattagcaaatagaaatatacgtttctatattttaagataagtacaattttccaggggttccccggacaataattataaactatttcctccgactaaacgcccccaaaaatcaaattagattaatgcgaatctaatcttatgagctgagataacaaatggccttgccgcctatttatcgcctgcagttaaatgaactgcaaatgggatttcgcggaaaatataaccaaaagacaagacagaatgcagaggaacacaaggctgtcagtgccataaatatttcgacagccaaaacagagccaagccgactcggtaaacagaaagtgtttcgaaagatgaatttattaagagctcgataagtaaataaagtaaatggaaaatgcagcaccacgaatgtgaatcgcattttccggcattgcaataataggacataccaatacatataaattcgctgatttttcacccatttaaacatatgtatatgtatttcgagtgtacatatatatgtgggataagtatagatatttgcacagattgttgccgtctgccgaatggttttccaagaattgtgggcgtggctgttgccgctgccgcccgttgatgagtgctgatattttagctagaagagccagcgaatcttggccaacagaaagccgccggctcgttgcgtcatcgctgttcaatggtgcgtatgattaatttcggttcgcggtctctttaccaactgcaactgtggttttttggtttttatttttgttttttttttttttcttgccaactactactggaaaagtgcaactgcagtcgagaagttcccacaaatagctgaagttcacttttggctgctcttgccttgcttttctccaggctttttcacattttccactcgccgagtgctgttgttgcttgccgcagttgttgcccacttttggacatttaagccgcttttggcgtgcgtacaacttcaaaagctgccaactctggtctgcagcagttgcagttgctgctgcagttgctgtttttgtttttcctgctcagctgatttatgcgcccgctacgcgagtgtaggcgcttttcatgtaatctggcgggtaatccaagtggccaaagcgtgagaactttacacataccaagttggcccggccagcagcaacttccgtatcatttgtgttcaatcagcgaacatgcaccaaatttaactgccaggtgctggattgccccggctttttgcccagctgactgggtgggtagtgggtgtgaaccgttaggcccgctcactgaaggccgtcgatttcttgggccagctgcagacccactctctcccgtttccacccgccgcccctcacgccagcaaaacaatgcgaaataaaaaacgattctggcacagattttctcacgctgataaagcaaagaaaaagaaggctgtggaaaactttgaagttgtcggctcagcagatcagcagctccaagctgaaggattcacagcgctgacaaatgtcagtcaggctcaaatcccagtacgtgtccaagataagctcgtcatgaggatgaggatgcggatgaggatgaggaatcgccagccaactgcagtggcaacttttcctccactcgacactccaccactctggctacctttctctgtcttgtggtaatgtgctcattttccttttacggcaattcacctgaaattgggttaacttcggttcggtcaagattttgctctagattcgtttggctatcataaccaggatgatgccggctgatggtggcttattattgagttagccattgcatagtttgagtaattccctggctatttttagagcctccagggcgcgtcaccatcgcgataagctgaaagacggagacaatcggacatgcagacagacggacagacagagagggccagagaacgcttagtcattccacttgttggccaagctcacccacgtaactcaaaatccagacgaggccacgaatgcaacctcggagtgcactgggagaaataatcagatcgtttttaatagtcaccattctaattggtacattcctacaagtttaagggatttgaaaagtatggggttctttggacagaaagctagttcttcagcttgaatactaaacttagtattctgctgcaatatagtttaggacttgcctaaacttttacaaccaaaactgttttttgtccagtgtggggatgggctagcaggcataaaaaataatgtcgtcgggggaaattgatcgatttaaaaagaattaagatcatcggccactttttgcgtcctcatcctgactcactgacttagtgaacgactaagccgccagctccatctgcatctgcatctgtggcgagtgcaacttaattatggtttgtttattctgcagctgccccccgtcccccttttttagtcccgccgtctggcaatcttggcccggctgggacgtgcgctttgtcattgccaaacaattgcagtcagtcgtcgcgctcttggcccgatggcttcgacctggcccgttgtcgtccatgtctgcatgtctccgggcattgggtctttctgctctggggtctgccctgatggctatcagcaatcaggcgctttgtgcgccaacgattcccaatccaatcgaattgcctgatgagcgagcagaagcagcagaagcctccggcagcacggctgaatcgttttgaggtgaacttctgcaagttgcaatttttctcgatttgcattaatcaaacaaagtcgtaaaaataatacgaacaaaaatacccgctgcagacgatagcagataagaatgggattttgatgacagtgagcgtgacaaagagtcagggggaacaaagcaaactatcttaaccttgggcgcatgtagatacccactggattgcattcggaaaatatcacacgctgtcaccatgggcagaaaatccagccaagccgtttgtttatcagcactgaaaagaattcctcagagtgtatcttagaatatgcaaaaaaaattcattatggtataattttgttaaattattaatatattttatctttgataatcaacacttctgtatgaccaattggcagtactatgcatctctatctctttaatcgaccagttttgctgagttataaattccataactacctaatcactggcgcttctgttcgacttgcatttccaagatgttagtcatctctcagattgtcaaagatatcatgtgacaatgcaatcttcgagctgatatcacgtttaggtaatagtacttagtgtgatgccattgataaatgaagtgactcactggccaagaacgcactattagtttaagttgaggagcccagcataactggtatgtccaaccgtgaaatccgagaacaaacaccgcagttttccttaaaccgccccctttcggtcttatcggttttatcactgccgcattgtttggattcacacgcccccaacaaaaagggggaaaacaacacaaacaacacaggcagcacaaacaaacaaacaaacaagcaaacgaaacaacaagctgaattatgcacagcgagaaatatttggtgagagcgttaaatgactgtggaagataccggacaaatttacatagaatcgctgcacaaatatttgcataacattttgacagtttcgtgaaaaacatgccaagaggtggtctcaaacaataacaccaacaatggccacagcaacaacaataacaataccgagagtaacagcaatggcattaacagaagcgggaaaagcggtaggtaacagtagtagaacgtagtgtcaacagcccccggctacgtcatctgtcatccatcctctgttgacgcatcttcatcacgtgcatcgtggaaagtttgttccgttattatcgtaatggagcatttatcaggaatgccagcggattgtaaatcgatagataatatgaagattgaatgaggttgatacggttacccttgagagatcgtacagtatttgctgtgtgtatagatggtgcattttcagctgattttaggtacagttattcaaaattttctaaagatgtaataattataagctcagtccggaaaattgacttttacgaataatgctaaatgtttccatttcaatgaaatagtccaactgtaaagaaaggttgtcgaataaaaagatttgtagattgcacagactttatatgtaggtaataaaataaattcgccataaaataaatctgtttagaatcaagcaaattttcgaaacgctcaaagatgtctagactatttattttgggaaatctgtgtgtgaacagaagatacatatttttgtaaattcgctaagcgcacgagtatgcggcaattattggtgttttattataaccataacgaataaatatagttaggccccattttgtggcaatcatttagacaataatttacttaggcagccatataaacctcagacaattaaagcatctatctacctaataatccgaagcatcctgctatctgcaaaaacagctgcagcattagcaaagtcaacaccacctgcattagccaaaaaagaagcgctggcaacagctgactcagtgataagacttcggggggcattagtcagaggaacgtgagaaagtgataagaaagatatgggaagatatggagccgtagcagtagcgtctcataggttggagatcgctgatctggttttgtccaacagctgggcgcacagaaaccgaaacgagtctggcaaaaaagatgggtaaagaaaatagagcagcggcaaacaatgaaacgcagccaaataaacaaaacaaatgcgctataaaagaggtagacagaatagagcaaagcgaatttgttggcatttagcggctgaaaccgaggcgaaagacaattgatgccgatggcgatgcacggggccagcgatcttcgctcacttgacttaattaaacgcttcagacagcgggtaaaaatacatgtaaaaggggaagttcaaatcgaccgcgaaaggggcgtgtgggatatatagcgcagatctgcgagggcaagtgcttatcgcttatctagactagagattacactgctcatcctgcttcatgaatattgcgcttcttactggatcccagcggattcagattcatctgtttgttgccgttgaagctttggatgtggctcccctttcctttcacactagaacacacgaaatgcttcttgttattgccgctgtctctctatttgcttgagttgtcagcgccagcgacaaaaacgtggaaagtcgacgcttcaaaggaaatcacattgcgtatacgcaatgtgcaaataaacaagacgagacaaaaatcgcaaacaaacatggaaaaatcgacatcgaccaaatggcgacaacgtagctgctatttccacagttttattagtttggccagcattttaaccacacgtgccagccatccaagcattcacccatctcccatttagaagacctattcagattcagatttccccattcccattaccatccatctgcctttgccgagctcacaggtcgcgaaaatctttttcgcactgcctacatattctttgatttgcctgtcttgtgtctggcgaaagccaaagacatcattcgcctgtttgttgctgaatcgaaatatgtttcccatgtttgcttgggtattgaatattgtggttaacttaaacatatctgccagcatatcgtatttcctattggaatgtctttaaaaatgcttttaaatgctgggtaaattgacgcgtgataaggcaaactatatgctagggctagagttcaagtcgtaaggaagttcgcgcttttgaaactatactatcgtctttcctggaagtgggatgcaatgtatgaacattaaaatacgtttaattatttagcactcaacgctatctacaagtaaataactaccaccccattgtcgaataattatcccactgataagagcaagttgcattacaccccaatgacaattcttagccagtgcctaggacaacacggcgtatgcgcaatattagtcgtcactattgacacttcagtggttcgcacttatctgcctggaagcgtaatcatgcaaatattatcagagccttcagtgaagtaaattgaagtgtcactccgcgccccagaagaagacgcgtgctacaattgttaagttttacccagacaaataagatagtgatacatacatatatatacatatgtgccagcgcactcgtagtatttgtttatggcccgataaatcactgacgtcggggacgagtctacgcaagagaatccagcagtgacacaatgtcgcgagccaataaaaatgaatcaaaaataatcaaataaataacactcgaacgcattcggaggaatcataaataagcgcgtcggttaaggagggaaatttatatgaattttattttttggaaaaacttccgctgacagcggcagcagcatctcggcatcttcttctaccaaatgtgggtcactcgccgggctgccaaaataaatcgcctctttcgttcagccagccagccactcgcagccagtattggtagattaaacaaaataatatatatccatatacatctgtatgtacatatatatcggcgacttgacttttgagagaaaaataataagcgaaaagtgcagttcacattgcacaattgggataaacccaaagggaacaatgatcgccgtggtaatgactatgtaaattgcaatcgcttgaatgaatgaagtgaatattgcatgaatatatatgaaagtctatatatacagcagccaatttgacccggtagatggcgccagtcggcgtgtcgcatgcaattccgctgattaattcaatgcaaagcgacttaatttaattttcgctcgacaatctgagctgagctgaggtaaccacatgttggcgccccatcgtcaagttgcccgttttttctcccctaatgttaaccgcttttcttgatggatttgcatgaatcattggcggcggcgttgcgctcgagaggaaaagcgcgtcggccccgaaatgaaatgcaaaaaaaaaacaaaaatattatttgaaatatgaaaagttattttaatgctccctgtcgctgtgctgtctgtgtgctaaattggggagcaggcagcgaggcgacagcgccgacagttttcctccgttttctttggcagcgcttccttttccatagtggcacttgtacttttgccagacttttccggaagcgcgtcgcgacacaccagcctttttgacgtaggcactggcccaaagttgttgacgcactcggcaaacgcacaaaaacagggccacccgagaggccaatgcgcccggaacgcctgcaggatatcggatttcagttcgattcctttatcctttatcaattgacattgacaaatcaaatgtgcgatgaccacttctgcacggaaaacaaaaaccgataagatgttattttcaaccagattgttgaattatcaaatcttagcttttaagctattttatttggcaattacgcggttaatacaactcattataggagatacgtatttcattggcattccaaatacaactgtatacttttttcgctgagtgtagccagaaaagaccaatggcccgaacagagagcacatatttttaagcgcataattaagtcataataagattggcgggggcggcggggttgaggcaatatgatatgccaatttttggccgaaccaaacacacgcagaaggcaaataaaaatgttcatcttattattctggctgggatttctggttaaatcaaagcgcgaaccgctgaggggcattcatatatgtatactatatatggtagaagttgggtggggaggggtacgaagcgatctgaagtaggagctgttcatgacaattgtcaacttgttttgcgtgtgccggtgtgttgggtgccttcaatacttaatcgccttgtgtgccgtggacatttgtgagttgacgtttcggagcgctggcacaccaatacactcgcgcacacacacacacacaggcccatgcgcacacacagataggcacgaacacatatgcagcctcacaatttgggagcgtgagaaagtggcgcgcacaattaaaatgctgctttatggcccgacgctgggccaaacataaattataaacaataatttatcttttaatatactcaaaatgttatagaataaatacacctttcgaataattacactggcaagaaaagtgttgcaaaaatatgggactcctttagcaatcataaatgccgaaaactgcaaaattaagctttgaatgtttgatttgttcaaacacttgaacggaatttacctttggtaaatgaagtatttctttgtccatgcttgcgtgtcgctttctcacagtgtacgttttcgaatttaaaatcacattatatgtacaatatacgtacgtatatccatatggacagcttcgtctggccacgcgatcctcatcgcataaattaacatttgccgggcattaaatcagcgcagactttgcagactgcttggaattagatatattgtagtattagatagagtgcgaatatgtatttcgtttgccctgccaattgcataacgatcggtgtgtttcattcgatggatgtgcactttcgtcccgccacccaccaaaaacgaaaatagatccaccgatcgatgaatgatcaccatgatcaccgccgctggtgaatcacttggacagcgcacgcaggtctcaattagcatgtgacgagcacttagacagcacagcccagccccgccccccagccccaaaatgcccgcccccgcccaccagacacgtgatatgccggctaatttaagcattcaccggcggcgggggagtggcaaatcgcgatgcgcaagaaaagacacaagtttcattgccaatttgtcggcattgatgagtcagtctgttgtgactcttttaatatgtaattgggtaacttacaaatgaatatatttaaaccgcatctggggccaaatctatttatttgtaataaaaagcgtaaacgtagagacacgtgtttcgaggttgcaattgttcaaaaagaagccttcagataactgaattgattacgatcctataagatataaagctcgcatttttcttgtcatctgtgctgcaaacaaatagtccaacataaatttttccacctctgaaaagtgccagacaactttcaacttaacgatctccaggcaacttaagaataaaaaagaccaaacagacgcgacgatcatgaaaacacaaggaaaaattcgcgaagaatgcgagtaatttctaatttgctattttgtttacggctgtctacgagaataatttcaatttcattgtttttgggcaggtggaaaattccgcaattatctattcactcagccgtatttgttgtttttcgcaaacgtttgatgctagacatcaccgaaatgggggaaatcagcgaaatcagaaagcgaaatgcatggcctaatggtttgtctggtctttcttacagcacagaacgcagaggtcacgaagatcttctcgaagccgagcaaagccatcatcaagcatggaaagaagctgcgtatcgtctgcgaggtgtcgggtcagccgccgccgaaggtcacctggttcaaggacgaaaagtccatcaatcgcaagcgcaacatttaccaattcaagcatcacaagtgagtattaagtgagtgtccgtgatcgaagtgcgcatatctaacatctccttccatgggttcacccacttctccccttgcagaagacgttccgagctaatagtgcgctccttcaatagttcctccgatgcgggcaggtacgagtgccgggccaagaataaagccagcaaggcgatcgccaagcgccgcatcatgatcaaggcctcaccaggtgagtctaatacatatgttatgtatgttagatggtctgttcattgcgagtgatgcgtgggtgttgcaacaagcatcaatgtatatctgtagatatgtcgatgttatgttgcggccaattcggtatgctccaattcacttgttatttatggccacatatgttatgtttcacatctttgattcagctaaatttatattagaatacctacgccaaatccttgtaaatcaaataatcaaatctcgcctctatttcagttcactttcccacggaccggtcagcctcgggcataccctgcaatttcgactactgcttccataatggcacctgtaggatgatcccggacatcaacgaggtctattgtaggttagtactgccctgctatctaactctacatagaaacttaaaatacataaacacatcggtcaactaaatatttcattagtttaatattagtttatatgttgtctaacaatgagaccaacttagtgttttgaatattttctccctgtgcactcgatgcatcctgccgcacagtcgagctagactcctcgaaactgatcccgaaactcaagtggttcgcttgataaacctcgctcatgtgacagctgataagactgcatgtatatatgcatgtgtgtcttgtaatattttggcatcacattacacgctcggcaaccgagcaatccgggggcaattaaaaggccacaaatttcgtggccggagtggagaactccacaaaggctcacttgccggcgtgtgtgtatgcaatgtgaataatgtctttcagcgcctcgttttatctggcagtgcgagtgtgcacacgcaaagcgatgaatcgattcgatccaatcggatcccaaaaaagcgcatttcactcgctatctcgaatgggtattttttttttctcagtttttgaggagacgttgcaggagtgaggagggaaatgaatttccattttgatcccactccttccgcactttccgttttttgctgaaattcgctgtatgccacacacttaatttgtttgctcttttgtttatatttgaccggatctttgagtggtcaagcaaatactgcaccgcagttcatggccatttcgatttttcccacttgtgtattccttaaatataattatgtttcgaaaacaaaatgcgatctatactaaatctgtgcaaccaatcttgtctgtcttttcaggtgcccaaccgaatacttcggcaatcgttgcgagaacaaatggcccgacagtaggtacagctctcccgaatcatgcaaaaattatcagggaggttattactgctaaaataggcacttctatagcatcgattgttttgcgagtcgagtcaaacgcgagttatacacaatacctaaaccgaatccaatcaaattaaatcaaatcaatcaaaccgaactcagtgcccataccaaaataacgaataacataaactattataaaatgaaatacgataacgtactacaacctaaaatggaatggaatggaaaatccaacgaaattcccattgcacagttcacagcaatcctatcacattgaaactttctgcaaagcatccgagaacagagaaagtgaaataaaccaaatatagttgataaagccacaaacacagccacacacaatcatacagacagaaagtacaaaaacagtatgcagaatcggaccaaaatctaaactccagacacccacccaatcacagacactccacacacacagacccccaactatcaacagtcactttgtaaaacgacgaactaaaagttttattagagaacacattccaaaaagaaacaaagtaaagtcttagtaatgaaaacaaagagtaaacgaaataaataactaaccaagttgttcataatatatataattttataaactaaaaaacatattaagagcaatcaataaaaacgagaagaatgcaaataaatacgaataaaaacaaagggtgctatagaaggtttattttaaatagtgtttacataggaacttaatttaatttcaattcactcatcacacgaaccacaccaaccaaaaccacaagtaaatgtaaaacaaaaaaacaaaaaacagcaaaacaaaacaaaataatcaagcaactcggacatacggacggacaagcggacggacaccggacaacaggaaaatttgactaaaaagggacatttcccccacaaagtactgagaaacttgtcgaatcctttggctcagcccacacttactcacccactcacactcaatatgaatatccagatttacgataaaaatcaacagaggctctcttagttagatacacgaatatcaacacgcataaacgctggcaagttagttacaaaaaaaaacagcactcacccacaaaggcatcgaactgactaaacatttgaaacgggaactgaattttgttttgttttcagtgttattatttgtagtttgcaaatattaaaaacaaaccacattcgataacccattagaatttatgattttcaattaatttaagttattactcgttattagacattaacacttggctgtagattttgacaaaccaaaaaaaaaatacaccgaaaagaacccaattcaaatcaaatcaaacaaaccaacaatttcattctgctcctcgttttcttttatttggtgattgtttttttttttttttgtattttttcttttaactaatctcctgcgtttccgatttgggtaactctgttcactattacttccttagtttgtgctcgtttcctccttaagtgtaaactccacggcaaagtgaaatcttgagctcgaatgaacccaaaataaaaatatatacatacatatatcaaatcactaattttcaagtagttcttgctaaagaccttctcttcaatatccttctgcatggattttttcatttgagagcgcaattttatgcttgtagttgcccctaattgtggaaatggtgttagccagcttttagttagcagtaaatgaagaactgaaagattaatttttaattttatttataatttaatctcttcacagatattttgttgcaatctacggccaaatacataccttaaataacgactattaatgcatagaattttgtttcattatttttatgattttataaacaaaacgaaaaacaaaaaaaaaatcgaactccctgcactccaaaaacgtggacaattgtaattttttacgtttattaaaaaattagagaatttgttgcaccagctgaccatgcccaaaaacccatcaccgttctcaaagtttgcaactacaaagaatacatatccgaaaacagaaaacagaaaacatttcaaaattcgtacaattcccctcgcctagagttccttcttcccgagcgaaaagttccagatccagactgactttagctacgtttgttcttgtgcacggtgacagaatatcttaaatgtataaatcggatgtatgaaagctgagcagaattttaaattatttattttacgaaatatatcacatacatataacatctaagatcgaagtttgcggttcaaagttcgagagcaaagcattaccgattcgaccctgactttgacattgttgcgcttttgttgttgtatcatagacaataattttaaaatgataacaaaggttgacgtagccgagaactttgtaataaatcctgtaaatagctctcgttttaactaacgataagttttgtgtacatttcaactaaggtaatgcaagcccttctttaaccgtaatttattgtatttaattacacctaaattaaacgtaattatagctataagctcacacacacacacacacacacacacgaacaccccacacagacaccatggagctacttaatttcgaaatactattttatttgtcctcgttttttttggatttgcgcaatttcaacaccaaaatatgtaaaatggcaaattagtttttatttcttcacaatgtgtatgttgacatcagtttgtatggctaggcgtaaagcaagaaagtgcgtagagattatttttagttattttaagtggcaaattttttatatatttaattattgaaagatttataccaaaaataccatgtaaagt

SEQ ID NO: 22079 - DNA, 2124 bp, DROSOPHILA
atgagtcaccaaaataagcagcaacagcaacagcagcagcagcaacatcaaaagcaacagcaacaatcgagcaaattgcaaggacaaaggacacaccaaccccccagcagcagcagcagcagcagcagcagcagcagcagcagcatcacgcagcaatacgcagcagcagcagcaaagcgcagcagcaacactcgctatcgagattttgtacataaagtcggggcaatagcagcaacaactttggaggacgccatgtatgcgcaacatttgcgcaaatggagtctaaaaacaaaaaagcaactaatgccattgatattgctaattatcagctacatgttgctactaaacacatgtgtgttgtcgtcgtcggcgacgacgcagcagcaacaacaacagcagcagcagcagcagcatcttccaagattatgggaaggcagtgccgaagaaagcagctactatataccactgagttcggataatggcagcgggagcagtgaaagctccgccgagagcggtagcagcagcagtagaagcagcagcaacaacatcgacaacaatatcttaagtaggctgctcagcctcaacagcaatagtcttagtagccgtagcaatgttaagttaaagccagcaacagtattcgacgccggcagcagtacacccgctcagcaggagcaacatgtggctgccgtgccagagcagcagcagcagcaacagcagcagcagcagtcaatgcaaaaagttccaaatacgttaatcaatagtcaaatatataatttattatacaatggcatgcccagcgaggcggcgagcagcaaaatgcgtcgccacattcaaccatcacagctgccacatcagccagagagcagagcgcaattaccgagcaactacagcagtcggccggcggtgcggagctatctaatcgagtcctacgagatgccagagagcatgttagaggatcgcagtccggagcaggcggcgcgaagtcgtcgggatggcagcaacaccaacggcagccggcagcaacagcgcaccggccaccggcaacagttgcagcaggacaagcgcgatcaccgccgccagcggcaggatcagcagaaggagcagcgccagcagcagcagcagcgtcagcacaagagcggcaacaagcaccagcagcagcagcagcagcgcaggaagcaccagcggaagcaccagcgatacaaccgctattgctccgcccgagatcccgcccagttggcctttgcggcacccaccgttttccagggtgtcttcaagtcgatgtccgccgatcggcgggtgaacttctcggccaccatgaaggtggagaaggtgtacaagcagcagcacgatcttcaactgcccacgctggtgcgattgcagttcgcgctgagcaactccagcggcgagtgcgacatctacagggagcgactgatgccgcggggcatgctccgctccgggaacgatctgcagcaggcgtcggatatatcctacatgatgttcgtgcagcagacgaatccaggcaacttcaccatcctcggccagcccatgagggtcacacatttagtggtggaagcggtcgaaacggctgtgagcgaaaattatacacagaacgcagaggtcacgaagatcttctcgaagccgagcaaagccatcatcaagcatggaaagaagctgcgtatcgtctgcgaggtgtcgggtcagccgccgccgaaggtcacctggttcaaggacgaaaagtccatcaatcgcaagcgcaacatttaccaattcaagcatcacaaaagacgttccgagctaatagtgcgctccttcaatagttcctccgatgcgggcaggtacgagtgccgggccaagaataaagccagcaaggcgatcgccaagcgccgcatcatgatcaaggcctcaccagttcactttcccacggaccggtcagcctcgggcataccctgcaatttcgactactgcttccataatggcacctgtaggatgatcccggacatcaacgaggtctattgtaggtgcccaaccgaatacttcggcaatcgttgcgagaacaaatggcccgacagtagatattttgttgcaatctacggccaaatacataccttaaataacgactattaa

SEQ ID NO: 22080 - protein, 707 aa, DROSOPHILA
MSHQNKQQQQQQQQQHQKQQQQSSKLQGQRTHQPPSSSSSSSSSSSSSITQQYAAAAAKRSSNTRYRDFVHKVGAIAATTLEDAMYAQHLRKWSLKTKKQLMPLILLIISYMLLLNTCVLSSSATTQQQQQQQQQQQHLPRLWEGSAEESSYYIPLSSDNGSGSSESSAESGSSSSRSSSNNIDNNILSRLLSLNSNSLSSRSNVKLKPATVFDAGSSTPAQQEQHVAAVPEQQQQQQQQQQSMQKVPNTLINSQIYNLLYNGMPSEAASSKMRRHIQPSQLPHQPESRAQLPSNYSSRPAVRSYLIESYEMPESMLEDRSPEQAARSRRDGSNTNGSRQQQRTGHRQQLQQDKRDHRRQRQDQQKEQRQQQQQRQHKSGNKHQQQQQQRRKHQRKHQRYNRYCSARDPAQLAFAAPTVFQGVFKSMSADRRVNFSATMKVEKVYKQQHDLQLPTLVRLQFALSNSSGECDIYRERLMPRGMLRSGNDLQQASDISYMMFVQQTNPGNFTILGQPMRVTHLVVEAVETAVSENYTQNAEVTKIFSKPSKAIIKHGKKLRIVCEVSGQPPPKVTWFKDEKSINRKRNIYQFKHHKRRSELIVRSFNSSSDAGRYECRAKNKASKAIAKRRIMIKASPVHFPTDRSASGIPCNFDYCFHNGTCRMIPDINEVYCRCPTEYFGNRCENKWPDSRYFVAIYGQIHTLNNDY

SEQ ID NO: 22081 - DNA, 12396 bp, DROSOPHILA
ctgcgcgtggtgttcctggggggtagaattttgttgtactgctactacgctgctgactcctcctccccaacgtcacctacttgtcgcgcaatatggtcagcagttcggccacctgggaattgcactcgagtagcttcaggttgctgccgtactccgccaggatctcctccgatgtggcagctggcaccgcggcatgtgcatgcgtgggagtgtgcagctgttgctcctgctcctgggcttcctgctgcggctgctggtgatctgaggaactgctgccctcctccgactgggagccgctgctgctgggcgagccggtgcgcatgactcggctatttggttgctatcactggctacataaaataaataaattaaaagaattgtacgtagcactttgtcctcctagcgcgtgcttggcttgctacggccacactttgtcgcggcattgccgttcgttgcgcctcggtaatttctagcaattggcagttagcgcacgactggccacactcagcaaatcacctcgtgtttcactcgcaaacaaagaaaaaagtgcattttaattactgattactgcattgcgattaggcgttcgcgaacaacaacgttttcttgcacatcagcggactcaaagggcgcgcgtgggcaaggcattgagcacagtgtctgtgtgcgtgagtgtgggtgcgttgtgcgtgcgtcgcagtgttggtgcgtgtgcccccatgtgtgtgtgtatttgtattgccattaactaataaacaataaccttcgggccacgacgaaagccacgaaatcggcaccgctgctgttctgttctgtactgttccatctgaaccaaccagctgaacaaggagactcatagccagagactaaaataaatcgccaacgcgcttccgcccccccgcgagaggagcgcccagttcaggagcggaccagcggcgatccacttcccatatccatatccaaacagaatcgcactcgcccaaacacacacacgcacgcaatggcggacgtgagcgatcccagcgaactgttcgacctggagctgcacgacctggaactgcaggacgacaaggccagggactccgacgacgacaggatcgagctggacgatgtaagatatagcccccattccatgccatcccgtgccaatgcgtgccgcaccatcccccgatgcaaactgcgcagcaacaatttccctctttgtttaccttttctgcgctttgtctgccagttttcctttcgctcgtctgggcatcccgattccacacccccgaaccagcatatccaccagccgcacaccctgcaaactgggcttatctgctgcgcaaatgtctggcgtcattcggtttcagtccagtcgccgattattcagcgcatgtacatgcgctcactcattgtaccataagttcgactcgatcagagaaaacctccttacgaaaccaccttcgattgatatgggccaatcgaagccagtggtggtgtccttcaaactaatcagccccaattgcccgccacactccatggcagccccctgcttgccaccgcccctgtctcagctgataatgcaacaactgcaaaggtggtgtgcgaaggagagggaggcccaaaatgaacgccgactcgctcgcactctcgcaagtgtcttagcttccacttagaaaacgaaattccttatcagcgtgccatataaaattagaaaatgagaaaaacctccacgcgccgataagggagcacaacaaaatggaaggaaaaagggcaggcaggcaggcaggcgattgagatcgaaatcgagcgatcgtcgagccaaaccgtcgtgtttggggtggtggtgctatacggaaccagttgtaactgcaccacagtacactggaaaagaatattagtttccatagtatgtagtcattaagtaccgaattactgattactaattgtgctaatgagcggttcttaaattgataagtttgtatttaaacgcttaaattacttcccgtattcaatactagtcgcaataaatgcattttggctaaagcaagttgctaaaactcttaattcgaatattaaaagttctaaattggcctgaaatatatgtaatttagcaacaatgtgtgtacatatgccgtcatcttatgatgtcaattgatttatttttagacaaattgtgtaaagtaatggcttaaaagtacgaaaataatctactaaaaagggagagaatagctcttgggtaattatcatttttctttgtgtattattggttttgtctgcccgggggaattacatagctggagaaaccttttcggtgttgataagaacctatcactaccatatcgcacaccttttccaagacctgtcgatttacttgatttacgcaagcgcgcacaccccctccctccgcccatccactgactttgtatgaacgctataaattatgatggatttgttaattgaaattcaccgccaacgctgacgaggtgaaccagtttttaatgtgctgcgcgacgagatgtcgagatgcggattcctattccgatgccgccattcaattgaactttagtcaaaaatgttctatacaaattttaggcatgacgagaacgacgacggcggctgcggctgctgctgattcttctgaatctgccgcccctaactgtggccttcctccgattggagcagccgcgtccgagggggcggcaaatggacccggaggggacgaggaacagcgccagcatcgccggcagattatttggcattgttccgagttctaaatttagtttgtcattaagcgaaaggtgtgtgtgcgtgtgcggaaagtgtacgaatgtacatctgtgtggatgccacgctctttctctctgtgtaaataccgaataagctccgtgtggagtagtggacaaatcgaagggtggtggagaaactcactggcttcacatactccaaagacggatgccatccgagatcccagagcgagcccctactactactccgatgcgatctctccattcatcggaatctcccgctgcttaaaacgaaactgaaaagtggggcagcaccgaatggggattaagcatgcaacaagaaaaataaaatataacgatatacgatttcccattttagaactgattcttgagctatttttattactaaaaaagcatattaaaattgtgggctactagctttaagcaacccacatatatattactgctggtataggctgattttgaagtatctgtaagatttagggcctcttgtcttcgtcgatgcccggtgctgtgtaactttcccttctgctgtttgctcccaagttcgcaataactatgattaattgttgattttttcgcatgtataccgctggcagttatgctcgcaagtagacgccatctcactcacacgcctctccgtctctctttcgcatttgcaggttgacctagaaccggaattgtgtattaatctgcaccaagagtgagtaatgccagtgctatgccgccacatcggaggacgtgactgtgacgtgactttctgagaatgcggggtagatagggacccagatacgatcggacttcctctccagccagctgagcagcagttaaatgaacagccaaattgccaattatcagctcagacttgtttacacactgcaaacgatggcagtgatagcatatgatatgattgatttggcttagagccttatcccggccagacgcaacttagcctggtcgactctggacaaatccagatgataagggaccaatagtcgacggactatcgaactaacggacggacccagaagtgtttacaacagctattgactaccaactagctgtcactcggcccctggccgccgcctcttcaatgagccagctagttcggtgtgtaaacaagactcacggcaaacactcgacggcaataatgcgaaagctggttgagagtggaagtaccagtgccagtggatgggggagggaggagctgcacggaccggaatggaggtgacaattggcgcgtgcacgccatgggatttatttatagcacgtgggctgctcctttcccacgctagacgaaacaaacgcaaacaccatcgaacagaacagaagacaacaattaaatcagtcccctaaccccaatacccaatttcctattcccaattaatagcactgagggccaggagaccatacagctctgcgaggagaatgttaatccaggtaaaatcaagctgggacccaaggactttgagctcaagaaggtccttggcaaaggtggttatggcaaagtatttcaggtaagtaaatattcactaatccgggttacggatcactaatattctggtttatttcaggtgcgcaagaccgctggacgagatgctaacaaatattttgccatgaaggtgctcaaaaaggcatccattgtgaccaatcaaaaggacacagcgcacacccgcgccgagcgcaatatactcgaggcagtcaaggtgcgatcggtcacggattgttgtcttcccattcctttaaacatcatttctctaccttccttagcatcccttcatagtggagctagtttatgccttccagacagacggaaaactataccttatacttgaatatctcagcggtggagagctgttcatgcatttggagcgtgagggcatcttcttagaggataccacatggtagctattaattgaataacgactatgcagacaaatactaacatgctcccactctttggcagcttctatttaagcgaaatcattttggccttgggccatctacacaaactgggcatcatctaccgcgatctgaagcccgagaacatactgctcgatgcacagggacacgtgaagctcacggacttcggactgtgcaaggagcacatacaagagggtattgtcacccacaccttctgcggcacaattgagtacatgtgcgtgcgcccgcaaggcctcttttactttaactccctaaggagcaaacgaattttaaatttaatgtatgattgattcgcttgcagggcacctgaaattttgaccagaagtggccatggcaaagcagtcgactggtggtcactgggcgctctcatgtttgacatgctcacaggagtcgtaagtgaaaaaccgacgagtgtttgataatccttatgtttaatgcttaattcgattagccacccttcaccgccgagaatcgcaagaagaccatcgagaccattctgaaagccaagctcaatctgccagcctacctcacaccggaagccagggatctggtgcgtcgcctgatgaagcggcaggaacctcagcgccttggcagcggacccgaggatgcggcggctgttcaaatacacccattcttcaaacacgtcaactgggacgatgtgctcgccagacgcctcgagccgcctataaaaccgctcttggtaagtgacattcaaactaaatgggataaaaagtctcaaatattaattctggttaatcttcaacgcaacagagaagcgaggatgatgtctcacagttcgatacaagattcacaagacaaattccagtggattcacctgatgatacaacgctaagcgaaagtgccaatttaattttccaagtgagtagacaaattagttggggtaaagaaaaggaagtaagccagggctaaaatatcaagatagaagtcgaagatattatattttctattaatttttaatctttaagggatcttttttgggtaataaatacttttttaaactctagactaagcctaggcaagggacctattttccgactgcgtcgctagcgataatcagcaccgcattgaaagtggggttccttgagtggaatacccgtgggtccatccgtaaactcacagaaattcaaaccgatccgccggaagggatggcaattgctcttgggattaccccatttgccgcgatatgttagccaatccggcaccagcgaccgaccttttggaaaagatagaaatgcttagcaaagaggggaataagtataaagattttcctaccataggatctcaggttctcgtagcttatgtccacggccttccaagtgttccatggcgttccgaatccattaatatcatacaggcgtgccactttaacaaagcgatgctttcctggcgcggtccatagaccatgtgaccccttggcggcaaacagaactggatggttcttgaaggttgtcaccgttttggggaagttggggcgctgcaagatacccttgcgcgtttcctggcgtcggaactcgaaggatcccgtcaaccgattatagctgtaataggctcccgcatcgtgggcggatacatacatggcctgtggctcggcatcgccgttgaaatagaggctcatgtgctcccaatcgcccacgtggctgccgatatccttacgattgcccagacaatatccatacacagcaggaaagggaatccttcccagaggacccaagctcacggtgcacatggtcttaccctgactgtagggataaaacatccagtatgtcacatgaaaacccggcagcttgccctttcctgggccctcctccttttcgggcgcttggccaatgctgttctcctccagattgtcatcgggatatgtgccgccgctgaactttacattgtccgccaggttggcaataaaattgttcactggtactccgttttccggctctggctcggaatcctgctgtacgctgggcttttgggtggcttccattaccagttcttcgtactcgttgagttgattgtactggggcacggttggtgactcccgtttaactcgctgaaagagtgggaacagcctggacgatcttcgaatggtgtcattccgttcctccagcggatcaatggacacgggaatgtagacacctcgtgtggtagttggtggcgttgtgggcacaaccggcattgccggtgccctcgtcgaaggacacaagttgaccactccatagatgggcacagctttctcattaggatttcgtccgtacagaaaggatttgtcgttgcccagcagctcctgaacttcattgttcgtgaccagatgggatttcgttgaatactcgcgaaacggaactcctggccggaagctgctatccttgtccatgggatgaacatactgcagaaactcctccacgcccagcggcatgaatttctcctccggcgccagccagacgatcggtgcccactgtttgatcaggcgctcgactgcaatgagatggaaaggccccagataggcacggttagcacggctagcttggcttttaattagcgcccctcgaaccgcatggaattagccaacacgttcggccatcgccccctttccgccactctgtactagctctgattttcgtttctcaaattcaagtgtaataaatttcactttcacactcgaagttcggccattaagttggcttggttaggtgctgctcctccacaaatcgctccactgcccttactgccagcccgaaagcaagatgggcggtaatgtttgttatggctaattcgcaacatttaatggcacccgaggtgggccgaccattattcgtccggctaccgctgttccatataaatacgcacttgctgagccgcctgatggggcgactgccaaacgatgaagtcgtccaactaaatcgtgacggaaatttctcttggtcacacaaagaaaacaaattagtgggatgggtaaacgggtgaatgaaagtggcattacgaagccctaaatgataacttaatcgtatttattatgtggagtaatttcaaggtggataaataagccaagaaattcaaattcaaacagagcttgatgagcacattagatctcaaaatattagcttttcgttccctttgattcttaacatttcaagtcttatctgtaacccaaggaatactattcgttgtttggcaaaaatatgactacccaaatatgtaatccatgcatgggaaccacttggacacatagcgattggtggtcacatccattgttgtttcggttgatgcatacctacttctttatctaatggcgatatatgtgcatattgcacagtagcttgttgctgttgctgctgcagctgcagtgtctgctgctcaaaggaggcgggattttcattgttttggaccatgtggtcatttctgctggcattgctgctggtgttgtcgatgaaagtggcggcgacaccagctgaagttgcgttcaagagtctcatgttgctgctggcaggcgatgttgcggctgctgtcgtcgctgcaacaccagctggcagttgctgttgctgctgctgcaccatttgctgcgcctgttgtgcctgcagcgctgccacacaaaacagcagcagcagcagcgctgcctggcaatgcagcaacgaaagtgaatttgttttcaactgcttggacatttcgcgaatgttgcccactacgattttcttttatatattagttttgcttcttgtattattggtttttgttgtaacagcacgtcgtggctagtgcttatttattggctagctgtgttgtttgattttcggtttttacccacgattcgcgaacaaagcgtggcttttgtgttatcggctggaccgcgttgttattattttcacacaactcgaacgtttgccaattttacccatgggtttcttacacatttttcgtttattgtggctagttagcgcatttatgttgccttttatgtggtgacaggttatgtgatgcaattgtcatttattttaaccaacttaacacttccgcgcacccacagtttgagcagcatgtggccaagtctcgttctcgacccagtttctttagttggccaacgaaaaggctcaaagagaagactcaatggatttgagtgacttatgcacgtggacgcatgcgcgccgagtttctctcgccgttcagctgctggtctcgttgcccttcaactggtttttgggtccaccaactggtaatcccgatagccctgaaccagcgatgacaatgcacgttggccccaagaatcaatgtcaccgcataatgaataatgatcgctggtgaaatgtggccgttttgggctgtgtgcctggcttgcaaaaaaaatcagatatgcttatgtgccgtcgatctactaggcctttctccagcacgaaagtcactccaagttgccttttttcttcggcgtgttttctttcttattttgtttgtttctttccctggctggatcggctgggactccgcttggctgggctgaccgaacgctttgagcgcttctgtgagactggcgatgagtgcagccacatgtggccaagtcggtggattggcgattcggctcaatgttttggtttgttcgctctctttgccgtgctgcatttcaagccaattgcgcaccgagcagcaagtggtctttatccccaccgcctctcttagccgcgtttttgttttatttgtttacaaacatctaagttggcccagaccaggcgagtcgaacgacccttgagctgctttcgttcaccgttttggggctcactaagctgtgtaaagtgtattttgcttatggccttacgggatttgtatgctaaatgtgtggttaaatattgcctaattaaggttttcgagtctttggacagccggaaacgtagtttgttatgaacaagttggaaaagaggtgtaaataaagtcagaagctttctgggaagcgcaaaatggcaatgtaattaggtgctaaagagttaaacaaataaatgttttgtcatgtcataacagcggctgattttacaactaactataatatatatatatgttaagaagattaaagaaaaccactttcttagatttcgctacaaaacgaaactggttatcaagaagctgactgttgccattagtttgacaagaactgcctttctggttatcacatctcaaattggataattgctgaatgatgcctggccaatcatcgtgtgagagatcaagctcaaggcgataaaaccgtactgggaagcgcatggatttatttcgcacctgattcaggccgcaattgggattctattagaacatattgcggctaatggaaaactttctcatcgcttcgctggcttgcgcggcacacctcgaattattataacgccttagtgggtcagcagtcggtcgcggttccaattaacgcgactctgctctcacgtacatttcacctggcggtgacaggtgcagctccagtgtcgcgaagctcagcttctcctcctctcgatgcggcgtcacgcatttgtgtccagcctccgtgccggtggaatttacacagatgaacgcacggcagccggcggcttttaattattttattgcatttgccggtggatttcgtcaaggcatatatatttaatgaatgtctctcgctcctcggcgggtctggaaaattatgtaaaatgtgtgttacatcgatggagcacagctctggctctggctgtggctttggcgggcggcttgcataatccctgctccgacagccagtggggcgagggcattattagtattcaagacgggattcggatcgaatcgagctggactagcgcgagcggcagtagttgcccgatccaaattcaattgcgaacacacacagacacacggcggtggagcaagtgggtcagggatttggggagctatcatcgagtcacactctaaatggcaagcaactcaaggtgctcattgtgttttttttttttttttctttctttctccttattcgcagggtttcacctacgttgcaccctcgatactggaggacatgcatcgggccaaccggatgccagcacgctccccacgacgcactccccgccagctgccggacagcagcttccgcctgcagttcccatcggccaatgtgggcgccaatgcgccgctggccatgcacggtcattcgcagcgatccgggatgtttgcacgggccacgccgccgcatcacatgcagacatttgcgccgcgtccatcgccggcgcaggacgagatgatggacgtgcagggtctgccgatggtctaaaggctggagcgattgcttcccaaccaaccaacccatcccatcccgtccgttccgtcgcaacccagcaactgcatcataagcttcctctccctaccccccaaaaaaaaaaaaaaaaaaaaaaaccagcaaaagattacagaaattgacagttactattatgacgtatgtggagtgtggacttggttaaggatacggaatgagcaggacgatcatcaggaggtggcagaggaggaggaggaggctgagcagcacgaggagcacatgacctcagtgcgcgaaattgtttttgttaaagagaagcgcgctcggatcgcgcttttcgatgtttatgattatgagaatgattatgaatatgattatgtttatgaggcagacggagaagatgattgtgctacgagaaggaaagcgttcgtttttggatacacctagatactacagttagatacatccacataagcatatgctatagcaattactatatacatacacctggagagatggtacccgacccggaacccaacagccccaaaaacctatccgtgtttatgtataaagattatacttacacttatgttttatataggcaaaaaggttaacacaacttagttcaaatgtacacgcagcactttattttcattttacacttatttaacgccaatcgaaacagacaacagcacaccattaatatcacgaaaaagttatgttcttgcgagatagctctgaattgaaatctgtgttgcgttcttcacagcccattttttttttttaattgttgtcgaagagttttccaattgtttttgtaatttcaaacacctacgttaggcataaagtgacgttagtttttagggacaactgcaacgtagccaacaacacacaacttaaatgaattgtaaattataaactaaactagagcattacagagtaaactataatatatataaaataaagtacataacgtaaagtaaaggtttcccaagctcgattataaagagtggcccaaaacacctttgggccaaactccaaacttgctcgcatagccaatttgtattcaatgacctaaccccccgaggaaatccgcctctgtttttagtcagctccatgcaattggtctaattcgattcgatttcagttgcatttctggatacaagctaatagaatggaacaagttaataccgcgtactgagaagctaaacgctgccaccacaaaaaaaatgaaataaataaataaaaacagaaataaaacccaaaacaaaatgggtagatgtgagaaatgtatacaatcgattaacgaactttgattatattccgtttcagtttgcaatctgaatcgtattttttgtatttgcctaaggaatgagagaatgttaaatctctacagaaataaaaaattaagatgtcaaatataatcaaaaggtgctttgaatt

SEQ ID NO: 22082 - DNA, 1898 bp, DROSOPHILA
atggcggacgtgagcgatcccagcgaactgttcgacctggagctgcacgacctggaactgcaggacgacaaggccagggactccgacgacgacaggatcgagctggacgatgttgacctagaaccggaattgtgtattaatctgcaccaagacactgagggccaggagaccatacagctctgcgaggagaatgttaatccaggtaaaatcaagctgggacccaaggactttgagctcaagaaggtccttggcaaaggtggttatggcaaagtatttcaggtgcgcaagaccgctggacgagatgctaacaaatattttgccatgaaggtgctcaaaaaggcatccattgtgaccaatcaaaaggacacagcgcacacccgcgccgagcgcaatatactcgaggcagtcaagcatcccttcatagtggagctagtttatgccttccagacagacggaaaactataccttatacttgaatatctcagcggtggagagctgttcatgcatttggagcgtgagggcatcttcttagaggataccacatgcttctatttaagcgaaatcattttggccttgggccatctacacaaactgggcatcatctaccgcgatctgaagcccgagaacatactgctcgatgcacagggacacgtgaagctcacggacttcggactgtgcaaggagcacatacaagagggtattgtcacccacaccttctgcggcacaattgagtacatggcacctgaaattttgaccagaagtggccatggcaaagcagtcgactggtggtcactgggcgctctcatgtttgacatgctcacaggagtcccacccttcaccgccgagaatcgcaagaagaccatcgagaccattctgaaagccaagctcaatctgccagcctacctcacaccggaagccagggatctggtgcgtcgcctgatgaagcggcaggaacctcagcgccttggcagcggacccgaggatgcggcggctgttcaaatacacccattcttcaaacacgtcaactgggacgatgtgctcgccagacgcctcgagccgcctataaaaccgctcttgagaagcgaggatgatgtctcacagttcgatacaagattcacaagacaaattccagtggattcacctgatgatacaacgctaagcgaaagtgccaatttaattttccaaggtttcacctacgttgcaccctcgatactggaggacatgcatcgggccaaccggatgccagcacgctccccacgacgcactccccgccagctgccggacagcagcttccgcctgcagttcccatcggccaatgtgggcgccaatgcgccgctggccatgcacggtcattcgcagcgatccgggatgtttgcacgggccacgccgccgcatcacatgcagacatttgcgccgcgtccatcgccggcgcaggacgagatgatggacgtgcagggtctgccgatggtctaaaggctggagcgattgcttcccaaccaaccaacccatcccatcccgtccgttccgtcgcaacccagcaactgcatcataagcttcctctccctaccccccaaaaaaaaaaaaaaaaaaaaaaaccagcaaaagattacagaaattgacagttactattatgacgtatgtggagtgtggacttggttaaggatacggaatgagcaggacgatcatcaggaggtggcagaggaggaggaggaggctgagcagcacgaggagcacatgacctcagtgcgcgaaattgtttttgttaaagagaagcgcgctcggatcgcgcttttcgatgtttatgattatgagaatgattatgaatatgattatgtttatgaggcagacggagaagatgattgtgctacgagaaggaaagcgttcgtttttggatacac

SEQ ID NO: 22083 - protein, 490 aa, DROSOPHILA
MADVSDPSELFDLELHDLELQDDKARDSDDDRIELDDVDLEPELCINLHQDTEGQETIQLCEENVNPGKIKLGPKDFELKKVLGKGGYGKVFQVRKTAGRDANKYFAMKVLKKASIVTNQKDTAHTRAERNILEAVKHPFIVELVYAFQTDGKLYLILEYLSGGELFMHLEREGIFLEDTTCFYLSEIILALGHLHKLGIIYRDLKPENILLDAQGHVKLTDFGLCKEHIQEGIVTHTFCGTIEYMAPEILTRSGHGKAVDWWSLGALMFDMLTGVPPFTAENRKKTIETILKAKLNLPAYLTPEARDLVRRLMKRQEPQRLGSGPEDAAAVQIHPFFKHVNWDDVLARRLEPPIKPLLRSEDDVSQFDTRFTRQIPVDSPDDTTLSESANLIFQGFTYVAPSILEDMHRANRMPARSPRRTPRQLPDSSFRLQFPSANVGANAPLAMHGHSQRSGMFARATPPHHMQTFAPRPSPAQDEMMDVQGLPMV

SEQ ID NO: 22084 - DNA, 3850 bp, DROSOPHILA
gcacgctttactacggcacccagagcaacaagatacgcatcacagagaacccactgcccgagccggtcagctcttagattgttactgcagagtccacataatctccaaaagacaccttgttattgttgttaccacacactgagaaaaaataatgcagcagcagcagccaagtcaagccaagctttcagccgtgctccaagagacacaaagccacagaaactcaaagaataaaaaatattatgaaatacaagcaactcacacaccgctaggaaatgaatgcgaatgcaataattaaccaccaaatgagaacccattgattgattgattgattgattggttgattgattgattgtgtttccctatggttttcgagatgcggagagatatttgtaatttacactttgtgcctgagcgtaacgtaacgaacatacacgtatatatatcaagccagatcggttcagatcagcaacagcagtttagttttctatgcccaattgattacattgtttttttttttggagtgcaacacatattttatgacgagcttgcttagttgttgtaaaccgaacaatatacaaaatatatacatatgtgtatacagatgacacaagcagaacaaaaactaaaaactaacgagcattttcgcttaatgttaaaacctaaaacgaatccaactgttaacttaatcccaaaaaataacaatgtagcatatcaaataaaaaacgaaaaatctctcaaaattacgtatatacttatacaaaaccctagataaatcgtagacaattgcgaattgcgagtaacttcaaaccaacattctgttcacaatgaatgaggaataaattctagacacaggacactgtcacaaaaacaggatacacacacacacacgatattgaatatagaatacatacatataatatatataaataatgacaactttttgcaataacttcgaattcaattcaataaaagttttagaagcttgagttctatgtttccattacttcggttgcagcatttcgctgatcctgcgcagggtctcctctcgatctcgatgcatcagttccgatacttgttccaaaaattgatgctgctgctcgcgttgctgccgcaagaagctttcgttggtagttttgatctgcgcaagcagctgcttttgaccttctatgattgcagtgagtgcttcaatcggcgttggttcagcctccatctcgatggcgtccacgtagtcctcgctatcggctgccgctcttaggagatcgcaggtggagctggagttgtcgctgtcactttccagcggaacgcttggtttgcctggcggcttgagaaaggaaggcttgctgatgcgaatgagcctgctgatggcactttctctgttctcccgcggcgcctgaatcagttcatcgaaaagctcaaagtggcgaggcagaatgcgtacattatctagcccgtgctccttggcctctcgatgacgcttgcagagcagccttagtttattgcgcagctggtgtggcgtgcgtttgatgtcctgcttagccaggatgttggaaatgtgcaccagggtctggaagttgcgcttccttgagccatccaaggcgcgaaagaaaccattgtcccgaatgatgagtagaaacgaatcaacctcttcgtctgtccaaaagtgcgctaaggaacataggaatttaattaaatatggaataggaactagctattataatatctacctccgcttctctgtgatgcatcaccctcttcctcgtcactgtcattgaaatcactatcgcttgcgctgctcagatgggcttccgcttcagcatctgcggccgcctcctcttcggtgggatccaggaccagtcgcatcgcctcaaaatgctcgaacgttttccccgtgccgttcttgaccttgttgtacaatcgccgcagctgctggaacttgatgcgcagcttctcagcacccttgtggcagttgcgttttgccatctccttggacagcagcttgaagaccttggcattgcgcttttgcagcaaagctgctcgcagtccaagtgtgtggatcaggtctaggaggaggtccacttcgccctctgcccacttgcagcgggcgacgatgttaactgaagatcctgaggcatccaaagcatctgcgaaggaaagtcgcctaagttcgtattccaatacattcctgcccggtggcacctaccgtccccttcggtttctgagatcatgccggactggtcctcgtcggcctccatatcgctgtcactctctagcgcctcttcatccagatcagatacatcttctccctgcatcaactcgtgcaccgcctcaaagtgctcgaatggttcgccgccattccgagctctcgcatactgacgccgcatctgatggaacttgactctcagatgctttggactcttggggcagttccgccgggccatttctctggacaccatacgaaacacctttgcattgcttcgcggccttcgaagagcagcttgcagtttaagttggtgaatgatttccagaaaggtctccacctttgcgctggtccacttgcagcgactcgctttcccagaactattttccgacaccgagtgactcgcatttcccagatctgttacgaaaagtaaggatttggtaacatcgaaccggctgaggacgctgcttacccactcataaggtgtgcgtatttctgctccgtttcgtgctcgtcctcatcgttgccattgaagagcgagaacttgctcattttcaaatggttatgcttaaatcgcgcaatgaaatcaataaatatatatttatatttgatcggtttttttttagcttgatcaaatcataacaataacaaaactgtcatcgatagtaggacgcgttaagctacctatcgttatcggcatcgatgcggccgtaccatacattctgctcgaatgtatgtttcatgtaaggaatatgtatgttaaatgtagaaatagcctacaatctgaaaaaaaaaaccaaaaccaacaagaaactatgatattgatagccaaaatatatacgctaaaacattatattgttattaagcaacatattttgatctcattcaaagtcgtctgaatggttttgaataacatccaatatccagtccgtaaagtgtgtgacattggtgtaaattcccaagccactgcacaaccgaagtccttggctagcgacaccgaactggaagacccttccctgcccctcaaatgtacgaattgcgctcaaaggacctcccgaatcgcctttgcacgaatcactgatataactgccggcacatatataggatatatcgagaggtcttccaggtctttcacaactccattgaggtaattgttgcagggtggcagtctgtagcctatcttgctcttctccatcactatttgtaccccatccggtgaaattgaagcgtaatattgagagtgggttcccacccaacgttttgcccagaatcaagcagattggtctgacatagtctatggcgaactttagttagttacatatttagttcccaagaaacttttgatagcgaaatgcacttacttgagaatatcacactcctttgcattcgcaacagaccaatatcatatcctggattactatgaacaattttcctatccacgtccacattgtaggcccttggtgtgcagacaaaatcatcgcagtcgaatatgggatgtcgggtatcgtattcgcccaggcgcacattccttaaaaaaggtcattttgaggatcaaatgtgtagtaatagtatggtatgcactcacatatacattggggaaatgcaatgctcggcggtcaaaacaaatcctaaatgaacatacaatgataattt

SEQ ID NO: 22085 - DNA, 1673 bp, DROSOPHILA
ttttgttattgttatgatttgatcaagctaaaaaaaaaccgatcaaatataaatatatatttattgatttcattgcgcgatttaagcataaccatttgaaaatgagcaagttctcgctcttcaatggcaacgatgaggacgagcacgaaacggagcagaaatacgcacaccttatgaatctgggaaatgcgagtcactcggtgtcggaaaatagttctgggaaagcgagtcgctgcaagtggaccagcgcaaaggtggagacctttctggaaatcattcaccaacttaaactgcaagctgctcttcgaaggccgcgaagcaatgcaaaggtgtttcgtatggtgtccagagaaatggcccggcggaactgccccaagagtccaaagcatctgagagtcaagttccatcagatgcggcgtcagtatgcgagagctcggaatggcggcgaaccattcgagcactttgaggcggtgcacgagttgatgcagggagaagatgtatctgatctggatgaagaggcgctagagagtgacagcgatatggaggccgacgaggaccagtccggcatgatctcagaaaccgaaggggacgatgctttggatgcctcaggatcttcagttaacatcgtcgcccgctgcaagtgggcagagggcgaagtggacctcctcctagacctgatccacacacttggactgcgagcagctttgctgcaaaagcgcaatgccaaggtcttcaagctgctgtccaaggagatggcaaaacgcaactgccacaagggtgctgagaagctgcgcatcaagttccagcagctgcggcgattgtacaacaaggtcaagaacggcacggggaaaacgttcgagcattttgaggcgatgcgactggtcctggatcccaccgaagaggaggcggccgcagatgctgaagcggaagcccatctgagcagcgcaagcgatagtgatttcaatgacagtgacgaggaagagggtgatgcatcacagagaagcggagcgcacttttggacagacgaagaggttgattcgtttctactcatcattcgggacaatggtttctttcgcgccttggatggctcaaggaagcgcaacttccagaccctggtgcacatttccaacatcctggctaagcaggacatcaaacgcacgccacaccagctgcgcaataaactaaggctgctctgcaagcgtcatcgagaggccaaggagcacgggctagataatgtacgcattctgcctcgccactttgagcttttcgatgaactgattcaggcgccgcgggagaacagagaaagtgccatcagcaggctcattcgcatcagcaagccttcctttctcaagccgccaggcaaaccaagcgttccgctggaaagtgacagcgacaactccagctccacctgcgatctcctaagagcggcagccgatagcgaggactacgtggacgccatcgagatggaggctgaaccaacgccgattgaagcactcactgcaatcatagaaggtcaaaagcagctgcttgcgcagatcaaaactaccaacgaaagcttcttgcggcagcaacgcgagcagcagcatcaatttttggaacaagtatcggaactgatgcatcgagatcgagaggagaccctgcgcaggatcagcgaaatgctgcaaccgaagtaa

SEQ ID NO: 22086 - protein, 523 aa, DROSOPHILA
MSKFSLFNGNDEDEHETEQKYAHLMNLGNASHSVSENSSGKASRCKWTSAKVETFLEIIHQLKLQAALRRPRSNAKVFRMVSREMARRNCPKSPKHLRVKFHQMRRQYARARNGGEPFEHFEAVHELMQGEDVSDLDEEALESDSDMEADEDQSGMISETEGDDALDASGSSVNIVARCKWAEGEVDLLLDLIHTLGLRAALLQKRNAKVFKLLSKEMAKRNCHKGAEKLRIKFQQLRRLYNKVKNGTGKTFEHFEAMRLVLDPTEEEAAADAEAEAHLSSASDSDFNDSDEEEGDASQRSGAHFWTDEEVDSFLLIIRDNGFFRALDGSRKRNFQTLVHISNILAKQDIKRTPHQLRNKLRLLCKRHREAKEHGLDNVRILPRHFELFDELIQAPRENRESAISRLIRISKPSFLKPPGKPSVPLESDSDNSSSTCDLLRAAADSEDYVDAIEMEAEPTPIEALTAIIEGQKQLLAQIKTTNESFLRQQREQQHQFLEQVSELMHRDREETLRRISEMLQPK

SEQ ID NO: 22087 - DNA, 4716 bp, DROSOPHILA
gcaggcgcctcttttattttatttgtgggtggagcctgataaagagttaatttaatgattggcgaattaaattcggcaaaattatgtgacattttcttttgttttcatactctaatttaatttattacagtttatttttaaaccgtgcttgataattttgtacactggtagattaatacgatacgatataatgaaaacgattaatattaagtgtgcacatatgttgtcaaaatcaatttaaaaattttttaattcccaataaatttttggagctgagcttcagcattgtatctgtgaatatgccaatgttcccgtcaatagcattcaatagttcgctgcatttagttcaagataatcttttccaactaaaagctttggatgctcagctcaaccgagcttagcttaaactaaactaagcatatattctatctatggccactcctatggaattgtcacccttggctcgtttacgccccactgagcgccgacgagcgatagatagatcgaatcaatcaattaaatgcaaactgcccaaattaattgaaaatcagtcgaaatctgaggcactctctaaacggtcgtgtggcgtgttggaaaaaaaagggcgaaatataatgctgcacggcgatcaagataagcccaaaatggcaaaacgatctgtgggatacgccctcaaacgcaggaatgatcgttttgtggtcgagcccatcgagggaatcgtgaatccagcctacgaacccgatcttggtggagatacatcctcaaccagtgacatcaatcgaaaatggcaagtataacaagcaataaagttttcgggatgggctaatgtgaagtgtgtgttgtgttattcaaattattgcaatcgaataaaaaataaaaaacatttaatattgttggcagaaatctaaattctaaatctacttacttctatttaatatactttataatctgctatttatttttgttaaatttaaattaaggttaacaactctaacttaagctagaaaccctttacgtgtttaaccttgggcctcttagctggcggggcacagggatagtcctcgatgatagtattctggccgggcagcaagatagaatactcgcggccaaattcaacaggcgattcctttttgggactcaaaaggcgctctccgatgtcctgatcggaattaagggctggaatgactgaatagttcgctgtagtggcgccatatagctttggtagacttgtaccgggaaccatgtcgggatttccctcggtcacctcgtcctcagtgggtaccactgtctgactgggcaattgttccaaccaattggccatgcgttgttcaggttccagctccttcccctttatacgctcatcgaacatttctcttgttacgtctcgtgtggtgtcgtactcctccatatcccacacgtccagcaaacgggtcgacatcatgtccgtgtagtgggacagcttgtaagcggatttctgccagggaccgcgactgatgctcttctgctttttaacatttctcttactggcagctttccttttgggttgccgttttggtttcaccttggtttttttcttaggcgttttcttaccacctttcttggattccgaaggttcttcctttaccttttcagaggctgggctttcatcttctgaaacatcagtatcttctatgccatagtcaatttcgatttcctctacgattaaaggtttttcttcaggttttgatcttttggcaccatctcgaaagatgtctcttatctctggtatcgactggacttgtgtgcagcggatgttctcgcgttggacgcgctcattaacggcattggcaaggtagcgaatggcttccgttgtatgagttccggttctgatctgctggacatgctcctcttcatccctaagcgttagtctttggcagtaaacatctcccaagctgttggaggttagcaactgggtaaaagcttgatcactggccccctctaagccaataaagcgcattcctgtaatgcaggtcgttacccgctctgctatatcagcatagacatccacaaatcctcccaagcgagcatctattaaagcttcttccagggttaccggcgcaaatggtattgccggcgagaacatttcatcgacactttttgcctgagctccttgcagttcacaaattcgcaaatctttgggtaagagtccacctaacgcaatatattcactgtcctggtgaacgcttgtgtcaataaaacagggtggataggtcatctgatgcgtccaggtgacgacagctcgatcggtcagctttttacccaagcatctgatatccaaacagtggaagttgtgattactagccacatacaagagattaggattcacacccttggccaaacaagagaacctctcgcaagcttttgagtgaacgccgctggcaaagcagggattcagaggcagattgcatcgcacatctacggtaaacaaaactggctgtgttaggcagtgaaaggtgctttcctctgcttgctttaactgtgcccaggtactcgaggttttcttcagtccttttagcaagcaaacatcaagcttggctatatcctgttgtgtcgaaatatccacgaagcgcaaagacctatcctggctagctaaggccaatgtattggcattggccaatgattgtgcagcgcttgtaaaaggagctacttgactgctaaacatgcaatggcgaatgagttcgtaatctgaatccgaatcctgttcgtctttgcatttaagttcgtatagggaaacctccttcagcaaccgtgccaggaacatttgactgcgatttaaattgtggagcggaagaagttcaaagacttcgctggaggattcctctatcgtagccgaatgcaatggttgccaaaactccgcctcaccataatctcgggaaaagtgcaaatctctgagcttattaccgctgacatgcatggccagctgatcgtttccatcaaacggaatcgtgtttaggtttccgcctgtgtagtagtaatcgtagctgtccctgaagaaggaattctcctgttgggctatgtgctcagccatctcaaacagactggcatcgtgtacaccttgctcctgcttctgtacacgctgtctcatatttttaagtcgcctatcaaatatagccttgcctaattgcaattgccgtgtccaatcgtcgtagcggaatggcctttggacgcatgcctccactcggggagtttgtccatcctttgccaggaagaggggtagcggcaccgtaaccgagcaatttggcaagtcctgcttcggattatcctgatgatcgtacaagagttggcccaacattccagtgttcaagccgggataagagaagtgcggcgcattttccaaaatgctgcgcagattatctggctcattgttatcctcagcatcttgatccggcggaagatcatcttcggaatcggattcgttgtcactagttttggtcttgacctgggcactgtatttggccgaattgagagctgtttgatagcgtcgcggcatgtctgtaattggagtataaataagaaatcggattttgctagctggccgatgtgttttgatgcatgtgagcctggcttacggatttcttcgatcagctatccagttctgcacgaaagaatttagttaacaaattgaatttgactcaatcaaacgccaaacgcacgacgtttcctctggacgcaagaaacagctgattagtgatgggtatttatgtctacccaaccgcatgcttgctgttatgagcattacaagcaaaatattcacaatatattaaaataatataggttttggattatctattacattacattggaagtgcaaaaatgtaacattgaaaaaaaaagcatcgtaaaatacctttttaaagaaatgtaaaggttttagacaccaataataagtaacatttacatttttaagtcaaaaatatttaagaatccgatgttttgataagcgacgatgtatcgctggtcggcgatactatttctaaaatatcggctagctcgatagcacctatatgaaaacatcgattcccgatgcatcgatgtttctccccatcactatcaaatttgctttgcgctgcatcgagaccgagaattaaagacttgaaagcagctggagaaattacaagaaattgatccccgaaaattactggcaatcgcgaacagcgggcgtgtgtgtgtgtgtgcgtgcgcgcgagagcgagagaataagtgaatgaaacagaacgagcacagaaattacacaagttgtaaaagaaaaggtgaagaaaaaagttggtcgagaccgaatattgattttttcatagacagtgcagttaaaacaacggtctctttttgttagccaaaaagaaggcgttggtaaaaagcggtagtagtttttatctcaattttgaggcctacaaaagaatagaagaaaaagcaacggaaagcgtcaggtgagttttttaaatccaaccacgcacacacctgcactcacacctacactaccgcacacaacgggcacaattaacatacatacaagtgccaaacagacaacaaaacaaatgccaattggaaaggtgtgaaagagaggggcgggtctggaagataacattaaccagttctaatcctactcccctccctctcgctccgcttgcatttgttttgttgcagttatctattactcttccctctctctctctctctctc

SEQ ID NO: 22088 - DNA, 2639 bp, DROSOPHILA
tttcttgcgtccagaggaaacgtcgtgcgtttggcgtttgattgagtcaaattcaatttgttaactaaattctttcgtgcagaactggatagctgatcgaagaaatccacatgccgcgacgctatcaaacagctctcaattcggccaaatacagtgcccaggtcaagaccaaaactagtgacaacgaatccgattccgaagatgatcttccgccggatcaagatgctgaggataacaatgagccagataatctgcgcagcattttggaaaatgcgccgcacttctcttatcccggcttgaacactggaatgttgggccaactcttgtacgatcatcaggataatccgaagcaggacttgccaaattgctcggttacggtgccgctacccctcttcctggcaaaggatggacaaactccccgagtggaggcatgcgtccaaaggccattccgctacgacgattggacacggcaattgcaattaggcaaggctatatttgataggcgacttaaaaatatgagacagcgtgtacagaagcaggagcaaggtgtacacgatgccagtctgtttgagatggctgagcacatagcccaacaggagaattccttcttcagggacagctacgattactactacacaggcggaaacctaaacacgattccgtttgatggaaacgatcagctggccatgcatgtcagcggtaataagctcagagatttgcacttttcccgagattatggtgaggcggagttttggcaaccattgcattcggctacgatagaggaatcctccagcgaagtctttgaacttcttccgctccacaatttaaatcgcagtcaaatgttcctggcacggttgctgaaggaggtttccctatacgaacttaaatgcaaagacgaacaggattcggattcagattacgaactcattcgccattgcatgtttagcagtcaagtagctccttttacaagcgctgcacaatcattggccaatgccaatacattggccttagctagccaggataggtctttgcgcttcgtggatatttcgacacaacaggatatagccaagcttgatgtttgcttgctaaaaggactgaagaaaacctcgagtacctgggcacagttaaagcaagcagaggaaagcacctttcactgcctaacacagccagttttgtttaccgtagatgtgcgatgcaatctgcctctgaatccctgctttgccagcggcgttcactcaaaagcttgcgagaggttctcttgtttggccaagggtgtgaatcctaatctcttgtatgtggctagtaatcacaacttccactgtttggatatcagatgcttgggtaaaaagctgaccgatcgagctgtcgtcacctggacgcatcagatgacctatccaccctgttttattgacacaagcgttcaccaggacagtgaatatattgcgttaggtggactcttacccaaagatttgcgaatttgtgaactgcaaggagctcaggcaaaaagtgtcgatgaaatgttctcgccggcaataccatttgcgccggtaaccctggaagaagctttaatagatgctcgcttgggaggatttgtggatgtctatgctgatatagcagagcgggtaacgacctgcattacaggaatgcgctttattggcttagagggggccagtgatcaagcttttacccagttgctaacctccaacagcttgggagatgtttactgccaaagactaacgcttagggatgaagaggagcatgtccagcagatcagaaccggaactcatacaacggaagccattcgctaccttgccaatgccgttaatgagcgcgtccaacgcgagaacatccgctgcacacaagtccagtcgataccagagataagagacatctttcgagatggtgccaaaagatcaaaacctgaagaaaaacctttaatcgtagaggaaatcgaaattgactatggcatagaagatactgatgtttcagaagatgaaagcccagcctctgaaaaggtaaaggaagaaccttcggaatccaagaaaggtggtaagaaaacgcctaagaaaaaaaccaaggtgaaaccaaaacggcaacccaaaaggaaagctgccagtaagagaaatgttaaaaagcagaagagcatcagtcgcggtccctggcagaaatccgcttacaagctgtcccactacacggacatgatgtcgacccgtttgctggacgtgtgggatatggaggagtacgacaccacacgagacgtaacaagagaaatgttcgatgagcgtataaaggggaaggagctggaacctgaacaacgcatggccaattggttggaacaattgcccagtcagacagtggtacccactgaggacgaggtgaccgagggaaatcccgacatggttcccggtacaagtctaccaaagctatatggcgccactacagcgaactattcagtcattccagcccttaattccgatcaggacatcggagagcgccttttgagtcccaaaaaggaatcgcctgttgaatttggccgcgagtattctatcttgctgcccggccagaatactatcatcgaggactatccctgtgccccgccagctaagaggcccaaggttaaacacgtaaagggtttctag

SEQ ID NO: 22089 - protein, 842 aa, DROSOPHILA
MPRRYQTALNSAKYSAQVKTKTSDNESDSEDDLPPDQDAEDNNEPDNLRSILENAPHFSYPGLNTGMLGQLLYDHQDNPKQDLPNCSVTVPLPLFLAKDGQTPRVEACVQRPFRYDDWTRQLQLGKAIFDRRLKNMRQRVQKQEQGVHDASLFEMAEHIAQQENSFFRDSYDYYYTGGNLNTIPFDGNDQLAMHVSGNKLRDLHFSRDYGEAEFWQPLHSATIEESSSEVFELLPLHNLNRSQMFLARLLKEVSLYELKCKDEQDSDSDYELIRHCMFSSQVAPFTSAAQSLANANTLALASQDRSLRFVDISTQQDIAKLDVCLLKGLKKTSSTWAQLKQAEESTFHCLTQPVLFTVDVRCNLPLNPCFASGVHSKACERFSCLAKGVNPNLLYVASNHNFHCLDIRCLGKKLTDRAVVTWTHQMTYPPCFIDTSVHQDSEYIALGGLLPKDLRICELQGAQAKSVDEMFSPAIPFAPVTLEEALIDARLGGFVDVYADIAERVTTCITGMRFIGLEGASDQAFTQLLTSNSLGDVYCQRLTLRDEEEHVQQIRTGTHTTEAIRYLANAVNERVQRENIRCTQVQSIPEIRDIFRDGAKRSKPEEKPLIVEEIEIDYGIEDTDVSEDESPASEKVKEEPSESKKGGKKTPKKKTKVKPKRQPKRKAASKRNVKKQKSISRGPWQKSAYKLSHYTDMMSTRLLDVWDMEEYDTTRDVTREMFDERIKGKELEPEQRMANWLEQLPSQTVVPTEDEVTEGNPDMVPGTSLPKLYGATTANYSVIPALNSDQDIGERLLSPKKESPVEFGREYSILLPGQNTIIEDYPCAPPAKRPKVKHVKGF

SEQ ID NO: 22090 - DNA, 3958 bp, DROSOPHILA
tgcgggcgcgcctgatcttcgccaaaaagtgtggccatttggacgagaccattgccgagacctgggccatactacgggcccatctccgagagctacagacatcccattggcgcggattgcccgagttgaccaacgataatggctcctactgcggtgactcctgtcgcacgcaggcctggagtgttgctgccattttggaagtcctgtacgatctgcactccttgggagcagacgtggcctaaaccaccgtaaatactcatattcaaacctgttagttgctaccaaaaactgttattagtgttacgtttgataattgtacggatacaagatggaatgagattcgatgcctgaggtcccttgaaattttgctattcctattctattaaagttgcaattgtttttaagcgttctttttcgtctaagagaagtaactatctcggcacacacgcatgcaggagcattgggggggatcgatggagccaaagttctttcgaggcatgtcccgtcccgtatattttggaatggtgttagcctcgggaatcgttggagctttcattggtgaaaccgcttcctgggaaataggcttgaccggaggtagaggcttttcacgctttgctttcgatttaccatcctctattttcagcttaaatagaaattaaccattgcgatataaatattattttaaaaatattacacctactcactttgccacattttctcaaggctaaaatggctgcctcgcatgttagatcgtaagctttctgcaacacaacttgttggataacatcaaggacgatggacattttgatggaattacaaaaaacctgggcttcacatacaattttgctagcaactccacgagaaatttgacacaatattcccaagtcatatgaactgtatataatttgtatatacttctagtctacagtttcttataaactaaataaatacatgtaaaggttatatacataaagctttgcatagttgtaaactatccgcattacgtctgcagcgaagtttgggttccatttggactcgcttggtaggattcgttttcagtaactatctcgacgtcatcatctttgatggatttgagatcgcgtccaatactttccatgttcaagctcaaggcagctgcagccacattattattcacttcatccagcttgggctggcgtaggcagttctcgtcgtttgaggcctcacgtttaacccttgccggtggctgctctgtcgcatccgccgaacttcgcagattgagcagctcccggcgaatggcctctacattgtcttcaaggttgggtttcttgatctccgagtcattcgatgatttcggctgagtagaattcaccattagggctagtggaatgggcaatcgtttgataagcgcttctttatctacggtcgaattcctgagtaactctccggttttgtaggatagaggttcaaaaacgccggcatgggcctccttttcatcgcgcaaatgtgtattttccgtgagtatgtccattaacgatgcctgccgccttctctccttcttttcgtccgcaactggctgcgactccttaagcttaatttcagccttcttcggttcctcggcaaatttcgcaccagtatccaaaggctcatctttctgtaactccaaaggtggctgattaaatgaatttttcttggccaactcttcgtttagctccccaacggttttcgccaatagttttttggtctcctttaattccttttgggttttgagtagctcatctgcattagccttactttccttttgctcttcggcagccacgtcctcctccttcttgatggccgctccatcaattgtattgcttgctgataacaagctcgatccaatttttggtttatctggaagcgatgcagcaacagcaggcggattattcttgggcttatccacggtaaggttgacatcgagtggtttggcttctggtgggtttgcttctacggcttctactggtagttttttaatatccgtttcagaatttttactatctatgggaactacatggacttcatcgatgggcagtggtggcaacggtgggttgtcggaggaagctgattgcactacctccggcatatcaacaactttatcctcaacggtttgttttaatttgtctggattttggacatccagtttctttaacaataggttcttttcactgtcaatggattctttggccaaatgttttggtagctcgccgacgacagctggcacttggccatcgggatacagaggggtgcctatggcaaccatatcaaactccgggccggagctcttttcatcaattgcacttaggttcgcatacgttcccaggatcatcaatagaaatccacttacgaatacaaactgggcaagcgtacgttccatagattcctttttgatgatttttcgaaaactggatgcggggaacattatacaaatggctacgccaatggtggaacccaccaagccaattataagctccacggagggaataaccaaagccacgcataacgaaaagacaacgatgaagatagtgatgaatcgaaagcgttgttcaggtatgtagctactgctttccgtatgaccctatacaaaatagatatttagtgtctacaccatccaactgaagttacaaaaatacctttctgtatagcagcgaatagagactggctctgcagggaaagattaccaatgggaaactaaaagcaattgacagcacaaagccaattttaatgatatcgctaccaaaggaggtcgataagttcaccagaatgttgcctataaatacaaagccaaatatgtagaacagagaatgcctcaaaaaggtggctggcttacccgaaaaggtgtgcgtacaaaacgccacatatccgaaaaaaccaacagatatgtaaacaaaagtacaaatccaagtggcattgcggacgatgccgtttaatttgtcgagactctggttgttaatgctctcaaagacctcaaatagttgcctgtaaatagatcagatatataaataaattttgcggacatagaaagcagggtgtacacacatttggcaggagagagccatgctgaagatgggtaggcattggagtacgcccgccggttcccagtagagcaccttttccgtccagtcgttggccgtaatgtgtggctgggcctccaacacgatcttgagaattaggcagacatagaaacctatggacgcggtgcaaacggcggacaagctgtccacattgcggagcatgccgaggggcactatgcacaccacagtgactacgaccatgacctggtagataagagttagtttctcttcttggatagaatagcactttcttaccagactccgcagatgcaggtgatctgccacgtccagcgcgaaaatcttggcgattatctgcggacccagatcgcccacgaccacaaaatacgtgatgcacgttccaatcaggtagccaatgatgcacagctccaccagcagcttgccggaagtaccgaaagcatggagaccgagcatctcgaagctcctcctacgtgtcagcagcgaggttttaataagatagtggcagcaaacccgggttattccattgcttagcacaagaagaacgatggataacaggatgccgcacttctggaagcagaacggcatggccaagatgccgacgcctatgatgctgttggccaacgtcattacatgcgcggagtgggccaacatcttgccgggaattcagcctactttctcttttatcccgagtttcgagaactgcgatccgttttcacgtgggcgtttcgccgcgtatgcaataccgtcacaagctgcgtcgaactgataccaaccttctgtctgatacggcgaacagcagtacggcgcaaaatactacttgttactccaaaatgaagcgctatcgacgattgcacttgtgtaagcaaaattgtaaacaaaataatccg

SEQ ID NO: 22091 - DNA, 1843 bp, DROSOPHILA
tctcgacaaattaaacggcatcgtccgcaatgccacttggatttgtacttttgtttacatatctgttggttttttcggatatgtggcgttttgtacgcacaccttttcgggcaacattctggtgaacttatcgacctcctttggtagcgatatcattaaaattggctttgtgctgtcaattgcttttagtttcccattggtaatctttccctgcagagccagtctctattcgctgctatacagaaagggtcatacggaaagcagtagctacatacctgaacaacgctttcgattcatcactatcttcatcgttgtcttttcgttatgcgtggctttggttattccctccgtggagcttataattggcttggtgggttccaccattggcgtagccatttgtataatgttccccgcatccagttttcgaaaaatcatcaaaaaggaatctatggaacgtacgcttgcccagtttgtattcgtaagtggatttctattgatgatcctgggaacgtatgcgaacctaagtgcaattgatgaaaagagctccggcccggagtttgatatggttgccataggcacccctctgtatcccgatggccaagtgccagctgtcgtcggcgagctaccaaaacatttggccaaagaatccattgacagtgaaaagaacctattgttaaagaaactggatgtccaaaatccagacaaattaaaacaaaccgttgaggataaagttgttgatatgccggaggtagtgcaatcagcttcctccgacaacccaccgttgccaccactgcccatcgatgaagtccatgtagttcccatagatagtaaaaattctgaaacggatattaaaaaactaccagtagaagccgtagaagcaaacccaccagaagccaaaccactcgatgtcaaccttaccgtggataagcccaagaataatccgcctgctgttgctgcatcgcttccagataaaccaaaaattggatcgagcttgttatcagcaagcaatacaattgatggagcggccatcaagaaggaggaggacgtggctgccgaagagcaaaaggaaagtaaggctaatgcagatgagctactcaaaacccaaaaggaattaaaggagaccaaaaaactattggcgaaaaccgttggggagctaaacgaagagttggccaagaaaaattcatttaatcagccacctttggagttacagaaagatgagcctttggatactggtgcgaaatttgccgaggaaccgaagaaggctgaaattaagcttaaggagtcgcagccagttgcggacgaaaagaaggagagaaggcggcaggcatcgttaatggacatactcacggaaaatacacatttgcgcgatgaaaaggaggcccatgccggcgtttttgaacctctatcctacaaaaccggagagttactcaggaattcgaccgtagataaagaagcgcttatcaaacgattgcccattccactagccctaatggtgaattctactcagccgaaatcatcgaatgactcggagatcaagaaacccaaccttgaagacaatgtagaggccattcgccgggagctgctcaatctgcgaagttcggcggatgcgacagagcagccaccggcaagggttaaacgtgaggcctcaaacgacgagaactgcctacgccagcccaagctggatgaagtgaataataatgtggctgcagctgccttgagcttgaacatggaaagtattggacgcgatctcaaatccatcaaagatgatgacgtcgagatagttactgaaaacgaatcctaccaagcgagtccaaatggaacccaaacttcgctgcagacgtaa

SEQ ID NO: 22092 - protein, 479 aa, DROSOPHILA
MFPASSFRKIIKKESMERTLAQFVFVSGFLLMILGTYANLSAIDEKSSGPEFDMVAIGTPLYPDGQVPAVVGELPKHLAKESIDSEKNLLLKKLDVQNPDKLKQTVEDKVVDMPEVVQSASSDNPPLPPLPIDEVHVVPIDSKNSETDIKKLPVEAVEANPPEAKPLDVNLTVDKPKNNPPAVAASLPDKPKIGSSLLSASNTIDGAAIKKEEDVAAEEQKESKANADELLKTQKELKETKKLLAKTVGELNEELAKKNSFNQPPLELQKDEPLDTGAKFAEEPKKAEIKLKESQPVADEKKERRRQASLMDILTENTHLRDEKEAHAGVFEPLSYKTGELLRNSTVDKEALIKRLPIPLALMVNSTQPKSSNDSEIKKPNLEDNVEAIRRELLNLRSSADATEQPPARVKREASNDENCLRQPKLDEVNNNVAAAALSLNMESIGRDLKSIKDDDVEIVTENESYQASPNGTQTSLQT

SEQ ID NO: 22093 - DNA, 4354 bp, DROSOPHILA
tagtgttttttgctcttatccttaaacacctaccaaataccacacgagtacgtagactcaccaaaaaaaaaaaaaaaaaaaaaaaaaaccgaagtcacattccatccaagctccaattgtttttagtaactcgtaaataaacaaactttaaaactaacaaacttatttaatattaatgcgcgtctggagaaaggggattatggggattatggtacaaaaagcacatgggtgtaatctagacctcgtcctcgttaaggagcatgtttggtataccatcgctgatgggaaacacacgacctgtctccgggcactccagttgaccctcgagcacgtcgatctcgaagagcagatggtgaagcttctgcaaaagcagttcattctccacaatgttttcaggctgaacggcaggaatgtcttctgtgagttccgcctaaaaaacaaattccaattattaacgaatataaaaaataacaggttttaatagtttaaaactgattaaaaatatttgaaaccagtaaatttgaaatcagtaacactatttagaaccattctatggttcttttagaaccattctatcacttaccacctgagcagctccatagaccgctgaccagtccagcttgggaaggattctctccacaaaagttggattaaattcgctctccaccacttcctttttgttaatctaaatgcaaaaacaaatagaccgtgaaacaatcaatagccaggacttgggacaccggaactcaccgtcagtttcaggggaaatcccactttgacgcccttgatggccacggaggtcaagaagttgtatgtgctgagtttcattttcgggcttgtaatggtttaattaatacaaagagatgaggtaaacaacaatgtttttaaataatagttgcggtgcacgttgtattccttcttcttcttgctttaaacattcacaattggtgtatgtcatcgataccacgatacacacttgtcgatgttttgcagcagttggcaacgcgagcagtgtgttaaatatttaaaacgtccacactgcacaaattttaattggaattctcacaactgtcgcattttaagcgtttaaatctgtttctagatgtaaattaggttggaaaacctataatatcagtgactgcgagcggaataaaggagtgaggagtaaaaatggaggacatattccactggtgccgcgagggcaactcgattcaagtgcgcctctggttggatgaaacggagcacgacaacaatttggggtaaatccaatagaggcaactaactccatcactttctagttgctttatagtgcacttagaaagttaagccctcaagtagcaaccccctctaccaggaacgtttacttagtcatcgcctaaatacgcccaagatttcgagggtctttcaagtctaagtgacgtcatgatttattcttgtgttgtgtaaacagacgaatcaaatatataagtatacgtatgttcatatttgcctgtgtgcatatcgcgagcataaaacccgcttgccatgtttatattgttctttacttataattagtcttataatcctttaaaaaggaccatacctaactctaagagcataagtatataaggtctataatgctcaaattccaccataattaaaataaataaaacaaataaattcgtacactttagagacgaccatggcttcagcccgttgcattgggtggctaaagagggccacgccaagcttgtggagactctgttgcagcgcggttcgcgtgtgaacgccaccaatatgggcgacgacatcccactccatttagcggcagctcatggccaccgcgacgtggtccagatggtgagataaaacagaaaccagctaggtaacttatttaagaacttatctgcctctacagttgataaaagagcgcagcgatgtgaatgcggtaaacgagcatggaaacacccccctgcactacgcctgtttttggggctatgacatgatctgcgaggatctgcttaatgcgggagcccaggtgggaatcgcaaacaaggacgggcacacacctcttgaaaaggccaaacccagtctggccaagaggcttcaggatcttgtagaaaagagcggcagagaggttaaggttatcagcttcaaggaacaaagctggcagggattgaagacgagatcccgggatgctactttgtcccgtttcaagggaatcagtatgggagacctagacctgcataccaagctgtcggtgacgccatcaggagaaacttggcgcggacgctggcaaaagaacgatgtggtagctaagatcctggccgtgcgtcagtgcacgcctcgtatatcgcgagattttaacgaggagtttcccaagctccgcatcttttcgcaccctaacattttgcctattattggagcatgcaattcgccacccaatctggtgacaattagtcaggtgcgttgaatttaaataacttcagaaatgaccgtataaggtaaccattctattttctttagtttatgccacgttcttcgctgtttagcctgctgcatggagcaactggcgtcgtggtggacaccagccaggcggtaagctttgccttggatgttgcgagaggaatggctttcctgcactcgctggagcgcattattccaacatatcacctgaacagtcatcacgtgatgatcgacgatgatctgacggcgagaatcaacatgggcgatgccaaattctctttccaagagaagggacgcatctatcaaccggcttggatgtcgccggaaacattgcagcgcaagcaggcggatcgaaactgggaggcctgtgacatgtggagctttgctattcttatttgggagctgactacgcgcgaggtacccttcgccgagtggtcgcccatggagtgcggcatgaaaattgcgttggaaggtctgcgggtcaagattccgccaggcacatcgacgcacatggccaagctgatttcaatctgcatgaacgaggatcccggcaagcggcccaagttcgacatggtggttcccattctggagaagatgcgccgctgaaggagaggggcaaattcaataaatgccaagccaaaatgtgccttgagaaaccttagatttgccaactaattgtaattactactttgtgttacctttgtctaactgagcctaaccgaaaaccgtaccgaaatggcaaagcaagtgcaactgctctgtctagagtttatgtttctgtgtctcactgttctctacttatgattttccgtcgatgtttagtgcgggtgctcgattttttactttttaagttcaataaccattatgatcgtatttatacagaaatatatttgttactaattaatcaaatcgatcaaattgattgtgtaccaaagcaaatgcggaaccacttacgagggctttagtccacagagcttattcgctgagcagcaaacaagtcgggagctttccgccggagtgggtggcaatgcatcagcgcagcgggtcgggtaacgtgagcacggcggccctgacctggttttcatttcagcacgcgattgtgtgcagctcgcgtgggcagagcaaactcggcgcttcagaagagcgcgccggcgtgagaaactcgcggcgagaatggcgcaaatttgttgtatttgctcgaaataatttatatttattatccaatatgttttcatttataggcttaaggaaagtgtggtattagttattggctgatttgccagtgacactttttatcatccttaagattttgttttgctaacgtactttatattatttaaaatcatcttttaatgttgttttattttcttttctaaattgatgtttaaagctcttaaattatattagacaaggtacttgtgatttctttttatttattttagcttataatattttgttgttctaaacgataattttgttattttttgtgtcattaaatatcgaaaatatttggcaaattatgatttacatactaggatgaatcatattttttcataaatagaaaaaaagatttttatatttaaattaaaaatacgtttttatatgtattttcttatatataaatttatttatatttttttacatttaagccaatttgtctctcgctttctccaacctctctcttggcctggctctcaccggctagtggctctctgtttatgtttttgcggcaacgcttcattcgggccagaatgttgttggtgcggtaagcttgcactgagccatgtgattgttttgctggctcgttcttgccttttgccgcacacatcctgtggcaggtctctttttgtgttggtgttgctgctgcagctttaaaaactttttgctgcattttgttgtcgccgtcgtc

SEQ ID NO: 22094 - DNA, 1820 bp, DROSOPHILA
caacgcgagcagtgtgttaaatatttaaaacgtccacactgcacaaattttaattggaattctcacaactgtcgcattttaagcgtttaaatctgtttctagatgtaaattaggttggaaaacctataatatcagtgactgcgagcggaataaaggagtgaggagtaaaaatggaggacatattccactggtgccgcgagggcaactcgattcaagtgcgcctctggttggatgaaacggagcacgacaacaatttgggagacgaccatggcttcagcccgttgcattgggtggctaaagagggccacgccaagcttgtggagactctgttgcagcgcggttcgcgtgtgaacgccaccaatatgggcgacgacatcccactccatttagcggcagctcatggccaccgcgacgtggtccagatgttgataaaagagcgcagcgatgtgaatgcggtaaacgagcatggaaacacccccctgcactacgcctgtttttggggctatgacatgatctgcgaggatctgcttaatgcgggagcccaggtgggaatcgcaaacaaggacgggcacacacctcttgaaaaggccaaacccagtctggccaagaggcttcaggatcttgtagaaaagagcggcagagaggttaaggttatcagcttcaaggaacaaagctggcagggattgaagacgagatcccgggatgctactttgtcccgtttcaagggaatcagtatgggagacctagacctgcataccaagctgtcggtgacgccatcaggagaaacttggcgcggacgctggcaaaagaacgatgtggtagctaagatcctggccgtgcgtcagtgcacgcctcgtatatcgcgagattttaacgaggagtttcccaagctccgcatcttttcgcaccctaacattttgcctattattggagcatgcaattcgccacccaatctggtgacaattagtcagtttatgccacgttcttcgctgtttagcctgctgcatggagcaactggcgtcgtggtggacaccagccaggcggtaagctttgccttggatgttgcgagaggaatggctttcctgcactcgctggagcgcattattccaacatatcacctgaacagtcatcacgtgatgatcgacgatgatctgacggcgagaatcaacatgggcgatgccaaattctctttccaagagaagggacgcatctatcaaccggcttggatgtcgccggaaacattgcagcgcaagcaggcggatcgaaactgggaggcctgtgacatgtggagctttgctattcttatttgggagctgactacgcgcgaggtacccttcgccgagtggtcgcccatggagtgcggcatgaaaattgcgttggaaggtctgcgggtcaagattccgccaggcacatcgacgcacatggccaagctgatttcaatctgcatgaacgaggatcccggcaagcggcccaagttcgacatggtggttcccattctggagaagatgcgccgctgaaggagaggggcaaattcaataaatgccaagccaaaatgtgccttgagaaaccttagatttgccaactaattgtaattactactttgtgttacctttgtctaactgagcctaaccgaaaaccgtaccgaaatggcaaagcaagtgcaactgctctgtctagagtttatgtttctgtgtctcactgttctctacttatgattttccgtcgatgtttagtgcgggtgctcgattttttactttttaagttcaataaccattatgatcgtatttatacagaaatatatttgttactaattaatcaaa

SEQ ID NO: 22095 - protein, 448 aa, DROSOPHILA
MEDIFHWCREGNSIQVRLWLDETEHDNNLGDDHGFSPLHWVAKEGHAKLVETLLQRGSRVNATNMGDDIPLHLAAAHGHRDVVQMLIKERSDVNAVNEHGNTPLHYACFWGYDMICEDLLNAGAQVGIANKDGHTPLEKAKPSLAKRLQDLVEKSGREVKVISFKEQSWQGLKTRSRDATLSRFKGISMGDLDLHTKLSVTPSGETWRGRWQKNDVVAKILAVRQCTPRISRDFNEEFPKLRIFSHPNILPIIGACNSPPNLVTISQFMPRSSLFSLLHGATGVVVDTSQAVSFALDVARGMAFLHSLERIIPTYHLNSHHVMIDDDLTARINMGDAKFSFQEKGRIYQPAWMSPETLQRKQADRNWEACDMWSFAILIWELTTREVPFAEWSPMECGMKIALEGLRVKIPPGTSTHMAKLISICMNEDPGKRPKFDMVVPILEKMRR

SEQ ID NO: 22096 - DNA, 7555 bp, DROSOPHILA
agatagtgtaatcctccttcagctgatcccgggtggtgatgttggtggcatggattatgttctcggagttcgttttcatggcttccacctcttcggtgcgccggcgcacctcttcatagtaatccctcagcatctcgtcagcctgctggtcatacatgctcttcaccccgcccaacatcacgtggaagcagtcgcgaatgtgatcaatcagctccaccgttttgctgtagcaacgcacgtgctgatcctgcgtctgcgccatgtcgtccagaagcatcttgatgtggtcgttcttggcctgaatgttacgttccgagcgctcgccccaagccctcatctcctcgtttagctccttgatcttgatttcgcggcacatctcgtgccactcctcgttgcctttctcctccatatgcttgcccatctccagctcgcgcatcagggcatcctgagaggatcatggcgcaacattagaaatgatgcgtttacaattttaatatagtcttaatatattatttttattataaaaattaataatattaaggatttgcttaggttcatccttaataaaaactctgcgaaagttagttgaacccacccgcatgatgagccgcttctcctcgatcatagccagtcgcttggcctctttcttggcggccttcttctgagccttggttagtttgggcggtccttgtggctccggctcctcctccagttcttggaggtagttttccgaaacacgcgtcaagcgtgccaagatttcggccattttgccgatgtgtagttgtagctgaactaaatgcgtaaatcaaaggtgaaatttttggaaaattgacgggggagctaaattcgaattgtgtgcctgtttgaaagctgaatcgaagtttggcgcacagctttcgacgggcaaattccaacactggataccagcttttttaacgactattcgcacagcatctgaagctttaacgcccgccactgatttcctcagttgactctcaaagcttggctcgcgaggttgtttatagcgtcgcgactccaggattccccaaaaacgattcctttccgggtagctaaagcctggctggcttgcttactaacggcacgccacatcgaactgtgtgtgtgtgagcgtgtgtatctgtgtgttgcggtcctttttcccggcaggcagtgccttgtaaacaaaaataactctgctgccgaggagaggttgccatcgagggtggttacaacccccaaatctgaaacatccgacgacaaaggcaactacaaagctccgcgcaggataagtggcaagggcactcctgcctgccaacttttcggggttgcagacagtcggcaaacaagctgcgaatgcgactttaaacgtccataaacattcaggcagaaaacgaaaataataaaacgacggtcgttcggtttaactgggcatcgaagcgcctcgcatctgcaagtgcaattgttactgtatctgcatctgtatctattcgtgagcggtgaaaatgagcgaatccggtggctatcagaaaatgccgcccggctgggactgcaaatacgatcaagcaactggaaattggtgagttgcatgtgcacagcccgacgtcataaatatttatgcatccattaaccacaatgtcgtgaaatgcggactgtactgggagatgtggtggccagttgtgggatataggggttccatttgataggttgccacgggggcaactgataaatttgcgtgccaacgtcgcttggggtggctctttcggtgggcgaaggattatggttgggtgtgtggttgtgggtgtatgtagggggccttgggggcgtaagtcgcttactttaaaatgattgggtggtaggcgtccggttgaggtggtgtttgccatgtttggccttatagtgataaggaaattattcgttagttcggtggcttgcagaacttagttttgaaacacctttggtatttaaactcttaggacgcaagctcggtactaatttaaattattcatttaacacacaatggaacgaagtacaagcttggattggatattggctaacttttcttcagcttataatcgaaagaactttctaacataaaattttcaaaatgttttatgtttgaagaaaatgttttaatttaaatttaaattattattactgatacgcaaaacaattttactgaactctaaagacccagcgtgtgggtaccatgtggttccctatgggctacttagcttagtgctccttagccactccaattggcctcgtttcagcggcataaattgtgtcacttccgcgtcgtcggatgccagcggggtctttaacatctccttagcctatcatacatatatacatataacttaaccccttatgcttaaaaagccatgtgcaattaagcaacatacgttgtcatacgttaattcaagaggccactcaaccgaagacgagctttccatcctcacgacgtcctcgtcgacatccaccctctccattccgaaaatcagagcagagatggcctgtcaaacgacgatgaaaatgacgactgtgcgtccgccttttggcagctacttggcacgtgccttggtttaggcggttccttcaccctttacctgtccgtcctcccaagggaccatcaacatgtggggagaatcccaaaccaatccactccaatccagtccaccaccaaccggccggctttaggatgtgcctccacccttggcctgaatccaagagctttcgaatggccctgggtgggaggtcatttgctgacctttgatttgatagaagctcatcttccattcggctgcccttcttcccgttccagctattacataaactatctgacgaaggccatgcagctggaggatccgcgcggccgcagttacaggcagttgcagaacgaacgctgttccacggagtcgatagccttgcaggtaacctccgcttcctaccctgcattttattgattttttattcgaatgggaacccttgtacttttcagcagttggtcagtcagccgcagacgtcgcacaacagctcgccgtaccacgtccatcccagcaacaacttgactgcaattcgggccttccaggagcgccagcaacccacgctgcacaacatctctaccagtccattgttgtcggcctcctccaggggacacttggtgagtatgaaatgacctgaagattgattttgatagagaaactacagccatagttggcaatcaataggcaaatcacgtgtgggtgcgcatcgaaaaatctgtgagcatcatcaaaaatgtgcataagtaggtcgttctttcgcacaaaaaatacgcaattaccttctgatatagtgattacaacaagatatcctgattgtagatacttgtaagaggctaataatagataattcaaataggctgagaccttcaggaaatagttgtatgttttttaagttaacaaacatgaaattccatgagtagtatccgaagccccttgcttactttgcgtttaagtatcgataattggtttgaatgaattttttattaattaattttccacctaacccgcaggaaatgtcttcacctctgccctttcaacgagctcgcgtgggaccgaatctctcgcggcgctccaccattcaggagacctcgttcaccacgcaagcggaaacggatgccgtggtgaccaaaatccagaacatgttccccaccgctggcgagaaccatatacgtctcctgctcaagcggtaagaaattggtcccgacttcagctaagcgctcgtgccagctcagctggcgtactaatctgcgtacttacatctatgtcttctcacacgccgcctaattctgctgcttactgcacctgtctaaccccacgactaaacgctaatcccacgcttactaacccaccactccagctactacaatagcgaggcggttgtcgtcagtgcgctgcaggtggagaagcacccggttaccatgcccggaccctttgtgacgcccccttcgcagcggcacctcttccacagcggctccgccttctacatgacgccaccggcacgtcggccggacacggtagctagtcggcgcacgtcgcgcacggccagtcccctgcccggcggacgcttcggtagtctcgtgagcgtgcagagcggtcctggtggtccaagtggccatcaggctgttctgcctcccagctcggctgttccgccggctctgcacggatcgcccctgtggcgcagctcgcccaggccgcactcgtcgcccaagatgaagctgaggttcgatggggttcaaaatcgagggacatttcaaagcattgttggattgctttaaaatctgtgttaaccaaaagatcggatttaatctcttactttacagttttttattttttgcttgtaacaatctattaagggttattaggcttgggttacttataaaaagttctgtatcttttaatataattcgttggttttaaattggtgttttgttaatgttttgttgaaacatttattttatataatccaaggtaacatattaagtgacaaatttttaaattctcgatgttgtaacataatattcttttaacttaaattttcttcgatgataaataatatccaaattccaccatagatacatgaagaatatattccccaaggcggacgaagagctgcttctggatatcctggcaaatgcggataacaacgtgcagttcgcatcggaaaagttgatttctttgggctacacaaaaagagatatgcaacagccacacagacccaacaatcgcccgccggacctaaatcaagatcaggaggctggaggggatcagagtggtgtacatataccgctgagacccaaggaatacacagaggaagagaagacaaaaagtaggttttaattgtacacgtaaaacacttaaataaacatcttttacttacagtgcaaactttgcttaaggagaagtacccacagattgccgagcgcattatcctaatggctttggaatccgtcaactatgcagaggatagggctacgcaaatcctacaaatagtccaggacgaggacgagcagagggagcaaaagcaggctcccatgaatcccaagcacctggatcttaagaaaaccacaggaaccgagcagatcgatggtgccaacgaaaaagacaggtagcccttgactttatgttttcccgctcacgcgaataaaaccaaccgatcaaggtcgttggcacccgctttttccacccactcaatcaagttactctctttggctcgctgctttatccgttttttaatcgactgcctattttctatgtgaactttctttgctgcctccgcctctgactaaatccccgaaccaaaaaaacactatccgcttgcctcgcgccacttgatcatccagcctgcccgccgtggtggagcccaccacttcatccaagccgaagccgccgcacaagcgccacattcttccatcgatcaatgtcaccactccatcaacgttcaccacccagatcattttggcacaggctacgcccacaccaacgcccacagcggaggagatgaagctggagacccatctgtcatccatctctagtgcttcctcatcgcattcatatgcctcacccccacaatcaccccgcatcttccagcaaagctacgaacgcctgaccaccaagagcattttggccaagagcggccataaccattttggccaccagagcgataccaataactacagcatcgacggctacctgcatggctcctcaaatgctagctcctactcctcctactccgcatcaatgacgtcctcatcgctggtctcgtcggcccagtccaactcctcatccatcgcgaggaggccagctttcgaaagtcgtgctcgcaccaaaaccgattcactgaagtatgcccgctaaaaccaaaaaccgttccgataaccgtttttttaccgtttcgctaagtaaaatcaatcgttttgcgcatgagtttttcaaggagttcgcatggatagtatcgggaaatccgtttttgagatattatttttgaacctgttaactatattctttcggcatgccttaagctcaatataaaatattaaatctttgaaatattttagtttaatataaaaagaacttttatacaaatttaaccaattctcaacagacatcgtcagcactcccttggaaattcgcataattcggaatcagctgaatttcaatctattatcgaacgaatggccagtttgggacccaattcccagctaagcaagggtgcagatgaaaatcttttgctgtaagtagttcaacttaatgtcgaagtaataaaaacaaagactcatctatgaatataattaaaattattttcagagccgattatgtcacctggaatggacccaacacgaagcttcttcaaaagcagatcactcaaggacctaatgctagtcttctcacagatcgcacctataagccaaggggtgggaaatcggaactctgcaaaggaccccagtccggattggcgaagggcagcatctacgcccaaggcagcaacaagagcgccaacatcaaatgcaactaggcgggagtatctcatctggaacctcccccagagtgccaaagaagtgaagatgaatcttagtagccaagcaccaccctccacatgttcagacttacgatttatatatgtcgtagtgttttttgctcttatccttaaacacctaccaaataccacacgagtacgtagactcaccaaaaaaaaaaaaaaaaaaaaaaaaaaccgaagtcacattccatccaagctccaattgtttttagtaactcgtaaataaacaaactttaaaactaacaaacttatttaatattaatgcgcgtctggagaaaggggattatggggattatggtacaaaaagcacatgggtgtaatctagacctcgtcctcgttaaggagcatgtttggtataccatcgctgatgggaaacacacgacctgtctccgggcactccagttgaccctcgagcacgtcgatctcgaagagcagatggtgaagcttctgcaaaagcagttcattctccacaatgttttcaggctgaacggcaggaatgtcttctgtgagttccgcctaaaaaacaaattccaattattaacgaatataaaaaataacaggttttaatagtttaaaactgattaaaaatatttgaaaccagtaaatttgaaatcagtaacactatttagaaccattctatggttcttttagaaccattctatcacttaccacctgagcagctccatagaccgctgaccagtccagcttgggaaggattctctccacaaaagttggattaaattcgctctccaccacttcctttttgttaatctaaatgcaaaaacaaatagaccgtgaaacaatcaatagccaggacttgggacaccggaactcaccgtcagtttcaggggaaatcccactttgacgcccttgatggccacggaggtcaagaagttgtatgtgctgagtttcattttcgggcttgtaatggtttaattaatacaaagagatgaggtaaacaacaatgtttttaaat

SEQ ID NO: 22097 - DNA, 2575 bp, DROSOPHILA
gcttggctcgcgaggttgtttatagcgtcgcgactccaggattccccaaaaacgattcctttccgggtagctaaagcctggctggcttgcttactaacggcacgccacatcgaactgtgtgtgtgtgagcgtgtgtatctgtgtgttgcggtcctttttcccggcaggcagtgccttgtaaacaaaaataactctgctgccgaggagaggttgccatcgagggtggttacaacccccaaatctgaaacatccgacgacaaaggcaactacaaagctccgcgcaggataagtggcaagggcactcctgcctgccaacttttcggggttgcagacagtcggcaaacaagctgcgaatgcgactttaaacgtccataaacattcaggcagaaaacgaaaataataaaacgacggtcgttcggtttaactgggcatcgaagcgcctcgcatctgcaagtgcaattgttactgtatctgcatctgtatctattcgtgagcggtgaaaatgagcgaatccggtggctatcagaaaatgccgcccggctgggactgcaaatacgatcaagcaactggaaattgctattacataaactatctgacgaaggccatgcagctggaggatccgcgcggccgcagttacaggcagttgcagaacgaacgctgttccacggagtcgatagccttgcagcagttggtcagtcagccgcagacgtcgcacaacagctcgccgtaccacgtccatcccagcaacaacttgactgcaattcgggccttccaggagcgccagcaacccacgctgcacaacatctctaccagtccattgttgtcggcctcctccaggggacacttggaaatgtcttcacctctgccctttcaacgagctcgcgtgggaccgaatctctcgcggcgctccaccattcaggagacctcgttcaccacgcaagcggaaacggatgccgtggtgaccaaaatccagaacatgttccccaccgctggcgagaaccatatacgtctcctgctcaagcgctactacaatagcgaggcggttgtcgtcagtgcgctgcaggtggagaagcacccggttaccatgcccggaccctttgtgacgcccccttcgcagcggcacctcttccacagcggctccgccttctacatgacgccaccggcacgtcggccggacacggtagctagtcggcgcacgtcgcgcacggccagtcccctgcccggcggacgcttcggtagtctcgtgagcgtgcagagcggtcctggtggtccaagtggccatcaggctgttctgcctcccagctcggctgttccgccggctctgcacggatcgcccctgtggcgcagctcgcccaggccgcactcgtcgcccaagatgaagctgagatacatgaagaatatattccccaaggcggacgaagagctgcttctggatatcctggcaaatgcggataacaacgtgcagttcgcatcggaaaagttgatttctttgggctacacaaaaagagatatgcaacagccacacagacccaacaatcgcccgccggacctaaatcaagatcaggaggctggaggggatcagagtggtgtacatataccgctgagacccaaggaatacacagaggaagagaagacaaaaatgcaaactttgcttaaggagaagtacccacagattgccgagcgcattatcctaatggctttggaatccgtcaactatgcagaggatagggctacgcaaatcctacaaatagtccaggacgaggacgagcagagggagcaaaagcaggctcccatgaatcccaagcacctggatcttaagaaaaccacaggaaccgagcagatcgatggtgccaacgaaaaagacagcctgcccgccgtggtggagcccaccacttcatccaagccgaagccgccgcacaagcgccacattcttccatcgatcaatgtcaccactccatcaacgttcaccacccagatcattttggcacaggctacgcccacaccaacgcccacagcggaggagatgaagctggagacccatctgtcatccatctctagtgcttcctcatcgcattcatatgcctcacccccacaatcaccccgcatcttccagcaaagctacgaacgcctgaccaccaagagcattttggccaagagcggccataaccattttggccaccagagcgataccaataactacagcatcgacggctacctgcatggctcctcaaatgctagctcctactcctcctactccgcatcaatgacgtcctcatcgctggtctcgtcggcccagtccaactcctcatccatcgcgaggaggccagctttcgaaagtcgtgctcgcaccaaaaccgattcactgaaagccgattatgtcacctggaatggacccaacacgaagcttcttcaaaagcagatcactcaaggacctaatgctagtcttctcacagatcgcacctataagccaaggggtgggaaatcggaactctgcaaaggaccccagtccggattggcgaagggcagcatctacgcccaaggcagcaacaagagcgccaacatcaaatgcaactag

SEQ ID NO: 22098 - protein, 690 aa, DROSOPHILA
MSESGGYQKMPPGWDCKYDQATGNCYYINYLTKAMQLEDPRGRSYRQLQNERCSTESIALQQLVSQPQTSHNSSPYHVHPSNNLTAIRAFQERQQPTLHNISTSPLLSASSRGHLEMSSPLPFQRARVGPNLSRRSTIQETSFTTQAETDAVVTKIQNMFPTAGENHIRLLLKRYYNSEAVVVSALQVEKHPVTMPGPFVTPPSQRHLFHSGSAFYMTPPARRPDTVASRRTSRTASPLPGGRFGSLVSVQSGPGGPSGHQAVLPPSSAVPPALHGSPLWRSSPRPHSSPKMKLRYMKNIFPKADEELLLDILANADNNVQFASEKLISLGYTKRDMQQPHRPNNRPPDLNQDQEAGGDQSGVHIPLRPKEYTEEEKTKMQTLLKEKYPQIAERIILMALESVNYAEDRATQILQIVQDEDEQREQKQAPMNPKHLDLKKTTGTEQIDGANEKDSLPAVVEPTTSSKPKPPHKRHILPSINVTTPSTFTTQIILAQATPTPTPTAEEMKLETHLSSISSASSSHSYASPPQSPRIFQQSYERLTTKSILAKSGHNHFGHQSDTNNYSIDGYLHGSSNASSYSSYSASMTSSSLVSSAQSNSSSIARRPAFESRARTKTDSLKADYVTWNGPNTKLLQKQITQGPNASLLTDRTYKPRGGKSELCKGPQSGLAKGSIYAQGSNKSANIKCN

SEQ ID NO: 22099 - DNA, 4127 bp, DROSOPHILA
gattactctctcttttcggactcgactgcttagaagcatccatggctccatatgctcgcggcgccagacggattgaatatgccccaaaacggacggtcgaaggcgcttttaacgacttcagcactcacagacggagcagtgacgtctgtggattatttgtccggagaaccaccatcttctacggtttgcacttggcacaacgcctgtccaaacggcgataaagtggccaactcaacacgttttttgagagttcaccgcttttgatagtgatacgtagtgatagtgactaaggcgtaatcgatagcgcaattagactgcaattgaaacggcggccattactgcaatttgcgctccaaaagttagctcgctaagcccaaatggccatatatcttgactggattctggagatataggggagttttagcggtctttgtcttggaccataatcacaagcagatacgccaagccatttgtatccgaagtgggttttttatgaggtagcattcccccagcagcttatctaatcgggatcgcttattatgctgttatatttggaactggcacgagaaactatgtttgtccaggttgaccaagttcaatacacccagagataagacaagttttcattcatgactaaagctttaatggcgttaaaatacgggggattttggaaatattgcacagcctgtggacaaggcgatagatgagcgattgcaggcaattcaaaatgcaaaattaaaacttacgtcttaggaaacgaatacttgcagttacacaatcaatacagaaaattttagctacataatctacgccggggtagacaccagatctgatagagagttagatacagtacaaaagcatattataaaagtatggtataatatcatattataggcatcttttctggctagggtaaagtagggaaactttggtatttatcactctatcagatcttttgaatgccccagatgtatagatatggattatgtatgtatggattctaaggcaggctgtgtagatcgtatagcgtgtagaggtcttctgtgcgatcgtagttggttctcatatgcttcagcatggaaggcaggttctctttggccgcctcgacatcggagcacactttcttgagaagatctcccctagtgggcatcgcgtacatagccaggcgcgctcctttgcggatgaggaatgagtgatgcttgcccagggtgtcatcgtaggcctccttgcacacgtccacagtcttttggtcgtcgggtatcgcctggatccgattgagaaactcgtagacaaagtctagataagaagaaaccaatcaattagccactgtggcagttatatgcgcataacgctcaccaagaccgcgatgaagacgtagcagcgttcgactgccagacacgtaacccttctgagtaagcaactgggcctccttctcgtaatccagcatggttctgaaggtattaaagtgttcctgctcctccgcgtccttggctctcagggcgtataagatatctattttactgcgcacatcgctgctgacaaaactgaagacactgcccatgagctggaagaacctaatgaacaccgaaagcccaatagagcaccactaaaaaacataaacatcataatcactcagtttacttcattatttcctcgtaggctgccaagtatgcgtctaattgtacgtcatcctcgtccagaaggctggtttcgaacaaattagacactttgaggatatcaaaacagtttccattttccgccgtgccattggtctgcgtcgctaagctcgttttactcatcttataagcctgcctttcccctttgttttcctacaaactttaaagtctatttattttttttaggaaatcaatgtaaccgttctccaaaaaatccggtattaaaataccaccctgaaattactttcttcttattccagacagaaaccagtctattgtgaattgaatacaattttaattggagctattattacaattacatttaattcttaaagttaagataatacattttttatgctgatgatagattcccgctgccactgccagccccctttttcgttggacgatatgcaatcacatagcgctgtgcgaccggcaagggttcggcatagccattcgtgtacgatgaatcctcgaatagcacctcgtaatcctcggtggcggtttgcggcaggcgatggacaatggccttgtagaaacaggtggtctgtggatatagcgccattaccactgtgtccttggggaagagggcgtgaccatcggtctcaggatttgcacgcattagaggcagtgggatgacctttcgcttgctcagcacatggcgatccttttgctcctcgtcaatgtcaattacgtcgtatttgttttgacggtgaaggaactgcaccacttccgccaggatccagttctcctcctcatcaattcccttagctaatgcggcaacattgtcgccaacctatacagtggcgtccgattagtcagatcatcatcccagcttctttgtccaatcaaaatgaatgcttaccttggccacatagttcccctcggcgggaatggctccacatagagctggtgctcgttctcctagtttgccaacgaataacggcaacgtttgcgctgagagctgcaccattttcataagggcgccccgtcgaatggcctccttatttccagcgttgcgagctgtggaatatgcgagattaaatcctgtttatacatcccatcactaacccaccttggatgcgcctctcattgcgaatgcttcgaatctcgtggattttcgccagtgcggctcggattgtggcctcctcctgcgcagcctccgttaaactggccttgagcaggggcttaaccttctgattggtggcgtgcagagatcgcaccagactagcaatggagttttccgcacgacgacgctcctcgtccacattgtgaatgttttgttgaatgtccttcaggcgatcctgtaaatgccatataaatatagtatatatcgacatttattgttaacatctttacctgaatctgttgggcggcactctccgcagtcagtggcatgttgtttcgatattataacaatataataaatttgttttttgaacactttgtttacctacgcaatgaaaacaaaaacaagcataagcgtaaagtcgacaacgcgttagtattaactatgcgatagttttatattttacctcagtatttttttaatcttagcaaattttattttacagagtaaaacagagtaattattgttaagatttttgtaccgtataatctcattatttgactttagtggatctttttctcaaactcgaatatttacttttcaaagttgtttacgtttcttacattggagatggaagcaagtgcgcctaacagcacgcagataacagcacgatatcttcacgtggttggcgttatttagtcccttttctgcgctctatgacagcctctctggctttcccttcttttccatcgcgtttccgtaagtgtgctccgcgtttttccaattggctatttttatttataatatcttcaattgcagctaggaattccagtgtgcgaaaaacgtaggtgcctaatacacgagaaatgcaacgaaaatttcaacagttgttggctttttgttcaactggcgttggctaaaagtgaactccaagtgttaaccccaagctaaaattataatggcgaacattttttctgttttcatgtgccgccccatcaacgaatctttggatacccggagtagtttaagatggccaagtccaagaaccacacaaatcacaaccagaacaagaaggcccatcgtaatggcatcaagcgcccgctgcgcaaacgccacgagtccactctgggtgtaagtattcaaaaatatgcatatttagttagcatctagagttgattttaacaaccttcccgtctttagatggatgtgaaatttctgatcaaccagcgctacgcacgcaagggaaacctttcccgcgaggagtccgtgaagcgctacaacgagcgcatcgcttcccagaagggcaagccaaagcctgttactctgtagatgattgccccgcgtgtggataattaaaggacaattcagtttaacaaagaacc

SEQ ID NO: 22100 - DNA, 1502 bp, DROSOPHILA
aaacaaagtgttcaaaaaacaaatttattatattgttataatatcgaaacaacatgccactgactgcggagagtgccgcccaacagattcaggatcgcctgaaggacattcaacaaaacattcacaatgtggacgaggagcgtcgtcgtgcggaaaactccattgctagtctggtgcgatctctgcacgccaccaatcagaaggttaagcccctgctcaaggccagtttaacggaggctgcgcaggaggaggccacaatccgagccgcactggcgaaaatccacgagattcgaagcattcgcaatgagaggcgcatccaagctcgcaacgctggaaataaggaggccattcgacggggcgcccttatgaaaatggtgcagctctcagcgcaaacgttgccgttattcgttggcaaactaggagaacgagcaccagctctatgtggagccattcccgccgaggggaactatgtggccaaggttggcgacaatgttgccgcattagctaagggaattgatgaggaggagaactggatcctggcggaagtggtgcagttccttcaccgtcaaaacaaatacgacgtaattgacattgacgaggagcaaaaggatcgccatgtgctgagcaagcgaaaggtcatcccactgcctctaatgcgtgcaaatcctgagaccgatggtcacgccctcttccccaaggacacagtggtaatggcgctatatccacagaccacctgtttctacaaggccattgtccatcgcctgccgcaaaccgccaccgaggattacgaggtgctattcgaggattcatcgtacacgaatggctatgccgaacccttgccggtcgcacagcgctataccaatggcacggcggaaaatggaaactgttttgatatcctcaaagtgtctaatttgttcgaaaccagccttctggacgaggatgacgtacaattagacgcatacttggcagcctacgaggaaataatgaagttcttccagctcatgggcagtgtcttcagttttgtcagcagcgatgtgcgcagtaaaatagatatcttatacgccctgagagccaaggacgcggaggagcaggaacactttaataccttcagaaccatgctggattacgagaaggaggcccagttgcttactcagaagggttacgtgtctggcagtcgaacgctgctacgtcttcatcgcggtcttgactttgtctacgagtttctcaatcggatccaggcgatacccgacgaccaaaagactgtggacgtgtgcaaggaggcctacgatgacaccctgggcaagcatcactcattcctcatccgcaaaggagcgcgcctggctatgtacgcgatgcccactaggggagatcttctcaagaaagtgtgctccgatgtcgaggcggccaaagagaacctgccttccatgctgaagcatatgagaaccaactacgatcgcacagaagacctctacacgctatacgatctacacagcctgccttag

SEQ ID NO: 22101 - protein, 482 aa, DROSOPHILA
MPLTAESAAQQIQDRLKDIQQNIHNVDEERRRAENSIASLVRSLHATNQKVKPLLKASLTEAAQEEATIRAALAKIHEIRSIRNERRIQARNAGNKEAIRRGALMKMVQLSAQTLPLFVGKLGERAPALCGAIPAEGNYVAKVGDNVAALAKGIDEEENWILAEVVQFLHRQNKYDVIDIDEEQKDRHVLSKRKVIPLPLMRANPETDGHALFPKDTVVMALYPQTTCFYKAIVHRLPQTATEDYEVLFEDSSYTNGYAEPLPVAQRYTNGTAENGNCFDILKVSNLFETSLLDEDDVQLDAYLAAYEEIMKFFQLMGSVFSFVSSDVRSKIDILYALRAKDAEEQEHFNTFRTMLDYEKEAQLLTQKGYVSGSRTLLRLHRGLDFVYEFLNRIQAIPDDQKTVDVCKEAYDDTLGKHHSFLIRKGARLAMYAMPTRGDLLKKVCSDVEAAKENLPSMLKHMRTNYDRTEDLYTLYDLHSLP

SEQ ID NO: 22102 - DNA, 3867 bp, DROSOPHILA
tgcatatataaaatagatactggcactctcgtcgccataatcttaatatcttcaaatgtattcaaaacaaataaaaaaaatattaaattttctggaaaattattacgataagcatttttgtatacatttgaataagtttttttttaggatttcttctatataaagtttgcaaaaatgtttacaaaatttattttcaattgaaatacttacattttcagaccgatcccagcaagcccgttttgctggctggagacaaggagaagaagggaatggctgacgtcgatgccgccggcggtatacagtatctggagaatcagttgaagacgtgcgccaacctggcggaaatactgaagattaagcccctgagctttgtttaaactcgaaagaactggtggacttacactagggagtcaagcatacccattgccatatgttgaagacgcctctgcattttgatggaccaaagcactacagtaacactttacactgagagaaatattgatatttgcaacagttagattagattgcactggtgctgaactaaagctagttacatatctccatgttgcacttaaaacatatttctagtctcctaagagtctgtcgttgctcctattatttagtttttaactacgcaagctttcttattaactaaaaacatgagcttcggcattcttttagggaattagcaatatttagtagagtaaagacttgcagtttgcaaaataatatacataagtagaagtacagctaaatttctgtttaaaacaaaaactatctgttttaaaatatattgattttggcactttgagatacccatgctgtgttcagcaatttcaaaactattaaaataaacaatatactcttcgataatcaaatatttgtctttatagcattttttcttgcgattgcaaacaaggtaaatatattaatttaactattattcaatttaattgagctcatttttatatttaaacataactttgaatgccacatattttcaaaagtccagaatcacctcattcaaagtggcttcggcctcccacttggcctccttgtgtgccgtcggtgaatgcacgacctttctggacttgaattcctggcactttgtctcgaaaagtttgggtggcatgggttgagttggcgatgaaacatgcatggcggttcgcagctcttccggatcctcggtgacactcatggatttgataaagtcgatcaggcgctgattgtcctcagtgaggcgacgcttctcctccagcatcagcaggttttgagcttcggccatcgcctggcggcgccagaagttcctgagacttttgtttagctccacgagttcctcctcggtcatgtccacgtgatctttcaggttgagagtctgcagcttgaagtattcatcgacatccacctcggtttcgtcgaatacctcgccgccgaggattaccttttccgattcggtttgcagtttcctgcaagtgatcgacagggccaagagtaattccccacttttcacgtgcttctccatttgctggaataatatttcaatttagaaatgggtaatagggcttgggacaaaggttcaccttggtcaactcgtagcactcgccggtcaggatgcgcaacttctcgtgcgtgatctcgcgatccatctcctggttgagctcaatcttcttgcgcacgttggtgaagtactggaactccaggcgaagatcgttgagcgtggagttgttctccgcatccatgcgaaccatttcgcgctgcagttccgcctgcatgttgatgtacttggactcctcggcgtttagcttgcgtgactcctccatgaaagccgcctgccgctccgtcagccagtggatcttctcgtacttgtgggcatccagttcggtgctcctcagcgactccacgaagtcgttcagttgctgctgcatgtgcgtcatccggcggacaatctgatctcgaatcttaaatctgttctcaatctccgtattcacgcgatcgtcgcgctgctccaggtagatagtgtaatcctccttcagctgatcccgggtggtgatgttggtggcatggattatgttctcggagttcgttttcatggcttccacctcttcggtgcgccggcgcacctcttcatagtaatccctcagcatctcgtcagcctgctggtcatacatgctcttcaccccgcccaacatcacgtggaagcagtcgcgaatgtgatcaatcagctccaccgttttgctgtagcaacgcacgtgctgatcctgcgtctgcgccatgtcgtccagaagcatcttgatgtggtcgttcttggcctgaatgttacgttccgagcgctcgccccaagccctcatctcctcgtttagctccttgatcttgatttcgcggcacatctcgtgccactcctcgttgcctttctcctccatatgcttgcccatctccagctcgcgcatcagggcatcctgagaggatcatggcgcaacattagaaatgatgcgtttacaattttaatatagtcttaatatattatttttattataaaaattaataatattaaggatttgcttaggttcatccttaataaaaactctgcgaaagttagttgaacccacccgcatgatgagccgcttctcctcgatcatagccagtcgcttggcctctttcttggcggccttcttctgagccttggttagtttgggcggtccttgtggctccggctcctcctccagttcttggaggtagttttccgaaacacgcgtcaagcgtgccaagatttcggccattttgccgatgtgtagttgtagctgaactaaatgcgtaaatcaaaggtgaaatttttggaaaattgacgggggagctaaattcgaattgtgtgcctgtttgaaagctgaatcgaagtttggcgcacagctttcgacgggcaaattccaacactggataccagcttttttaacgactattcgcacagcatctgaagctttaacgcccgccactgatttcctcagttgactctcaaagcttggctcgcgaggttgtttatagcgtcgcgactccaggattccccaaaaacgattcctttccgggtagctaaagcctggctggcttgcttactaacggcacgccacatcgaactgtgtgtgtgtgagcgtgtgtatctgtgtgttgcggtcctttttcccggcaggcagtgccttgtaaacaaaaataactctgctgccgaggagaggttgccatcgagggtggttacaacccccaaatctgaaacatccgacgacaaaggcaactacaaagctccgcgcaggataagtggcaagggcactcctgcctgccaacttttcggggttgcagacagtcggcaaacaagctgcgaatgcgactttaaacgtccataaacattcaggcagaaaacgaaaataataaaacgacggtcgttcggtttaactgggcatcgaagcgcctcgcatctgcaagtgcaattgttactgtatctgcatctgtatctattcgtgagcggtgaaaatgagcgaatccggtggctatcagaaaatgccgcccggctgggactgcaaatacgatcaagcaactggaaattggtgagttgcatgtgcacagcccgacgtcataaatatttatgcatccattaaccacaatgtcgtgaaatgcggactgtactgggagatgtggtggccagttgtgggatataggggttccatttgataggttgccacgggggcaactgataaatttgcgtgccaacgtcgcttggggtggctctttcggtgggcgaaggattatggttgggtgtgtggttgtgggtgtatgtagggggccttgggggcgtaagtcgcttactttaaaatgattgggtggtag

SEQ ID NO: 22103 - DNA, 1662 bp, DROSOPHILA
cacaattcgaatttagctcccccgtcaattttccaaaaatttcacctttgatttacgcatttagttcagctacaactacacatcggcaaaatggccgaaatcttggcacgcttgacgcgtgtttcggaaaactacctccaagaactggaggaggagccggagccacaaggaccgcccaaactaaccaaggctcagaagaaggccgccaagaaagaggccaagcgactggctatgatcgaggagaagcggctcatcatgcgggatgccctgatgcgcgagctggagatgggcaagcatatggaggagaaaggcaacgaggagtggcacgagatgtgccgcgaaatcaagatcaaggagctaaacgaggagatgagggcttggggcgagcgctcggaacgtaacattcaggccaagaacgaccacatcaagatgcttctggacgacatggcgcagacgcaggatcagcacgtgcgttgctacagcaaaacggtggagctgattgatcacattcgcgactgcttccacgtgatgttgggcggggtgaagagcatgtatgaccagcaggctgacgagatgctgagggattactatgaagaggtgcgccggcgcaccgaagaggtggaagccatgaaaacgaactccgagaacataatccatgccaccaacatcaccacccgggatcagctgaaggaggattacactatctacctggagcagcgcgacgatcgcgtgaatacggagattgagaacagatttaagattcgagatcagattgtccgccggatgacgcacatgcagcagcaactgaacgacttcgtggagtcgctgaggagcaccgaactggatgcccacaagtacgagaagatccactggctgacggagcggcaggcggctttcatggaggagtcacgcaagctaaacgccgaggagtccaagtacatcaacatgcaggcggaactgcagcgcgaaatggttcgcatggatgcggagaacaactccacgctcaacgatcttcgcctggagttccagtacttcaccaacgtgcgcaagaagattgagctcaaccaggagatggatcgcgagatcacgcacgagaagttgcgcatcctgaccggcgagtgctacgagttgaccaagcaaatggagaagcacgtgaaaagtggggaattactcttggccctgtcgatcacttgcaggaaactgcaaaccgaatcggaaaaggtaatcctcggcggcgaggtattcgacgaaaccgaggtggatgtcgatgaatacttcaagctgcagactctcaacctgaaagatcacgtggacatgaccgaggaggaactcgtggagctaaacaaaagtctcaggaacttctggcgccgccaggcgatggccgaagctcaaaacctgctgatgctggaggagaagcgtcgcctcactgaggacaatcagcgcctgatcgactttatcaaatccatgagtgtcaccgaggatccggaagagctgcgaaccgccatgcatgtttcatcgccaactcaacccatgccacccaaacttttcgagacaaagtgccaggaattcaagtccagaaaggtcgtgcattcaccgacggcacacaaggaggccaagtgggaggccgaagccactttgaatgaggtgattctggacttttga

SEQ ID NO: 22104 - protein, 523 aa, DROSOPHILA
MAEILARLTRVSENYLQELEEEPEPQGPPKLTKAQKKAAKKEAKRLAMIEEKRLIMRDALMRELEMGKHMEEKGNEEWHEMCREIKIKELNEEMRAWGERSERNIQAKNDHIKMLLDDMAQTQDQHVRCYSKTVELIDHIRDCFHVMLGGVKSMYDQQADEMLRDYYEEVRRRTEEVEAMKTNSENIIHATNITTRDQLKEDYTIYLEQRDDRVNTEIENRFKIRDQIVRRMTHMQQQLNDFVESLRSTELDAHKYEKIHWLTERQAAFMEESRKLNAEESKYINMQAELQREMVRMDAENNSTLNDLRLEFQYFTNVRKKIELNQEMDREITHEKLRILTGECYELTKQMEKHVKSGELLLALSITCRKLQTESEKVILGGEVFDETEVDVDEYFKLQTLNLKDHVDMTEEELVELNKSLRNFWRRQAMAEAQNLLMLEEKRRLTEDNQRLIDFIKSMSVTEDPEELRTAMHVSSPTQPMPPKLFETKCQEFKSRKVVHSPTAHKEAKWEAEATLNEVILDF

SEQ ID NO: 22105 - DNA, 7173 bp, DROSOPHILA
agtgatatccatttttaactatcaattgatcatgtattataaataaaacgagaatgttgcttcacatttgcttttcaaaacaaacgtcgaagaaaaagcatcacttgcaactcattttataaatttttatataaactgacaatttttttggtttttaattaaaaatatgtttgtgtcgtagactataaaaacaaatttatgatttatattgccctatgactatatcatagagtatattctttttatgctacacaaacggatattccaattggaatgactagacgcccaattgcgtgggtggttgtctcggctaatgtcttctacttcatcctagaccgccaccatttattttcagcttttcgccaaaaaatagcatcaaaaacaaaccaattgcttatgcttttccttaaatatcctaacaatagcactgatttttaaagtagttaaatgaatatttttgtaaatcataacactttgcctccatatagctttacacatttacgcatgtcaagccgcagctttgaacgaattgttgcattgaaatttagacttcgcttttcctctcgatggggcaccttgtgaggaaaagcgatagctgcgaacgatgccgccagttcacggcagttcagcttgtcgcctcgaacaataaagacgaccgatccgggagccataatatatatataatatagctttatagcacggcactgtttggattttggcgtgccaattggcgctagttgctgccgttgctgttgttgttgttgctttgtttgttgtgctaattacgtaaattgcgtgtttatttgtttgttaatttaaatactttacgtagtagtgaatttgttagttgacgacccgccaggttcgttttttttctgggcaattaatctgcgcgcgagtaaatctcccggagaaaacaagagaagcgttgtgagtcacttgagaattagagaataactaaaaagtgcaagcgaaaaaagcaaagctcacactcgtcacgccagctcagctgattctgattgggattcttactactctctctctctctctctgtctctcttcattacgatacgtaatatacgtatacgtatttgtatacccctctctctcacacactcttctattctgttttggttacctttttgtgggttacgttaccttatttgccgatatgactgctttgacattgctacgacgatcagttacggcggtcagctacgacggttacgcccacgtttgcgttacgaattggcggtttctgccccagcttcaaaggtgccaattgcatttgcacgttagtgggcgacatgctgctgtacttttgtccagcaaaacaacagcaacaacagcaacatcagctgttgcagctgcgcaggcgccaaatgcgtatgctaatgttggcggtaagttcataagcttaatttatgcaaacagcgcgtgcactcggtgatttatgatgctgcagcagattcatgcatcgaaatcgttaaataaaaaccgaatgagagatatgcgcgcctaacgaaaagggagatataacgataccttagattcaaactttcaagagatcttaggcaaaaaaatgtaccggttacaaccgattcgattcaataaactacatcactgatatcatcacctctcataattgtaactcgatgaatggtttaatttagaaataaacaaaaaaaattaaaaatctgttgtaagtgaaaatctaaagtcttccatcaatcgtaaacaatatatataaataataataaatatgtaactaactaaatatgtaactaactagttgctggcattattaagccacagaaaaataaaggtcaaaggtctatcttccgagaataagtttataagtttactccatatcaactactgaagttattcgtaaatacgtttgaatttaagcgcataccaactgcagtattatatttttgtttgcttttttttgttcagtttctcttattacatattttatctggtattcgcaaacatcacaatcctttatcctttgttaacccagcaaagccccaaaaataatatttatgttctggcagacaagtgggtattttattatgaaatgggggactgtcctttaatgtacgataaaaatataaataaaaacgaaatgggactgggattggaggcgtgttcgtctccgcctgccttgcatttattactaatcacaatttaatagccccattgaaagctcattaagcactcactcttcctttttattgcagaaagtgaaacagaatttaataaccggttccacttcaattgccattttatcaacataacacccgctccagaagcgcggatcgatcatttttctgccattactcaaaaaaggtgttaatgagcgcaccgaatcggtcataaaacttgtttcaccaaatccaacacttgttggttatgtactcgtttactctagattaattagggtctgttcctcaaagctctttaaatgtacttcgggacatatataggctataaccgataagataagtggacagaaatcctataagaactgatataagattaaataattagcagatggagtgctgggtatttttttattattcagcaaatgaaccaagtcgtgtttgatccatttaaagcgaaaatgagccaggtttggtttgaaaataaactttgttatattctagatttcaggttcaagtattaatatgttatcgtgttcaaactctttatcgaattttatctggttaataatcaattgagtacaacaactatagctatagtaatatgtactaacgtgctgtactcaagaattcattcttttccatgcagtattttcatgtggttgcccatttcaattttttctgagtggtgtgactgggtttcgataagataaagctcgtaaagccatcaacttaattggggtttcagctggtatgtatgtgtgccatgtgcccatctttcacattcactttcgttgtgtaaggtcaacaaagttatgtggattaaatagagatacgcccattcacgtcgccctccccatcctctttatattttcctaaccacccacccaccaagtaaatgaactcaaattgaaatgccctagaccgtcgcttctattccaactctatcgcttgccatttaacacatcaatttcaaagtacagaaataatttcgacaagttcaaggtcattaccaggcacacagatactcggcccacacatccaagcgcaaataacttgaaatactcgcacacaaataataaataagctagtgaataaataatgtgtgcatatagaccgcgagccccctataatagaaaaaatagagagacagcaccgacaaaaatatcaaaaataaaacataaacacgttacacgcgccggacttttttgagagatggcgattccattatatacctaagttataatgttgagaaaccctgcaaaattccagtagaaacctaaccaaacattatgctgataagcatattcgcgtcgaaaaattcgggtttgctaaaaagaatgaataaacaatagcagatgagcatatatgtataggcccctccatgggttgtttgcgagcgtctagggttttcagtatgggtgagagattgccagaacaattagaagaccgcttcggtagcctatgagcaatttgaacgcgttccgtgcgcttccagtcgctcatacgccgcgtatccgaacgcacacgctccgctctttgaaatcggtacagttataaattctaaagtgaacccaacccctttgtaggcttttccatcacgtaccgcaccatgtccgccgctgctccgaaactggtggccgttgccgagtcgcgtcgtttcatgatcgactgcttcaaggcggtgaaggtgccccaggcccatgccgaagcccaggcggatctcctggtggctgcggaccatcgggggcacttcagccatggcatgaaccgccttgagatgtacatcaacgatctggccatcaactccacggacggagcggctgtgcccaagatcctaaaggaaactccggccaccgcctgggtggatggcctgaatggacttggtgccgtcgtgggcaactactgcatggatctggccatcaagaaggccaagacggtgggagttggctgggtttgtgccaagggatcgaaccactatggcatggctggttggtatgccatcagggccatggatcagggtctggtgggcatgtccatgacgaatacctcgccgctgatggcacccacacgcgccaaggaggctgctctgggcaccaatcccttgtccctgggtgccaatgccaccaacggtgataagttcctgctggacatggccaccacagccgtggccgtgggaaagatcgagatccagcgcaggaagggagctcctctgcccgacggatgggctcaggatcccagtggtgaagtgaccaacgatgcagagctgggtttcagcactgggtgcctgatgccattaggaggatccgagctgacctccggctacaagggttacggccttggcgccatggtggacattctgtcgggtgtcatgtccggagccaactactcgacgcaggtgaggaagtggacacatgctggcgccgattccgcagctgatcttggccaggtcttcatcgccgtggatcccaactgctttgctcccaacttcgaggaacgcatggccgacttcaactcccgcctgcgaggcgctactccggtaagaatgtacccaaacaaaaataacaagattgatcactacagtcgagtccctcgactatcagatacctattatataatatggttagtgcgcgtggggtcacaatttgtgtggcataacgaaagatgtgaaaaaaaatcaaaatgtttttcaaatgtgtggacgtgcctgttttaaattaggcgtgtctaagtagacaatctagatgcttaatcttaacattttagcttgcatagttcccaagagcgttcgaagctttcaaacggacaaacggaaagacggacacggtcagattgattcggctagtgattcagatcaagagtactttataggatcggaaacgattgatttttactgtttcaaacattccaacaaatctagtatactcttttaatctataagtagcggcaaaaacaaccagtattaagaaaatttaaataacttttaaaatatttaaaatattaagaaaggtatgatttccaactgttgttagtcaagtaaaaaaaaaaaaaaaaggtttgaaatttgaatacaaatctatattctcctggaaataaattatttgataatcttatcaaaaatacatacaaatgcatatataaaatagatactggcactctcgtcgccataatcttaatatcttcaaatgtattcaaaacaaataaaaaaaatattaaattttctggaaaattattacgataagcatttttgtatacatttgaataagtttttttttaggatttcttctatataaagtttgcaaaaatgtttacaaaatttattttcaattgaaatacttacattttcagaccgatcccagcaagcccgttttgctggctggagacaaggagaagaagggaatggctgacgtcgatgccgccggcggtatacagtatctggagaatcagttgaagacgtgcgccaacctggcggaaatactgaagattaagcccctgagctttgtttaaactcgaaagaactggtggacttacactagggagtcaagcatacccattgccatatgttgaagacgcctctgcattttgatggaccaaagcactacagtaacactttacactgagagaaatattgatatttgcaacagttagattagattgcactggtgctgaactaaagctagttacatatctccatgttgcacttaaaacatatttctagtctcctaagagtctgtcgttgctcctattatttagtttttaactacgcaagctttcttattaactaaaaacatgagcttcggcattcttttagggaattagcaatatttagtagagtaaagacttgcagtttgcaaaataatatacataagtagaagtacagctaaatttctgtttaaaacaaaaactatctgttttaaaatatattgattttggcactttgagatacccatgctgtgttcagcaatttcaaaactattaaaataaacaatatactcttcgataatcaaatatttgtctttatagcattttttcttgcgattgcaaacaaggtaaatatattaatttaactattattcaatttaattgagctcatttttatatttaaacataactttgaatgccacatattttcaaaagtccagaatcacctcattcaaagtggcttcggcctcccacttggcctccttgtgtgccgtcggtgaatgcacgacctttctggacttgaattcctggcactttgtctcgaaaagtttgggtggcatgggttgagttggcgatgaaacatgcatggcggttcgcagctcttccggatcctcggtgacactcatggatttgataaagtcgatcaggcgctgattgtcctcagtgaggcgacgcttctcctccagcatcagcaggttttgagcttcggccatcgcctggcggcgccagaagttcctgagacttttgtttagctccacgagttcctcctcggtcatgtccacgtgatctttcaggttgagagtctgcagcttgaagtattcatcgacatccacctcggtttcgtcgaatacctcgccgccgaggattaccttttccgattcggtttgcagtttcctgcaagtgatcgacagggccaagagtaattccccacttttcacgtgcttctccatttgctggaataatatttcaatttagaaatgggtaatagggcttgggacaaaggttcaccttggtcaactcgtagcactcgccggtcaggatgcgcaacttctcgtgcgtgatctcgcgatccatctcctggttgagctcaatcttcttgcgcacgttggtgaagtactggaactccaggcgaagatcgttgagcgtggagttgttctccgcatccatgcgaaccatttcgcgctgcagttccgcctgcatgttgatgtacttggactcctcggcgtttagcttgcgtgactcctccatgaaagccgcctgccgctccgtcagccagtggatcttctcgtacttgtgggcatcc

SEQ ID NO: 22106 - DNA, 2010 bp, DROSOPHILA
ccagctcagctgattctgattgggattcttactactctctctctctctctctgtctctcttcattacgatacgtaatatacgtatacgtatttgtatacccctctctctcacacactcttctattctgttttggttacctttttgtgggttacgttaccttatttgccgatatgactgctttgacattgctacgacgatcagttacggcggtcagctacgacggttacgcccacgtttgcgttacgaattggcggtttctgccccagcttcaaaggtgccaattgcatttgcacgttagtgggcgacatgctgctgtacttttgtccagcaaaacaacagcaacaacagcaacatcagctgttgcagctgcgcaggcgccaaatgcgtatgctaatgttggcggcttttccatcacgtaccgcaccatgtccgccgctgctccgaaactggtggccgttgccgagtcgcgtcgtttcatgatcgactgcttcaaggcggtgaaggtgccccaggcccatgccgaagcccaggcggatctcctggtggctgcggaccatcgggggcacttcagccatggcatgaaccgccttgagatgtacatcaacgatctggccatcaactccacggacggagcggctgtgcccaagatcctaaaggaaactccggccaccgcctgggtggatggcctgaatggacttggtgccgtcgtgggcaactactgcatggatctggccatcaagaaggccaagacggtgggagttggctgggtttgtgccaagggatcgaaccactatggcatggctggttggtatgccatcagggccatggatcagggtctggtgggcatgtccatgacgaatacctcgccgctgatggcacccacacgcgccaaggaggctgctctgggcaccaatcccttgtccctgggtgccaatgccaccaacggtgataagttcctgctggacatggccaccacagccgtggccgtgggaaagatcgagatccagcgcaggaagggagctcctctgcccgacggatgggctcaggatcccagtggtgaagtgaccaacgatgcagagctgggtttcagcactgggtgcctgatgccattaggaggatccgagctgacctccggctacaagggttacggccttggcgccatggtggacattctgtcgggtgtcatgtccggagccaactactcgacgcaggtgaggaagtggacacatgctggcgccgattccgcagctgatcttggccaggtcttcatcgccgtggatcccaactgctttgctcccaacttcgaggaacgcatggccgacttcaactcccgcctgcgaggcgctactccgaccgatcccagcaagcccgttttgctggctggagacaaggagaagaagggaatggctgacgtcgatgccgccggcggtatacagtatctggagaatcagttgaagacgtgcgccaacctggcggaaatactgaagattaagcccctgagctttgtttaaactcgaaagaactggtggacttacactagggagtcaagcatacccattgccatatgttgaagacgcctctgcattttgatggaccaaagcactacagtaacactttacactgagagaaatattgatatttgcaacagttagattagattgcactggtgctgaactaaagctagttacatatctccatgttgcacttaaaacatatttctagtctcctaagagtctgtcgttgctcctattatttagtttttaactacgcaagctttcttattaactaaaaacatgagcttcggcattcttttagggaattagcaatatttagtagagtaaagacttgcagtttgcaaaataatatacataagtagaagtacagctaaatttctgtttaaaacaaaaactatctgttttaaaatatattgattttggcactttgagatacccatgctgtgttcagcaatttcaaaactattaaaataaacaatatactcttcgataatc

SEQ ID NO: 22107 - protein, 446 aa, DROSOPHILA
MTALTLLRRSVTAVSYDGYAHVCVTNWRFLPQLQRCQLHLHVSGRHAAVLLSSKTTATTATSAVAAAQAPNAYANVGGFSITYRTMSAAAPKLVAVAESRRFMIDCFKAVKVPQAHAEAQADLLVAADHRGHFSHGMNRLEMYINDLAINSTDGAAVPKILKETPATAWVDGLNGLGAVVGNYCMDLAIKKAKTVGVGWVCAKGSNHYGMAGWYAIRAMDQGLVGMSMTNTSPLMAPTRAKEAALGTNPLSLGANATNGDKFLLDMATTAVAVGKIEIQRRKGAPLPDGWAQDPSGEVTNDAELGFSTGCLMPLGGSELTSGYKGYGLGAMVDILSGVMSGANYSTQVRKWTHAGADSAADLGQVFIAVDPNCFAPNFEERMADFNSRLRGATPTDPSKPVLLAGDKEKKGMADVDAAGGIQYLENQLKTCANLAEILKIKPLSFV

SEQ ID NO: 22108 - DNA, 4973 bp, DROSOPHILA
gtagaaatcataattcaattgcaacggatcgagtacttacattatcactcttttcttgatcattccccttgactacacaatcatcgatcttaacaacttccgttaaatcaggactggtacttttgcacttgtactgcttaaaaactagcttgaacatgcttcataaacaataagtacaatataaacaataagttaatataaacgatagcaatagtgtgactgcgtttggagaaatcttaaatgcttttgagcacgtttagaaatcagacatgtggtggaaatactatgggatagatataaaaattaaaaatgaatgcaattcataagagacattgccgaaaaagctcgaatgtccttttcatggaaaaaattttaagccttttttcatgaggtgattcatttgtgattaatcttatcgatataaagttatcgatatatgaacgggacttttaactattttgaaatatttttgttgttttgagaccgattttttcattgtttacgtttttgcagtgatcgttttcattatttcggtcgaagatacgtcttaagggttgcacaggaaaaaatcaagtgggaacattacacttcagagcgataatagatctttattttttatatttttatgaattaatattaaaaaaggagttgaaataagaaaatggtatatttatatgacatatttatatatttatatatgttgtagttattttactttcatgtgagggggcgtgcttaatactatattcggttcaaaagaaaggggtaccacattgtttatataaaataaaatatgtttttaaaatataacgtcttttgacaaataaactttgaataaataaagacaagttggtatatttgccggctctctccgtccgcagtgtgaacagcctggctgccgaatatgtatcaatgctatcgatatccgcatacatcgatactgcttccttgcacccttaatttgtttctaggtgttggctgccaattgtagagtgcaaatgaaaagttacagattggtggcttcgttaacaaaattttcagttatttgtgtagttgaagacgggaatttgttttgcgtataaaaagttaacactgcgtgtaagtaacgtattgtcgtcatcaacaaactgtccagtgaatgaaaattgaaagaaaaattactgatctatggtaatgtgtgtgtatgtgctaaaaggaaaaaaaaatttttcatactcgctgaacgacgagtgatgaaaatgcagtctcgatagttttgcgcctacatatatgtatgactattgcacagatttggttgttttttttttctaaacgattgccagtcggcatggaaaattaaatgaaatgagctccatatattttgtgcctgtgccagtgccttcccaacgaaaaatgttcaacgtttaaaattgattattttttttttatctatttccctcctgctctttgtcatgtgtacgcttacgcggttgctgcgcgtgcgaatgggacaccgattgccgcgactgtttttgtctcaccgcccgctttcgggaacttctgacctgctttcgctgccgcgctttcaattgcgcacggctcgcatccactagtcgtgctccttgctccaatcgaaagggccacttgcgccgcggtggtggtgcaaaacttgcaattttggtgtacaaaaaaagcaaaaggaatatatcccatatatcctacccatctatcggaagaacggaattcgaaatccagcacataaaaagcataaatcacatcaaaaaattcgcattttctctggtccttagcaccagatcgctttttatgcatccaattcggtttcctctttttttttagtataccatcccatccgcgagataacattctgtattaaacaaaacgcccaacatcctaattacaaatcagacgggacggaaaatcgaaaaaactataggaacctctctctccccccccactaacgtagtttatgtgtatttaacaagcgaagaactttctgcagaggtctgaaatacaccaatcgcacataccaaacaaaaagtaataaaaaagaaataattgaaaaaccaaatagttaaattggcagagcaaacacaggacgacgactatgaactaaagtcagaaattaatggacatcgtaccgagaatataatccgtgaatagtactatacgataaaacagaaaaagaaaaaaagtcaactaaaaagcaaaaaaccaactcttgcagaacacagttcatgatttatccatactagaagtgcacaaaataaacgccgtatgcaagcgtgatcatccaaggctcattatccgactaagctactggccagcttaaaaaaagtaagcgtaagtacacccacaactgaccatataactaggttaatgaacgcctccatttactacttccccatatgtatagcaccatctaacaagagcgaatcgaatcgaatcgacttggacgaccgaccgaccgaccgcacaaagaaggatctatctggaaagccggctagccgattcccgcatccgattccgaatacgaatacgtatccgtatccgaatccgaatttgaaaccgaatcctcaaccaaatcatcccataaggacgccgctgtcttcaacgatcacaagatgaatgaactagacagtctcaggcaggaagccgagtccctaaagaacgccattcgggatgcccggaaggcggcctgcgacacatcactgttgcaagcggccacctcgctggaacccatcggccgcatacagatgcgcacccgtcgtacattacgcggccatttggcgaaaatctacgccatgcattggggcaacgattcaaggaatctcgtatcagcctcacaggacggcaaactgatcgtttgggactcgcataccacgaacaaagtccatgccattccactgcgatcctcgtgggtgatgacctgtgcgtacgccccatccggtagctatgtggcctgcggtggcctcgacaacatgtgttcaatttacaacctaaagacgcgcgagggcaacgtccgggtgtcccgtgagctgcccggccatggtggctatctatcgtgctgccgcttcctggacgacaatcagatcgtgaccagctccggtgatatgtcgtgcggattgtgggatatcgagacgggactgcaggtaacctcgtttttgggccacaccggcgatgtgatggccctctcactggcgccccaatgcaaaacgttcgtatccggcgcctgcgatgcgtccgccaagctatgggacatccgggagggtgtctgtaaacaaaccttccccggccacgaatccgatatcaatgcggtcacatttttcccgaatggtcaggcattcgccaccggttcggacgacgcaacctgtcgattgttcgatatccgtgccgatcaggagttggccatgtattcgcacgacaacatcatatgcggcatcacatcggtggcattctcgaagagcggacgtctgttattagcgggctacgatgatttcaactgcaatgtatgggacacgatgaaggcagaacggtctggcatactcgctggccacgacaaccgtgtatcctgtttgggtgtcaccgagaacggcatggcggtggcaacaggatcgtgggactccttcttgcgtgtatggaactaaaaataaaacagaaacagaaacagcagcataagcagaaacagaaacaaaacaaaacaaaaaacagagaaaaccaaacaaacaaagaacaacaaaaaaagaggaaaaagaaaaagaacttgaaaatgcattaaagggtggggtggggtgtcaggtcaacggttgcgcagtctgcggatagtgtttcacccatcatctacattgtgatctaatgtatatgattcggtgttaccgtctctgtggtaaatattaaatgagtgccggacgttttgaatatgtgggcgcagctagttgactagaacgtagaccacaacaacaaagaactttatatacaacattatttatattgctatatacttattaactaaaattatacaaaaaaacaaaataaaaccaaaaaaaaaaacaacaaaaaaccgaaaaaaaaaaccgcagacatacgcagcaacatacaaatagacatacacacgcatacaagaatattattagtgtaaatggaaaattgagaaaagaaaaaatgaaaaaccaagaacaagcgatcaagaagaaaccaaaacgataaagaaattgatggagtaacgatgggcccgctgatagtcagaagagtaagagtcagttgtttagtcagaattccggttacagctacagtttaaagcgtacgtaaattaaacttagttcaaatcgcatttcagcggtgagtgcgtgcagctgagagcacaaggctgccagcccctggactcctggcatcccgatcctggtcctgatcccgcatcggaacccgcatccgtgtcccaggagccgcaggagtggtgctggccagtcagtcagttaatcagtgagtcagtcgtttgcactttgtaaaagaaaatgaagatggtatcattgtaatcatgtatgtcaacaagtaaatacatattcttttgcgtataatacataaaacttcagaatgtgtggatgtggatgatcctgatgcaaggtggggatggtggagaagtcaaataaagttaaagcatttaaaaaaaataaaataaaaaaagaatcacggcaaacctaaacgtaaagcaaaacaaaagaaaacaaaaatgagaaagaaaagaagatgaagatggaggaaaccaaacaagaaacaaaaacaaaaattgcgtaataaactttataaatcaagtaatgaaaacaaaacaaaacaaaaaaaaagtaaagaaaacactataacaaatttttgtcttattatgtttaagtccctaatttatatacaaacaaaaataagaatgatttaaataacatatatgtaaactatgcattagtgaaaaagtggaaaactatttatatata

SEQ ID NO: 22109 - DNA, 2011 bp, DROSOPHILA
gaaaagttacagattggtggcttcgttaacaaaattttcagttatttgtgtagttgaagacgggaatttgttttgcgtataaaaagttaacactgcgtaactttctgcagaggtctgaaatacaccaatcgcacataccaaacaaaaagtaataaaaaagaaataattgaaaaaccaaatagttaaattggcagagcaaacacaggacgacgactatgaactaaagtcagaaattaatggacatcgtaccgagaatataatccgtgaatagtactatacgataaaacagaaaaagaaaaaaagtcaactaaaaagcaaaaaaccaactcttgcagaacacagttcatgatttatccatactagaagtgcacaaaataaacgccgtatgcaagcgtgatcatccaaggctcattatccgactaagctactggccagcttaaaaaaagtaagccaccatctaacaagagcgaatcgaatcgaatcgacttggacgaccgaccgaccgaccgcacaaagaaggatctatctggaaagccggctagccgattcccgcatccgattccgaatacgaatacgtatccgtatccgaatccgaatttgaaaccgaatcctcaaccaaatcatcccataaggacgccgctgtcttcaacgatcacaagatgaatgaactagacagtctcaggcaggaagccgagtccctaaagaacgccattcgggatgcccggaaggcggcctgcgacacatcactgttgcaagcggccacctcgctggaacccatcggccgcatacagatgcgcacccgtcgtacattacgcggccatttggcgaaaatctacgccatgcattggggcaacgattcaaggaatctcgtatcagcctcacaggacggcaaactgatcgtttgggactcgcataccacgaacaaagtccatgccattccactgcgatcctcgtgggtgatgacctgtgcgtacgccccatccggtagctatgtggcctgcggtggcctcgacaacatgtgttcaatttacaacctaaagacgcgcgagggcaacgtccgggtgtcccgtgagctgcccggccatggtggctatctatcgtgctgccgcttcctggacgacaatcagatcgtgaccagctccggtgatatgtcgtgcggattgtgggatatcgagacgggactgcaggtaacctcgtttttgggccacaccggcgatgtgatggccctctcactggcgccccaatgcaaaacgttcgtatccggcgcctgcgatgcgtccgccaagctatgggacatccgggagggtgtctgtaaacaaaccttccccggccacgaatccgatatcaatgcggtcacatttttcccgaatggtcaggcattcgccaccggttcggacgacgcaacctgtcgattgttcgatatccgtgccgatcaggagttggccatgtattcgcacgacaacatcatatgcggcatcacatcggtggcattctcgaagagcggacgtctgttattagcgggctacgatgatttcaactgcaatgtatgggacacgatgaaggcagaacggtctggcatactcgctggccacgacaaccgtgtatcctgtttgggtgtcaccgagaacggcatggcggtggcaacaggatcgtgggactccttcttgcgtgtatggaactaaaaataaaacagaaacagaaacagcagcataagcagaaacagaaacaaaacaaaacaaaaaacagagaaaaccaaacaaacaaagaacaacaaaaaaagaggaaaaagaaaaagaacttgaaaatgcattaaagggtggggtggggtgtcaggtcaacggttgcgcagtctgcggatagtgtttcacccatcatctacattgtgatctaatgtatatgattcggtgttaccgtctctgtggtaaatattaaatgagtgccggacgttttgaatatgtgggcgcagctagttgactagaacgtagaccacaacaacaaagaactttatata

SEQ ID NO: 22110 - protein, 340 aa, DROSOPHILA
MNELDSLRQEAESLKNAIRDARKAACDTSLLQAATSLEPIGRIQMRTRRTLRGHLAKIYAMHWGNDSRNLVSASQDGKLIVWDSHTTNKVHAIPLRSSWVMTCAYAPSGSYVACGGLDNMCSIYNLKTREGNVRVSRELPGHGGYLSCCRFLDDNQIVTSSGDMSCGLWDIETGLQVTSFLGHTGDVMALSLAPQCKTFVSGACDASAKLWDIREGVCKQTFPGHESDINAVTFFPNGQAFATGSDDATCRLFDIRADQELAMYSHDNIICGITSVAFSKSGRLLLAGYDDFNCNVWDTMKAERSGILAGHDNRVSCLGVTENGMAVATGSWDSFLRVWN

SEQ ID NO: 22111 - DNA, 3416 bp, DROSOPHILA
tggtataaaatcaaaaagcaaaataatgtatcgttcctaaaaaaaattaaagagaatatgtaagacatgttttgaatctgacatatgtaatggatcgttttttatttatttaggtgcattatctccaattgacaatatcacaatttttaatttattaatgagaaaagaaagaaaacggatatgcgtacctaataagttgaccatcaaagaaattctcaagttggaaggtatgttacagaatacattcagcaggaaaacagaaaaggtattcgctcaaaagtaggcagtgccgtattcaaagctcctcttgaaaataaacagatcgtaaatcctcgaacagatgaaaataaaaattctgttgctagataaaggaagacccgacatatatacaaatgtacattcaagattgttatcggctacacctgaaagtatgcaggggaaatcttatctcctctacccattatcttggcacttgaaaacttgtttaactattttccttctgggctattctgtttcgaaaatccttgtgaaattcaaagtttccgactgattattataaatacgtagaacgttaaatactaggaaataaaaaacgaaaccattgtaagtctgtaaatagcttaactatccggctcaactatgcaaatggatggacggcagatggatttatgggctgtgaagtagattagtttgacgcgagcacgagagcgatctttagacgccacgtcagcaccattcggcatgaattacggcgggcacacttacatcatatataggaacgtgcaccgatttgcgagatgtgggggtgttatctcaccctgtcaagtgtcgcgctccgagatctgcttctatctagtcagctttagatactcacgaatctctgtcgtatgaatcgaaatccacgggcagcagctacgtaattgtctgagccagcttgctttacggctaccataatgtgggatctgttgtcggcgagattgcgtcttccggctgcctataaatggggccttcgactggaccaagtgatccagaacacaagtcgagcatcatcatggtggagcagggcaaggaagacgctaccgaatttcatccggcgccagagtggctagatgaaacctacttggagcgactgctccgggatttgaagaatgatccgggactgaggatcaccgatttggtgatcaagcccgccactgccaagggtgacaattatgctagtgtgatgacacgcgtgcggattttgttcttgaaaagtggcgccaaaagccccgagactgaatactatattgtgaagaccacctatgagaacgatgccttcgcctctggaatattttcccagtaccaggttagcaccacggaaatgcgtatgtacgagaagatcctgccccaattgagctcgctcatcgagaagactcgccagccggaaaaggttttcgccaagacattgcatgtggactacgagcacgaggccatcatctttgaggaccttgcggtgacgaaatatgtcctggccgatcgtctggttggtttcgatctggagcacacccgcttgggactccgaaagctggccaagatgcatgcggccgctgctgttctgaacgaacgtcaacccggattgctgaccaagttcgatcacggcatcttcaatcgccacacccaggcctttgcacccttctttgtgaatacggtgggcgtggcggctgactttgccagggagtgtcccgaattgggtgagcggtatgctaccaaattgaagaagctgcaggaacgtgtaatggagtactccacaagagtttacgatccccaaccgggagattttaatacattggtgcacggtgactactgggtgaacaatgtgatgttgcgctacggcgaaaataaggagccactggacatgactctcatcgacttccaattctgcagttggtcctcgccggcggtggatctgcactacttcttcaacacttcggtgcaggtcgatattcgctacgaacagcaggatgccctgtttcagtattatcacacggtgctcgtggaaacgcttaaggatctcaactttggtggctacattcccacattgaggcagttcgtcctgcagctcgaaaggggcagattctttggtgagtcccatctggaatgattttcaaaaacccattataattgtttatattattgtatctaacagctgtcacagtcgctctggtctgccaggccatattgaccaatgaccaaaacgccgatgccgactttaatgctttgatgaaggatgacgaacgaggccgtaacttccggaaggtattgtacaccaacaagaggttgcaggacaatctcaaacgcgagctgccacgcttcgatcggagtggtctactagacgtaattgactgaatggaagccatcatatactacgagtatttgataaaaaataaaaacaaattttattttgaagttaaaaccatatgaaaagcagttcatttttattgcaagttggtaagcaataagattagaaatagaacacacaatggttctattgtaaatgtttgtattcataaaactatattaaatgtgacgttttaaagcaaacgataagcgggccaacggtgcgtatgagttataagggggacgcaacaattcacttacaagttttttcctcagtagtacaccttgacttgttaaatacattcgtattcgtatttatttgttgtaggtaaatattagtttcttttattagctaaaacatctgcggcttatcttttggcgtatcgcgattgtttctatttcaccacgattcaagggcttgtaattgttatcttctgagatttttagtattgcttgcaccttttgtttgtcaagagtttagcactatcttgccgaaataaactcgaaagcgctattatcagtcatgaacactgtatttcatataaaaaggtcagttattgccgaattacacacataaagtgcaatcaagctattagataagtattttcccaggaaattaaaagcaacgacgtagttgagccaatacgtagtagtacttaaacttttatttattttaactatttacacaagttcaagattatcattacatgtcatccagcaatccaaactgatccagaaaaggcagtgtgacacttaatttcttttttatattttccgattcataaactgagttcttgaatcgcattccactctcggaactggataggacctgctcaatagaagcatcctctttgccctcgtactgcatgacaggctcaaaaatcaaggaacagaatacggctgcggataaattatttaaaaaactattttgaaagagagttaagaactgtacccaccatagaatcctctcgagcggaactgcagttggaagtcgaacaagctgggtatccgaccagcatattttaacttccttagggcct

SEQ ID NO: 22112 - DNA, 1351 bp, DROSOPHILA
atggggccttcgactggaccaagtgatccagaacacaagtcgagcatcatcatggtggagcagggcaaggaagacgctaccgaatttcatccggcgccagagtggctagatgaaacctacttggagcgactgctccgggatttgaagaatgatccgggactgaggatcaccgatttggtgatcaagcccgccactgccaagggtgacaattatgctagtgtgatgacacgcgtgcggattttgttcttgaaaagtggcgccaaaagccccgagactgaatactatattgtgaagaccacctatgagaacgatgccttcgcctctggaatattttcccagtaccaggttagcaccacggaaatgcgtatgtacgagaagatcctgccccaattgagctcgctcatcgagaagactcgccagccggaaaaggttttcgccaagacattgcatgtggactacgagcacgaggccatcatctttgaggaccttgcggtgacgaaatatgtcctggccgatcgtctggttggtttcgatctggagcacacccgcttgggactccgaaagctggccaagatgcatgcggccgctgctgttctgaacgaacgtcaacccggattgctgaccaagttcgatcacggcatcttcaatcgccacacccaggcctttgcacccttctttgtgaatacggtgggcgtggcggctgactttgccagggagtgtcccgaattgggtgagcggtatgctaccaaattgaagaagctgcaggaacgtgtaatggagtactccacaagagtttacgatccccaaccgggagattttaatacattggtgcacggtgactactgggtgaacaatgtgatgttgcgctacggcgaaaataaggagccactggacatgactctcatcgacttccaattctgcagttggtcctcgccggcggtggatctgcactacttcttcaacacttcggtgcaggtcgatattcgctacgaacagcaggatgccctgtttcagtattatcacacggtgctcgtggaaacgcttaaggatctcaactttggtggctacattcccacattgaggcagttcgtcctgcagctcgaaaggggcagattctttgctgtcacagtcgctctggtctgccaggccatattgaccaatgaccaaaacgccgatgccgactttaatgctttgatgaaggatgacgaacgaggccgtaacttccggaaggtattgtacaccaacaagaggttgcaggacaatctcaaacgcgagctgccacgcttcgatcggagtggtctactagacgtaattgactgaatggaagccatcatatactacgagtatttga

SEQ ID NO: 22113 - protein, 439 aa, DROSOPHILA
MGPSTGPSDPEHKSSIIMVEQGKEDATEFHPAPEWLDETYLERLLRDLKNDPGLRITDLVIKPATAKGDNYASVMTRVRILFLKSGAKSPETEYYIVKTTYENDAFASGIFSQYQVSTTEMRMYEKILPQLSSLIEKTRQPEKVFAKTLHVDYEHEAIIFEDLAVTKYVLADRLVGFDLEHTRLGLRKLAKMHAAAAVLNERQPGLLTKFDHGIFNRHTQAFAPFFVNTVGVAADFARECPELGERYATKLKKLQERVMEYSTRVYDPQPGDFNTLVHGDYWVNNVMLRYGENKEPLDMTLIDFQFCSWSSPAVDLHYFFNTSVQVDIRYEQQDALFQYYHTVLVETLKDLNFGGYIPTLRQFVLQLERGRFFAVTVALVCQAILTNDQNADADFNALMKDDERGRNFRKVLYTNKRLQDNLKRELPRFDRSGLLDVID

SEQ ID NO: 22114 - DNA, 7751 bp, DROSOPHILA
aatatgatctttagatcatccggctgaagtcccaattgtggtgccaccagttcctttacgtttttaatatcccactggggctccagattaacggtcagcgttttgcccgtgttcgtttttacataaatactcagcgtgtgcgtaagggttttccctccaaattgcaacagctccagcattttgcgtacaaaagtggcaataaatttaaaaataaaactcatttgttatcagctgatcgggtttaattttagtgcagtgtatatgcttcagtgttgccaatcgttgtttacttacgcgttgccaaacaccagctggcagccattcggaggaaaacgtggacacgcagaaagcgcacaattgaaaacaatttttgtgaagaagtcggaggagtataaatgtaaaagttttatggaaatgtcaggactaacttacagagagatcaatggcgacctattcaaatgccaaagggattattccatgtgccactgcgtggctgccgatttgcgaatgggcagaggcatagctgtaaagtttcggtaggtaatggcttagtgtttttaataaaatggtaaatttgcctattttccagaaacaaatttggacagttgttgaatttgcagagacaaaatgttcagccaggcggcgtggctgtccttcaggaccagcagcgatttatttactatctgatcaccaagaaatccagctggggaaagcccacctacgaacttctccagagttccttgatcgccatgcgaaaacacatggtatgtttatgtatcttctataagaagttatgatatacgaatctttctaccatttgcagatctcccaccaagtacccaagctagccatgccccgcattggatgcggtttggatggcctaaactggcccaaagttaaggaaataatttgccaggtttttcaagcggattctgttgagctggtcgtttataattatgttgctatgaagtaaatggctcatattaaactaaacgatccattattttccctgtggaggcacaaaattgtagacaacaatctccagcggctcttggccaaaaacgtactcgaggactccgctgactttttcccattccaagccatcaattccgcagccaatttttgggatggccagcttattcacgttgtttttgcgctaatgtaggaataataaaatgtagctcttattaatataacttgtctaagctttatatatataataaataaaagcagggatacattccattcataaaagatatgtatcaggcatgtatttaccatatgctcacgcatctgctccaaagatgcttgtacagattcgtaggtgggctttccccagctctgaggcttggttactaggtagtaaatgtaccgctggtcatccttcagcaccgcaatatctccactgcccgcttgttgggcttgcagctcgtccaaccttccgaataccttcttgaactgcacggcaattccagcacccatcgcaagatctgcgcccacacagtgcgccaaggaataggtcttgggggcggaaaacagatccccatccacttcgcttagggtgtactgaggtttggatgacattccgactacaaaagctcgccgaaatgcgctacgtagttctagaagtttgggagaatacatttagtttaaataagggttttagatctgtctgacttagtgtaacaggcagctactagattaatttttggtcatacgataacactagataatggttcgtaagggtatatatatgtatttatcaaaactccaatctttggttaatatcctctcgaggacgtgttttatttattaatacattaaatacagtataaataaccaaatatggaaactttgtgtgctataaaaacctcttaggtgtatcgttcttatcaactatataagtatttggtgcatatgatgccacaagtcccaagcaaaaccatttcgagtgtcaaacaaagatggctatatacattaaaagggagtcttttcgcgatgaagcgaatttcttgatccactaacggacctcgatggcaaatggatggtcttcatgtgccggcaggtgggacaaaccacgttcaacgtgtccttaaccatttgtggcggtgtgtagaagaatgcaattatgtccacgctatcctcggcgaaaaccagatccagcagactccgcacgcgcaaccaatccaaacggtcgatgccgcatccaagtctgggaatggccaacttggtcactccgtgctccctctgaaagagagaatatagcaagcatatttagtatccagtatcttgctctaatacagtttggtgaacctgatcctaactataatgtttcacctttctctttattttagtaatgcagttttggtctgtaagcccttaaaaatacaattccttaccatatgttcccgcatggccagcaatgcgtagtagagagctgcgtaagtgcacttttcgtggctgcgctccttggtcaccaggttgtagatatgtctaccatcctgctccagaactgccacatttccggtatgcttgtgttggcgcttcagctcatccacttgtccgaatttgcagcggaactgcagatttatgcccgcacacatagcgaagtccgcactgacagagtgcactaaggcgtagttttccggggcgctgaacaggttccccctggcctccgtaatctgacacttgggagcagccagctgtggattatctgagtattaacccactgttctttgttaataagccatgttggatggctcacctccttggacatgtcttcgtgctcacagatgagtatctcgatgggatactcgctctgggagaaggtctgctgcaccagacgcttcacgtgcttccattcaagtccatcgttgccgcagcagattcggggcatagccactttggtgatctcatggttgcgctgcagagacactacagtgagaattgcccaatgcactattttcaaaacctcggacttgatgacaatttggttctgagggcttcacataatttgacggacaggcggacgaggcccgattgattcggctagtcattctgatcaacaatatatgtacgtattgcttatagggtcagaaacataacattgggtataaaaagaagctgactttactttctcttcgctcaattatcattcaacccaatgataatattttataaagaaaaatcgacgctaagatgggaagatccatttgtccgattgctactgtgtcccaaagtccacataaattaactgcatgcccatttcatgaaatcgttttttgactaaacatgagacacaagcgaaattcttttggatgacaaaaggggcgaactgtttttagatactcactgtatcgcaatgtacaaatgaattaactgtaaattgacgagggcagcaccaaagaaaccagtttcccaagcgtcgaattgtgtttactctttggggaaatgtcacttgtttgccgggaaacccccactccaccaccaagacgacggctaaaaagcactcaccatatgctcccgcatgcagatcaaagctgcctggacatcgccgtaagtgctggcctcgtagagactcgacttggtcaccagatagtatatgaatcgggcattgtgctccagaacggcacagttgcctctggaaacacttctttgccgtagttcatccacatccccgtagatcagggcaaactgccaggcgagagttccccgttccgccgtaaaggatgactctacggcatgggccaaggaatgtgtctgcggtgcgtggaatatgtccagcttggactccactatcttcacgttcgccatggcgcactagctctctacagagtattatatatccaactgcaattaagctgaaattattctgattaccagccgaaacagaagctctcaatgccaaaaatgattttcgtacttacgtgcacgcagcgctggaaactttcacgtcgaggtcaaaactcgcgataaaaactttttcgacttcggaatggttttgactgtgtgtttttgggttctgcacagaaacctgcacaaaaccagaatgaaaacaaagctattaacggattctgaacagcaagcggctagttggtagcttgtttattttggcgattcgccgatttcccactcccaatttacaatgccgtttggaggttactatttaatcgactgcctcggccggcggtctgcagcggaatgcgccatcggagctcgatgtggatgtgggcatgggtatggtggtatgggttatgggttatgggtgaagcgacgtgccgggcgaaagcccagcgagaatcttcgagcctcagtgacaacatttcgcccagaggcgccgccgcggggctccaaatgttaatgattgcactgtaaaaaacacatcgttttccacttaatactatacgacttgagttattattttattttatatatgattattaatctattgtgtttatcgtggtgttagaaaattcattttgtcatttgtttgcggagtaaattgccaagcacagatggatttgggttttcaaaatggatcatgttttcagacctagaaagttaaagcgggcgaaagttactgaactcgttttgaatctttttttgaaattttatttttaaatcacaagtatgctgtttttaagctaaattaaaaaaaaaatgcactaatcatatataaccatttctagttttttgaaagatgtacttcctaatttttaaaagttacctgatcaagtactgagaataccgaaaatgtactgaaattgcatattggtcatttttttttttaatttaactgaactttttgggagaaaaatccaccagcaggcatgacaatccactgaatcataacgacgatagtgatgatgattggtggcgatgatgatgacatacatgtgctagcaagtgtgagttgataccgcgtagtttgtttgtttgtttgttttcagcgacaagttgacttggcattgcccgaaatcgtcaaagccgctgtaacagccaattaagaacttgtgcaggcttttgatagcgttttatagattaataacgacggatcgttccgatcgaagcacctgtatgtgaatgtgtacctgtgcgtgggccgctgtcaaaggtaatcggcgctcaagcgctaaatagggattgtataccgactaaagtgcatgtataaatatacatatgacttaaattattcgttaattaaatggcaggtgaaataaaatataccaacacaaacaacgaacaaataaccatataaagtgacaacttgtattctaaaacaaacaaaacaggcagcagagcggcagcagcttttcgatttagtatgaggtaaaaacttaagatttttgtcgattgtagactcggatgacgaaaaaatattttatttactagttaatataggaaaaacttagtagaaaatagaaatgctaaaagaattcagtgatatccatttttaactatcaattgatcatgtattataaataaaacgagaatgttgcttcacatttgcttttcaaaacaaacgtcgaagaaaaagcatcacttgcaactcattttataaatttttatataaactgacaatttttttggtttttaattaaaaatatgtttgtgtcgtagactataaaaacaaatttatgatttatattgccctatgactatatcatagagtatattctttttatgctacacaaacggatattccaattggaatgactagacgcccaattgcgtgggtggttgtctcggctaatgtcttctacttcatcctagaccgccaccatttattttcagcttttcgccaaaaaatagcatcaaaaacaaaccaattgcttatgcttttccttaaatatcctaacaatagcactgatttttaaagtagttaaatgaatatttttgtaaatcataacactttgcctccatatagctttacacatttacgcatgtcaagccgcagctttgaacgaattgttgcattgaaatttagacttcgcttttcctctcgatggggcaccttgtgaggaaaagcgatagctgcgaacgatgccgccagttcacggcagttcagcttgtcgcctcgaacaataaagacgaccgatccgggagccataatatatatataatatagctttatagcacggcactgtttggattttggcgtgccaattggcgctagttgctgccgttgctgttgttgttgttgctttgtttgttgtgctaattacgtaaattgcgtgtttatttgtttgttaatttaaatactttacgtagtagtgaatttgttagttgacgacccgccaggttcgttttttttctgggcaattaatctgcgcgcgagtaaatctcccggagaaaacaagagaagcgttgtgagtcacttgagaattagagaataactaaaaagtgcaagcgaaaaaagcaaagctcacactcgtcacgccagctcagctgattctgattgggattcttactactctctctctctctctctgtctctcttcattacgatacgtaatatacgtatacgtatttgtatacccctctctctcacacactcttctattctgttttggttacctttttgtgggttacgttaccttatttgccgatatgactgctttgacattgctacgacgatcagttacggcggtcagctacgacggttacgcccacgtttgcgttacgaattggcggtttctgccccagcttcaaaggtgccaattgcatttgcacgttagtgggcgacatgctgctgtacttttgtccagcaaaacaacagcaacaacagcaacatcagctgttgcagctgcgcaggcgccaaatgcgtatgctaatgttggcggtaagttcataagcttaatttatgcaaacagcgcgtgcactcggtgatttatgatgctgcagcagattcatgcatcgaaatcgttaaataaaaaccgaatgagagatatgcgcgcctaacgaaaagggagatataacgataccttagattcaaactttcaagagatcttaggcaaaaaaatgtaccggttacaaccgattcgattcaataaactacatcactgatatcatcacctctcataattgtaactcgatgaatggtttaatttagaaataaacaaaaaaaattaaaaatctgttgtaagtgaaaatctaaagtcttccatcaatcgtaaacaatatatataaataataataaatatgtaactaactaaatatgtaactaactagttgctggcattattaagccacagaaaaataaaggtcaaaggtctatcttccgagaataagtttataagtttactccatatcaactactgaagttattcgtaaatacgtttgaatttaagcgcataccaactgcagtattatatttttgtttgcttttttttgttcagtttctcttattacatattttatctggtattcgcaaacatcacaatcctttatcctttgttaacccagcaaagccccaaaaataatatttatgttctggcagacaagtgggtattttattatgaaatgggggactgtcctttaatgtacgataaaaatataaataaaaacgaaatgggactgggattggaggcgtgttcgtctccgcctgccttgcatttattactaatcacaatttaatagccccattgaaagctcattaagcactcactcttcctttttattgcagaaagtgaaacagaatttaataaccggttccacttcaattgccattttatcaacataacacccgctcc

SEQ ID NO: 22115 - DNA, 1830 bp, DROSOPHILA
cagcatgtcgcccactaacgtgcaaatgcaattggcacctttgaagctggggcagaaaccgccaattcgtaacgcaaacgtgggcgtaaccgtcgtagctgaccgccgtaactgatcgtcgtagcaatgtcaaagcagtcatatcggcaaataaggtttctgtgcagaacccaaaaacacacagtcaaaaccattccgaagtcgaaaaagtttttatcgcgagttttgacctcgacgtgaaagtttccagcgctgcgtgcacgtaagtacgaaaatcatttttggcattgagagcttctgtttcggctggtaatcagaataatttcagcttaattgcagttggatatataatactctgtagagagctagtgcgccatggcgaacgtgaagatagtggagtccaagctggacatattccacgcaccgcagacacattccttggcccatgccgtagagtcatcctttacggcggaacggggaactctcgcctggcagtttgccctgatctacggggatgtggatgaactacggcaaagaagtgtttccagaggcaactgtgccgttctggagcacaatgcccgattcatatactatctggtgaccaagtcgagtctctacgaggccagcacttacggcgatgtccaggcagctttgatctgcatgcgggagcatatgcgcaaccatgagatcaccaaagtggctatgccccgaatctgctgcggcaacgatggacttgaatggaagcacgtgaagcgtctggtgcagcagaccttctcccagagcgagtatcccatcgagatactcatctgtgagcacgaagacatgtccaaggagtgtcagattacggaggccagggggaacctgttcagcgccccggaaaactacgccttagtgcactctgtcagtgcggacttcgctatgtgtgcgggcataaatctgcagttccgctgcaaattcggacaagtggatgagctgaagcgccaacacaagcataccggaaatgtggcagttctggagcaggatggtagacatatctacaacctggtgaccaaggagcgcagccacgaaaagtgcacttacgcagctctctactacgcattgctggccatgcgggaacatatgagggagcacggagtgaccaagttggccattcccagacttggatgcggcatcgaccgtttggattggttgcgcgtgcggagtctgctggatctggttttcgccgaggatagcgtggacataattgcattcttctacacaccgccacaaatggttaaggacacgttgaacgtggtttgtcccacctgccggcacatgaagaccatccatttgccatcgagcgcatttcggcgagcttttgtagtcggaatgtcatccaaacctcagtacaccctaagcgaagtggatggggatctgttttccgcccccaagacctattccttggcgcactgtgtgggcgcagatcttgcgatgggtgctggaattgccgtgcagttcaagaaggtattcggaaggttggacgagctgcaagcccaacaagcgggcagtggagatattgcggtgctgaaggatgaccagcggtacatttactacctagtaaccaagcctcagagctggggaaagcccacctacgaatctgtacaagcatctttggagcagatgcgtgagcatatgcgcaaaaacaacgtgaataagctggccatcccaaaaattggctgcggaattgatggcttggaatgggaaaaagtcagcggagtcctcgagtacgtttttggccaagagccgctggagattgttgtctacaattttgtgcctccacagggaaaataa

SEQ ID NO: 22116 - protein, 484 aa, DROSOPHILA
MANVKIVESKLDIFHAPQTHSLAHAVESSFTAERGTLAWQFALIYGDVDELRQRSVSRGNCAVLEHNARFIYYLVTKSSLYEASTYGDVQAALICMREHMRNHEITKVAMPRICCGNDGLEWKHVKRLVQQTFSQSEYPIEILICEHEDMSKECQITEARGNLFSAPENYALVHSVSADFAMCAGINLQFRCKFGQVDELKRQHKHTGNVAVLEQDGRHIYNLVTKERSHEKCTYAALYYALLAMREHMREHGVTKLAIPRLGCGIDRLDWLRVRSLLDLVFAEDSVDIIAFFYTPPQMVKDTLNVVCPTCRHMKTIHLPSSAFRRAFVVGMSSKPQYTLSEVDGDLFSAPKTYSLAHCVGADLAMGAGIAVQFKKVFGRLDELQAQQAGSGDIAVLKDDQRYIYYLVTKPQSWGKPTYESVQASLEQMREHMRKNNVNKLAIPKIGCGIDGLEWEKVSGVLEYVFGQEPLEIVVYNFVPPQGK

SEQ ID NO: 22117 - DNA, 3304 bp, DROSOPHILA
gtttatagcttccttaagaaaattcgcttaagtaagtcgataatttaaagcataagagctttaaacaaaaatgtattttttcaaaaatttatttcaaaccatgctttttaaaactgtagcacttttctttatctggcgtagtacacgtctgtaaaaataagacaatttggttcgttcggctgaataaatagttactaaggaagtctggacacacatatatgtagtaagaggaattattagttgaatccacaatgtaagacgtaagctctgcgataaatatcatctcaagtggaacgtgtggaaatgacccattaaaatgtcttacataagtcaatgaatgatgtcgattgctaaattatgatgatgaatgggcttacgcgtgataagtcgagagcaaaaattaaaacggaataaaaagatgagccctaatctcttgagtttctttgccccaagcctcaagtgaagtgggaactttcctgggatttggagtatcttaacgatgcgaacgctgggcgtctgttccccgtacataaatcctcagatactatatcttcaccaggcgcagtgttgagcaatggcacgattcttggcacacgatacacatatttgagacctgttgccaaacggaggtaatccccaaagcaaacatcgcaggcttgtttgcccataaaagcccagagcgtcaaccaaagtcagaagaaatggatgcagataggagcagagtcaaatacactttgagaaaaagaaagcttacacttaatcatagtaattgagcacaaactaataactttcaaaagataagtgtgtgcaaaagacatgtttattatttgaaatgtatcactttgaaacacacatttctccaagtgcagcacaagatctcacacatgggctaagataagtgcactgtgacaagtgtgcgtcatttgggggtactatataagcagtcagtctaaggtcgctcatcacggttcagtcgaaaaaattgaagcaactaaacaagatggcagcggcacccgagtggcttacccacgaatacatcgagcatgcacttcgctgccactacaaggatgaaggactaaccataactcagctgcagataaatcccgccctggggcctggtgaaaactacggcggagttctgacccgtgctcgagtggagttcacactgtctaacaaggagaaaaatgtgcagaacctgattgtaaagacggaaatcgatgatgatgagttgacccaggaactgatggccccatatgatatttacaaccgcgagatgaccatctaccaggaagtgctgcccaaatgcagggagctgcttaatgagatcggagatactgaaaggatatttcccacggccatctatgtggatcgcgagcgtatggccattatcttcgaagatctttctgtggtgggctacgtaatggccgatcgagtgcgtcgcctcaacgaggagcacactcacctcatcctgcgcaagttggccaaattccatgccgccacagcggtcttgaacgagcgacaaagtggatgcctcgaaagttacgatcgtggtttctttaatcgctatacaaacgcctacagtggctactttgtgggtggtctgctggccgccgctcgctggatgagcaaggtgcccacgttggcccactacggagagaagctattcgctttggctccgcactacatggacatcggcagggagtgctttgcacccactccgggtcaagttaatgttctggcccatggcgatgtgtggaccaacaatgtgatgttcaagtacgatccgaatacgggacgacccgtcgatgtgctgctcattgacttccagtactccttctggggctccccatgcatcgatctccatcacctgttcaatacttctctaaaggagccactgcgtagagatcagcagaacgggctcttccagttctaccacaagatattcactgagacgttagaaaagctcaactatcgtcaaaatcagattcccagtttgcatcagtttaaattggaggtggagcaaaagagattctttggtaggtggtatatttaatcacaaaatgtaatttctttttaaataattgtatattctttatagctttgcattctacggtagtggtgcagccagttatgattagccaggatcccacggatgcctgtttcaatgccttgatgaacgatgatgagcgtggcattcggtttaagaaccgattatataacaaccctacagttcaacaaaatttacattccctggttcccttcttcgatagaaagggactgctggaagttaaccagacctgttaagagattattaggatatgttttattgggcttccacgttttatgtctataagtttaaataataataaacaatctcattttaaattaaatgtttatctctgttatgggatatttgactttccaaaattcaagggactagtgcaatacggttgggacatttttgatctgagacataaaatggccaacatgtcgtataagctatttttaaaacattgagataagaataacacttgtgttctcataagtgggtcataataatttttggtataaaatcaaaaagcaaaataatgtatcgttcctaaaaaaaattaaagagaatatgtaagacatgttttgaatctgacatatgtaatggatcgttttttatttatttaggtgcattatctccaattgacaatatcacaatttttaatttattaatgagaaaagaaagaaaacggatatgcgtacctaataagttgaccatcaaagaaattctcaagttggaaggtatgttacagaatacattcagcaggaaaacagaaaaggtattcgctcaaaagtaggcagtgccgtattcaaagctcctcttgaaaataaacagatcgtaaatcctcgaacagatgaaaataaaaattctgttgctagataaaggaagacccgacatatatacaaatgtacattcaagattgttatcggctacacctgaaagtatgcaggggaaatcttatctcctctacccattatcttggcacttgaaaacttgtttaactattttccttctgggctattctgtttcgaaaatccttgtgaaattcaaagtttccgactgattattataaatacgtagaacgttaaatactaggaaataaaaaacgaaaccattgtaagtctgtaaatagcttaactatccggctcaactatgcaaatggatggacggcagatggatttatgggctgtgaagtagattagtttgacgcgagcacgagagcgatctttagacgccacgtcagcaccattcggc

SEQ ID NO: 22118 - DNA, 1242 bp, DROSOPHILA
atggcagcggcacccgagtggcttacccacgaatacatcgagcatgcacttcgctgccactacaaggatgaaggactaaccataactcagctgcagataaatcccgccctggggcctggtgaaaactacggcggagttctgacccgtgctcgagtggagttcacactgtctaacaaggagaaaaatgtgcagaacctgattgtaaagacggaaatcgatgatgatgagttgacccaggaactgatggccccatatgatatttacaaccgcgagatgaccatctaccaggaagtgctgcccaaatgcagggagctgcttaatgagatcggagatactgaaaggatatttcccacggccatctatgtggatcgcgagcgtatggccattatcttcgaagatctttctgtggtgggctacgtaatggccgatcgagtgcgtcgcctcaacgaggagcacactcacctcatcctgcgcaagttggccaaattccatgccgccacagcggtcttgaacgagcgacaaagtggatgcctcgaaagttacgatcgtggtttctttaatcgctatacaaacgcctacagtggctactttgtgggtggtctgctggccgccgctcgctggatgagcaaggtgcccacgttggcccactacggagagaagctattcgctttggctccgcactacatggacatcggcagggagtgctttgcacccactccgggtcaagttaatgttctggcccatggcgatgtgtggaccaacaatgtgatgttcaagtacgatccgaatacgggacgacccgtcgatgtgctgctcattgacttccagtactccttctggggctccccatgcatcgatctccatcacctgttcaatacttctctaaaggagccactgcgtagagatcagcagaacgggctcttccagttctaccacaagatattcactgagacgttagaaaagctcaactatcgtcaaaatcagattcccagtttgcatcagtttaaattggaggtggagcaaaagagattctttgctttgcattctacggtagtggtgcagccagttatgattagccaggatcccacggatgcctgtttcaatgccttgatgaacgatgatgagcgtggcattcggtttaagaaccgattatataacaaccctacagttcaacaaaatttacattccctggttcccttcttcgatagaaagggactgctggaagttaaccagacctgttaa

SEQ ID NO: 22119 - protein, 413 aa, DROSOPHILA
MAAAPEWLTHEYIEHALRCHYKDEGLTITQLQINPALGPGENYGGVLTRARVEFTLSNKEKNVQNLIVKTEIDDDELTQELMAPYDIYNREMTIYQEVLPKCRELLNEIGDTERIFPTAIYVDRERMAIIFEDLSVVGYVMADRVRRLNEEHTHLILRKLAKFHAATAVLNERQSGCLESYDRGFFNRYTNAYSGYFVGGLLAAARWMSKVPTLAHYGEKLFALAPHYMDIGRECFAPTPGQVNVLAHGDVWTNNVMFKYDPNTGRPVDVLLIDFQYSFWGSPCIDLHHLFNTSLKEPLRRDQQNGLFQFYHKIFTETLEKLNYRQNQIPSLHQFKLEVEQKRFFALHSTVVVQPVMISQDPTDACFNALMNDDERGIRFKNRLYNNPTVQQNLHSLVPFFDRKGLLEVNQTC

SEQ ID NO: 22120 - DNA, 61890 bp, DROSOPHILA
cacaaaagacccagcagagagtaggtgtcgtgccagccatcgagctgaacgaaaaacgaagcaaagtcagctaaagatctcgattcatggatggctggcagcatataaacacgaaaataaattcattaaaacatttatcaagttcgacacttggctgtcatatatcatgttacatttttgagcccgaaacatgtttaatccgcagcaacatcgaaaaatgtaactgcaattggaggggggggcatgcatatcacttgattcagcccacgaagttcatttgttctgtacacggacagaaatgcatcgtttttaaatatggtgatcaaatgagaatatatttcgaattttacgttatcttgatttttattcttcttcaatgtttaatttgcaataatttatgttgaatattcaggttaaattttgaattgttccatcttgtggcgaatttttctgtttgtttctgctgttcaatttgtgttatatgcgtcatgttgtctgccgctttgttgcttttggctgtgatacttatcgagcggtacagtgggtactcagttcatgaaaacgtgtaaaattactgttacattccaaagaagtaatagttcgttgaaaagagagtgtaaatttagcgaacaaattattgaatacgcatgaaaattatatttgatatatgtttatttccgttatgggctgtcttcactgtaccgcgcggctgcacgggatgagtttcaagtgttcaagagtggcctacacatgctccaaaaacaagttacaaccggtaccccgataccttaacaccttcaaactcactcttaacgccttcgattttttagtttcagacacatatagatatagatgcatatactgtatctgtatttgaaacagagcgagccggtattgatgcgctcacaatttgcatgcataattcaaattgaaaattaaattcaaataaatgtattttaaatgcgtgttttgccgctgttcgccgccttgatttttttttttattgatgcatccatcaaacaaattggtatgcaaaagcgcgtgaaaaatcaactagcagatagtcaataaacatgtgcataattatcggccaaaactgtttgcataaattcttgagaggcgtttttctgctcgcacatgaaatgcaggaaaaccagaaatgataccaattgaaactcgaaacctgaatttaaatacccttgcagctgaagtccacaaatatttgttataaattggaagaaaatattgcaatttttcaatcgcaatgcttttgcgtaagttgtgtaaatatatcccaaagaaacagacagatggataaaacacaaaaatattctttgctagagtaaaataaataagtgcacatgaaaactgctggactacgaaacaaaatggtaaatatttaaatagaaatttggtacatatggaaaattgaatcaatttttcgattggatggcagagcgaagcattgtgaggggtattcaaaatataaaagttaaaaaatatttaattaaaaccctttgaaaattatgacattgaaatctcagacaatgatgcctaatttttgatactaattattaatgacatcgaagcagatgcacaatgattactaatttttgtcttcggttttccatcataaaagatttgagttgcttggcagtgattagtttgaaaataaaatcattcgattcaattttaaggtttcctaagtttttattgatttgaaaattaaatgaatgcctattgaaaagttgtgttacctttataaattgatgtaaaaatgtatagtcagtagaaactgagaacggctgagaacttgttttgctcttttgtaagtttcatctgattaaaaaaaaaacaaaagtgtaatttgatgtatagaatatgatttaaataaatttcacttggcgatcatattttggccgagttcccccagtattgagaagtgtgtggcagatggtcgagagtcgtgttgatggttcatgactgcacttatgtgtcgacgcggcctgtttgtccatcatcaccccatccggttgcattgcccgttcatttgccacccaaaattcagtttgtttgcttgtctagaatcgcgacacgcgatgttaccgctctttttcgcacttattttcaatttataactgttttttatgaccggcacataaccgttaaggacacgcggccacgcccacatgcccatacgccaactggcccacccattggcacgtaactgtaattagcatttggtgtttcataaaaagggcggggttaatacgatgtacgttgtgttttcgcttgttttccgattgttggatggcttgtttgtttgctgatgttatgtaaaagcgctttatagactagagaccgccccggatggagattatctgggtaggaattgagattatatagacgggctatggggcttgagggccacttccggttgggaaatcgccgtggctgattaatttatagcatgatgccgaagaaggtcagaaacttgagtaaactgtacaatttatacaaaaaccgatacctagccaagtgtgtgaaattgaaatccgctctgacatattccgtttccggttcgattcaactgcatttgcgtgcccgccgctggaaccgcttcatgcgaagcgaccactcgtccttccattcaaggaccaccgagctcggtccgatggccaagtaaccaggcgccgcctccgagtcacgtccaaggatgagatatgatctgaaagggtgggaagttcaaaaaaaaaaatagggcgtgttagatgcttcccgagcacagtgcgattcatatgcaatccttaaggctaagtacttatgccaaaacagcatctattgaattaaaaagctgttattgggtgccaaaatgttataaggaggtctttattattattatttatgttgctagccactcataacatacttattaacaccgtaaacaaaacattagtgatatacatgatggaattatactcacttgtttagctttatctttggacactggcactcgatgctcttgcgcggcaccagcagcatcatattgcccctaccgagcaaggaactcgtagtgcccgacatgggattccgcttgaagatcgtctggatattgatctcgtacttgtagatctcgttctgtcgctctatcgagaacttttccgtgctgatgtcctgggaggcgcgatcgtggccaatcaccttggccaaaattgctaaaagtaaaattcgacagacaaaagaagccaaaacagttatagatagctttcaaatataacttattgtttaatataaaactcaccataatcttccatgcaaaacttgttgagattgagcttcttgggactcgccttgcacttgccgcagtctgtggataagtaattcatatatgtatgtccgcggaaccattggcattttctctcagtgtacttacactttttcatctcctcgacctgggagccaccgccatccttgtaatcaccagtgccacctcctccaccgccgccagcactctcggcctgaatcatgttcgcattagtgggcacctctgttaattttaatgagaaaagcgggggattagaaaccatggattcgagggactcaaggcgatctcgatttcttggaactcactgatgcagggtgccacgtgggagcgggtctgctgatagcctcgggcacatcggttgcaagttagtccggtgacgccctccttgcagggacactggccactcaggtgattgcacgtcttgcccgtcgagcccactggatggcaatcgcaacctgtaaagagggaggtatgtcatcctcattagagcacatccccaaccatccaaccatccaaccatccacccaaccatccatccatccatgcatctatctatccagccatccaactatctattctgcacagctgtctgtctttctatctgtctggcagacagcttatgggaccactgattgatgacagcttattatcaataaagcggggaactggggaaaataccctgacaggtcggacatttagtgacaggagcagaaatgtaacatacccactaccggggataataatgtattacaagtacctgtgtactagtcaagctaattaaattcgcaatgggtgaacttcaactgtttgaggaacgttgaatgtaactaacttcaatggatgctagaaacttcgtttctttttttagaatttcttccagacaatttcaactcgaaatggatataccccagaataccatatgaatatatggtcgcttgtaactggtcattgcgttgtctctcattcaatcagcagaagactgaagaaaagagaaagctgaactcacgcttgcagactttgcgatgatttggcggcttagtggcatcccgataatatccctcgcggcaatagtggcagtatcttccggtagtatcgtgctggcagttgtagcatacacctcccgaaacccgtccagatagtttgtacagctccagattgaagcggcagcgacgggcgtgtccgttgcactggcacactggaaaatagagacgaaggaaaatatttacattaaaaatttgaattattgggaaaatataaaaaaataaggagccacaaccttatatgccaaataaattgcaaatctacacaaatatatacagagagaagattctaagcaagcaatgcaccgaatcaacattattgacatcaacaaggtcgtaaaccagccacgttgaactttattgatatgtctaatttgtttataactcttaaacagaaatatatgctttcatcaaaagctagtttcccaccacatcatcctttccattttcaatctgaaactaaacgccaccacgaaatagttacaacaaatggccaccgcaagcagtttggtccatcggttgcacatagtttcaccaaattaccgtcatgacctaacgagcttaacccgctcctattttgttattatcaaggataacaccatcgggtgtaccgagagagctaatcatttaatggcagtacggtctgccgttgtcctcgttttttccttttgctggacgataggcggtggatgggatggcatgggatgggatgggatgggatggtatccggtccggatccgtagatttcataaataattaataatgatgggaaactgttacgtgctctatttttcggacaggtgcgggggcagctaagttgcttccccttattcccctgtcttggttatgattgattatggttgttgttgtgggcgctgctgttgtagttcccttgattgatgaaaaaaaaaaaaaatgtgggaagaaagggtgggagctcttgtgggttgtgctcgggtctgacttccttttgtatcttcatttttaatgctcttacttgccgctgctccttatcgattttccagactgaccaaccgcccacttggcgcaacgtaaatgttcatttaattagtcggaaaatatcataaaataattttagcaactaattggcagcacttgacttcaatttatagtgttcctgtgtccaggacctctgacgttgctcctccgcgttccgtggagtttctttcgattacattccacccacttcctgcatttttgggcaaagggcattaagggtgatttatacagaaacgcagaaacgcacacgtgtcctctttgagcacatcatacagctgaggttaatattttagctgtggggtgataagttttaacaaggatataactgcataaaattacgagaagttacaagttgaatgagctgtttttgattttaaagttgcagaaagtaataggtctttatgctcctccacaataaacttttgtactttgcgaggcatcagagatattctctactattttcctgacctcatctgttattatataaatgtatgtactgggattgtccgccaatgcccacgcatgagcgcctttcggcatgggagatcgaggatgggatgttggtgattgcctttggtgactggtgcgactattgtgattgctgttgcctcatatttttcatatcttatgtctgcatcatcgacgaaggatgaaggctgacaacataggagatgacttggaggcggcgggcgtggcaggaagacaacgcggatggccatccgcttatttggcaaataataacaacagcagcaacaatggacccatccatagagccaccgccgcccggaatcccgacaggcacatgggaatacttatcgaaggaccatatcccggcagcaggcacacgacatatgcccccatccttaacccaccatattgtcatcgtcgtcggcagtgcacaatttaaaatggattttattttcgctcgtcactcgacttctgcggggtcaaggccatagtatggcttaaaaggggggtttaaacagttaagagttgttattggtgaagaaattgtgttaatactacaaaaattgtaaaatattgttgttggacgacacatataaaaatagttgctggtgaatatgtttatccaagttttgagctattttaagttaagctagagcatttccagttcgttgtactgttcatttcccaatgcctcatcctcgtccagagtttcttttcatcttcgtctcgaattccattgtcactgctcctgcgtcaatatgaatcttattacgagctttatttcttcctcgtttacgcatatcgcttttaatgataataataatgatattgaccgccaactggcgtctacttaataccccaaccaaatggccttcgtgaaagcttcctattgtcgtattgccattgacacgcattgtaattgagttgatattgcggaacgataagccacattcaacgagccgaatcccgcacaaattccacgggaattgagagacacagacagcgcacacataaattacccgggcagacaattagaagaaccgaaccaacgtctaacgaaaatctcaaacaaaaaaaatcaaccaaaaatattcgaagcacccgccgattagccaaagtagcacatcaattttcagtggcctctggttttgggaaaactgtgaaaatcgaaaattgaacaacatttcgttgtgtgtgtgtgtgtgtgtgggatttactcaagcatggccaacgatgcagtcgatcggcttaattggttaacaataaaacgcatttttacgcgaatttacttcacagttcatttgctgcggccccattacgtgttctctgcttttccgctctttccaaccgattttcccgtgaaagaaacttcacttcaattactgggccacgcggccagtgaaatttgcacatcttgaccaagaattctcaacgcttgccgatatattttgatatacgtacgggtcgaggcaaagacccagacccatctttggtcttcgtaacgaaaaatttgcagacggtcgagaaaagaaaagttcataatttagctgcaattttaattaaaagccaaacacttggaggaaaaatgcgacagggaaaacgaacggaaaagtggtaaggcacatgcaaagccaacaaaagtgcgaaaacagcaacgtgcgcacagataaaggaaaataaaggaaaacatgtgaaaatcattttgcacccagtactcccgaggaggggtagctggtcgaaagtatctgctagatggtatatgttattgggcatggggtatggggtatggggtatgatgaggcccggcgccgacagataagccgggaccggactggtccattccccgttcataagtcgacgagtcggagagttatgtgcccgtttgttgtaaaacggcacaaaaattatgggcgaaaaccaaacaggccccaattgtggaggagagtacgcgagagttcggtttgggggcgtgcaggggatttttagccagaccatgccatctataaactggctacaaatgtctaaattttttccccatacgaatggagaaaagtgggaggtactgacagcagagaaaacgaaaaactaatgcacaaaacagtaaaagaaaaatagaactcgacaggaagagaatcgaaaagacagtctgagggggaagtaacacgatatgatatgatcttgagtacttgtactcacattcgagctgcaagaggcgccagactgtatctgtatctgtgtttcttttttttgtatctgccgaagaatggtggaattctccggggaacaatgttgccgaaagtgagcgaatggaaatgagccaagcacgttcccataaatcataaaggaaagaatttacgactatgcatcgcaagggtcagaatttcatagtcggattctgatagtgcagatagggtaaatagtaaattgcagtcataaagcgcataatgaagcataatagtgagaaaaactgttaacgactctataagttttcttcaatttaaaagtaataaactgacactgcgccatcatcatcttcaaagagattgctttacgccataagtttatatactgattttttgaccacaaatattcagacttttgggcaaagctgcgaatttaagggtccgaacatagaatgtcatacctcgttaagctcataattaaattcccaattgaattgggatccaagaaaagaattctaattttttgccattttttgcatattttgatgatggtaccccttacaaaaaatgcgaaaatttggtcaaaaattaattttagaaaatccatttaaaagtggaagaagttgttagaattggtaatcaggagtataaaatggtaattatttttgctgtgtggccatttttagccaagttatacccaaaaaaccaatcttaaatattgcatttttggccgaaactcgtttccctgattttttgagagaaaaatatttagtattttgaccaaaacaacggaaataattacccaaatatggaatgtcatacctcgttgagtttgttttttaaatccaaatcgatttgtattcaaatttgggaattctaaattttttcaattttttgcaaatttttatgatgtcaccccttaaaaaaatgcgaaaatttggccaaaaattattttcacaaaattcgccaaatgctgatattaatggttagtcttgataactgggcgcaaaaaactgtaattcttttagctgtcagaccatttttagccaagttatacaaaaaaaaaaaaaaaaacaacgaaattccatcttgattttccactcaaaacttggtgttattgtacttctcataatttgtattatatttcattttgacagccattgttaatgggtctgtatcagcagattcattgaaataaatttgccgtctcgccaaaatatccaaacgcccatcttcaaacccaagactagcgaataaaccggcgaaaatttgctttgcctgcacaaagagttgtttgctggcattgtccttgatttttttttttctcacaggacttagtacatttttttgtgattttttttccagtagctttgtgtaattttctcgcccgttgacaagaaaatgttgcctgttttcgctttcgtttcgtgggctcgtctcacgttcgtctttggttatattatttttattattatttttacgttcttactgttttatttgcttggcggcgatttgtgtgttttagaatttggtgtgatttgaattttcaatgggatgcccatttccgaacagaagccgaatttggctaaatgtgtatgttgtaaaaataaggggacgacaaaaaaaaaaagcaagcgaagcatgaaggcagcgagacagtctgtttttcgccagctgatttccccacagcttttcccgcttgccaatgatttcaaaaatgctgccacgcataattttatttattttttcaatttttccgccctgttacatcgccctgttgagttgtctacgtgtatctaagcactttgcttgctttttggctaagtctgttatgatatccaccagaatgcgttgacagttttttttttctcttcaccgttttcactcaacaaaattgtgcgaaatttggcttgccaaaatattcgacgcttgaatggcaactgattttttatatttagcccgagagtgcattttccgcactttgtgcttttcctcgctatttcgggtggtctgttttttcttttatgatcgtttcttctaataagatataaaacttgattgttcggtaaaaggcaggcaatcagctaaatgaatttattttcgtacaccgataagataaaattgacttttaagcatagatattttgttattgtaaagaaagtgccaggaagttaaagtaccctttttgtaaaacataaatcaaacttggtttgccacaaccaattaacatccagcttcagctacgaagagtggaaagaaaactcgattttcactcactaatttcctttcgaatgcgcataagtatgcatgaaacgccctcttctactccattgcggaaaagcggaaaagcgatgttcccatcgaatgtgactggcgaaattggcttttgcctgcagaaaattatttatggccaagtgggcggggtggcattaatgctgttgttgcaatcgacacccccacaaaaagctggcaaccgatggttgacaactgcgccgatgatgatgctgccaatgatcatcaacgcgatgacgccaacacgcaatttggcaaacaaattacgccaaaaatgtgcattgggaaacagaaaacagcaaattgccggcccaaaatcggagccaaatcgactagccaccctaccatttccaccattttcggcttcccagaaaaacccattttccaatcccagagcaagcaaaaaaaataaaaaaagtatagaaaacggcatgggcgttgataattgaattgaaaacttttgcctcgcactcatttcgatgggtgggaataagaaaaaatcgcgctaagactccataattcgagagattgtgcaactttaaggtctcagcagcttaagactggtaaaattgtaaatggcaaatggaaaactgaaactgggacgggccagtgccaaaatgaacgagggaaattatttgaacgcagcaaaaactcataataataaaaggtataaatcagatttagccttcttcaactcttggtagggtgcttttggccactctaaagaagctgagatacttgattggccagttttccacagaactcaagctgcgtcgaggtgttagtaaaatggttctttatggtttctgggtaataatagtgaaattcattcgtagacgaaatttgcagctgctcaacttgggcagatggggatatattggaattgattattttttgaaagtttgccgtaaagtgttggtacggaaataatcaaatttttttgtcagcctcttatgtactttcttaaaacatcctgtaacgcgaaaaatgtattgcttaacaaagtttgatatatcaaataagaaaatatatattgttaatatttaaaattaaaaaaaccaaaattttcatagaaaagcccaattttcttcgaacattcggatacgttctattcttttacagggtatgctaagccctttctctttacgatccattactcctgggactcgtacattagccatgtctttctgtccatgtcacttggctttaaccctgcccactttgagaccttagtctttggtatatggttctgctccgggttttggagttcggattcggattcggattcgggcttgggtttcggtttctgttactcgacacaagcatttttataagacataaattcagcgatttggctaaatgcgcttcatggacttggccgggtaatttgtggcctgccagggtcgtcgtttatgtgcatttgtgtatgcaaaggaaaataggaggaggaaaactgcagcagcattaaattacactctcatgcaggcgcacatatccccacatccgcatccacatccatatccacttctccatccacatccacgacatttggacgggcggaggattcagacaaggcgactctgcgactgcgacaagctcatattgctttatgtctatgcccgattcccttgccccgatggttgagcgcttttaatgggacattttgtaagtaaattgcattaatttcacaacttggctgcgaacacaatctactcaaaaagctgaaaaagaaaaaaaacaaaaaaaaagagacaaccaaattgaatagcaatgtgccattgatgatggaacgatttatgagctccatctacgaagcctcgattacgattgtgcgcaaaccggttgcgaattcgatttcgatatcgttgaattccaaatcctacctcatgctcaaatcaaaatgcaattaaaagcagagaatcgatcagttgcagtgggaaaatggcattagctttggatattggtctggcaattgccactagatcaaacgagttagttggcttgtccggttggcagagagaactagccagatattcaactcaagcattcaaattgaaaaggatgctactttggtgctcttttagttttagattgatgaacaacgaaggtgcggttctacacactagccatatatgcatttttattttcacgttttcttgcccaaaaaccactttaataacccaaagacagcccttttaaaacgtaatctctcccaatttgtgtgtggtgagtgaaaggtctcgaaaaccccataagtcgtggagcccttttgccggagattttccacattcaacattttgcacctaattgaagagcttacaacttaaattgccactcgatgaactctgtgttgtggctttcctttttggaaaatcctcctctttcctactgctgatctacatttccccccccccccctcggacttagttttctaatctttatgctcgaatgctggacgcaaagcttctctattttcctctttattttcatgctcgttgttttatgtgcacatatgcagacacacacatgcaggcggtaaatatgcaggagaatttgtattttgcatacccattagttgcaggacggcgaggtatctgcggttatgcgttaagtacgtaacggaatgaacgatatgagaaatttcatatttttatggggcaatcaagtgctgccactaaaagttaactagatacataaatggatttaatatatctatactttctaatattatttttacgcattttagatttactttattttaaaattgtattctatctgttagtaagcggcatctgaaagtcacctttttttatgtagcttccgaatgatttttcgtattgtgaatagagcaaacggaaaaatgcaaagtcaaactgcttaaaatgcaaaactaaaagctatctgcagctccgtgtatgtgcgtgtatgcgagctaagcggcaaacaaaggctgttggaaaacatagaaaacccttttgcgaaacaaagtgcaattgctgcggagccagaggtcggaaaagcaagcatctgcatctgcatctgcatctattgacaaagcataaaaactgtgcaaaataagcagcatccaccatgtacaaccacattcacactatgttagctttccccagaatgcacccataatccttaagccttttttctatggcgatggggagtcagtggagctttaaattgtcacaccgcagttttaacccagaaacataaatattattgagagcgattcgcggttggatggtgcagaggttctaaacgaaatttaaatgtaaaaaaaaaaaaagatcgacatttttttcgatttcgatttcattttcagctgctccggcttttgctatcggaatgtttcgattctcgtcgttccttgctcctctgaaacagctgacatatttctttactgaaaagtctttaaccacgtgcgaaaaaaaaatggcttatgttattccaattgcttgttttgaagctaggataagtgggataccgctgagcttgagaaaatcgatgcatttgaaatgcaatacttgtattttcaatatatctgaccaaaggtgagacacatttacagatatagaacataccgcctgtaactttggatttttcagcttcgttaagttctatgcaattgacaagattacgtttaaaaagattttaaaggtggtcaagccatatgtgcaagtatctgcattgtcacacccaatccaattggctgctgtgtttcggtacttggttactggttgctctgagcttgctgtggcccacgattatcgtgttagaattgaaagcagcatgctcgcaaagattctaaatagatttattccgttgctacaaaagcttctctgtcaggctactatatcaatccaaatgtccaggcaacaaatgcagatatcatctaaaaacttctgggaaaaatataagctaccaaaagtagttgcctgtttggttggaactcatattggcattaagaagcctgcaaaggattgctctgatttccttaataaaaagggttattatagcttgaacgtcatgttggtaagtacaatgtgtacatctgttatatctgatatatagaaatcattaatttcccaaggtttgcaacgacaatatggagatcatcgcaagtgatgccactttccctgggtcatgccgtgattcagttatatggaaccgttccagggccagagaattattgtccgtcaccttaaacggacattttattttggcgaactccaaatactcgcaagagagcttcgttttaactccctacaagaacgcagagattggaacatatcagcatacatttaatttaaggcatgctcaagccagaaatatggtcgaacagactattgaagtgcttaaaaaccgttttctttgcctgcaacgaggcttaaaatatgagccatcgttttgttgcatgattgttaatgtatgctgtgctttgcacaacctatgtggatcgcaaaatttgaccataactgatgaatttcaattcgaaggagatgataacggacaacgtgaacgcgatgaaattgctcaatcgctctaagtttaagcattacccataaatgcacgggtataaaaacgagatattaatgtagagtatccattaattgacaaatataataataaacatttcttcattacacctcatttttctcattaatagaaatcggactgtaaagcttcatatagcgattgctatacaggtatgatattatttatgaaagaaaacaagttattttgtaactttcaagggagtaaccatattttgccgacataaagtgcatccacctcatattgaatgctcattaagtgtggcacactaagtgcttgcgtggcgggcgcgcttattgccaagggtcagaggtcacacagtcgtacatatcctcttcacattcatacatatatgctcgtatgtgtgccaaagctaattgaattgatccatggcgcgcttgtgaaggaaatccattagccaaaatggcgatacatcatctttaaagagctccagagcataaagaaaagcagtcagtctcacgtttccaccgaaggatttgggttacgttacgcatacgtcgggtgtgacaactttgtcgttcatcggtgcgcttgtctatctttatgcggacaaacataaaatgtatttaacttaatttagttcgagttacttttaaaaaagcttttaaaagtaacagccaaacagggcaagcacagcagtacaaaaaagacgaccaagtgaatatataaaacacgagcgagcgaaaccaaaacaaaaacactcgaaacaaaaaactttcgcctggcggacagggcaaaacaacgaaaaaattaaaataacacaaagttatggggaaaaatcggtgcggaatatgtggaaaatcctggctagtagtggttgaacacggactgctgaacgttgaagttcattaatatgcacatatgcagattaaatgattaaccgtataacgcacagttgaaaagttgctggtggattttaagattttccatttgcccaggccaaaagcactcacaatggaatatccggcagtcctaatgagggacgagcactaagctaggaaattccaaaaggactatgacacattcattcgctgtcgcatgcactgctagaaaagatggcacactaagtaataaatgctgaaataatcaaaatatcaaaataatatataatattaactccgataatggaacgttgatgtagtttgtaagcagtacttcttcagtacctttatcattatatacacttgccccagacatctaaatgtatcaatgttctaatgttaatattcaaaacttgaattcactttgatgagttacagtgaaaaggatgatggtataagcttaaagaagagcaacgcatatttgcgtttgccaagctaaactatcagctaatgaaaacccagcggaaaactccatccatgccgttttcctggcccaccactccattcgaatcttggatatttgcttgccaaacggaaatacatcaaaataaattcaaaggagcaggtagtgggcaaaaaatgcttggcaaagctaacgtcaaaaaggaataatgcaaatatgagcatttacaatggaaaggatgcgtatttcgggcggaagtgaatgaggatatgaatgtgagtgcgagtgcgagtgtgtttgcgaatgcggatgttacagttgtgatgagttgcggatatgagaacaccagtggccattggcaaatatgtatgcctaaacaaatatttggcacacttttccgcccatcctctagccaatctcccctttaaaagcccaacacacacacaaccctcttcaactcgaagaccgaaaaaagggttgaaaagcggcagcgaaaatttctacctgatgtcaaaagtaattaaatgaaatgccaacagcagaaggaagccgaagaacaacaacggacagaagataaacacactcagcgaattttagaaatgaaagtttcgaaattttcaagtggtttcaagtggtttagaattagggagttattcgaaaaataattgtttaaaaatcaaaaacatcgagctattaaatgttataatcatcaacttggtttctaaaaacactattgaaaaatttccaccagtgcactttgcatataagcacattggaccgactagaaaatggtaggaaaaggctaaactaagcttctgagatgagtggaaactgcatgaagtgaggtccgaatattccaagaaaatgcaaagtcttatgggcaactacatcttttacaaggtagaatccatttaatcatttgacagggactgggaaaaatggccaagctgtcagtggcagcataaatattttatgctggtataattttgcattagtataattgaccctcctgtgcgaaaaaactttcatgctaaaagcaaaaggcatttgtttaaaagtatacaaaatacacgctgaataaaagtttgtaagaatatcaaaactaataattaatacaatacaataatgcatctgtgaacaacttttaatgggatgtgacatattttttactagttcataaagcattgaaccttttgggggaatcagacaaattatagggcggctccccttttgcagtcaaaccccattgaatgctcattactacggtgagttcgagtcattaaattacctgaaaatgctgggagataccagccaagtgtgggtagagcaaaattttgaagaaaagtcatgcaaaagggcagaaagtagtggaaactttcgacaaacttgggcgcccagcgaagccggtgaaaagtcaaaaggggaaaagtggaaaagatgatgtaaaaatgtaatgagaaaaatttgtaaacaaaaacgcaaagaaataagctcgcaatgggatgatgttccaagaacaatcagcgtcaaaggttgacgaagggtaccgaaggttgaataaaacttccggcaatagtgtgacaatggcaacatcactgccaacatcaccattttccgccaagaatttccacctttttcctcgctttgaggtgatgactttaagtgcgtactgtctctttcccgccgactatctagccatctctctccagcgtttccaccgtaagtagctgtgtaataaaattactttttaagtgcgctgcgtacctgtgatgggggttttgggtatgggtttggtcttgggcttggaacctgaagtctcggctttctgtattttggcgggggaggttagaattcacagaacttttgcttcatttgctggcaaactgaatttttcgacgccgcgacgccgggaaatgaaggaaaacgaccacttcaatgtcaaagtctaagtcggatgtcatttgaattatttaacgaaaaaaagtgcggagtgaaaacgaggtcaggcggtagaaaaacctaatttttcttgcttttcggtgcggcatttgagtaagtgctaagaaaatcgccaaaaaaaaaccaaaaaaaagaaaaacggtcaccagaaaaatacgcctgcatgcagcagttgcagctttatagctttatggctgtggccggaaaagtgcaatatgctcttgcgcctccataaaatatgttgcaaattatgaaatatttgaaactttttagccaagaaatgtggtagcccatggggcgccattcgaccaaaacgcagacgttgccttttgccctccgccctctagttgttaagtatacacacagaaaataacgaatttaatatttaaaaaacacaaaatattgatttttcattaattaataaacatatttctaatatctatctaatatttatgaaaaaataaatagcatattcagaaaagttttacacaaaacaagggatttttttcctggaagaccaaaatactaatcgtaagcagtacacttttattttattaacaacatgattttgcccgcttttttctctgcgtgtagtgcgggtatccgggcttgcagactcgaagtctggcggcgccgttatgggcatttaagttttcataagttgtgcaaataaattttaatcgaaaaatgtgccaaagcaataaccaggaggccacccaaaaggaagccggtaaaagatgcgacaacttgcaggcccaactgctgcagtaagtaaaaaacttaaaggctggcgcagacagcccagtgaaatggcaatcaatgataaaacttacacaggctggggcaaagaaagctggtgatttaagtcggatctcggcaatttatactcgtagtagcaaacgaggtaaccatggcgtatacgtcatatatttatggcaagtccgaacagcacaagttggtaaccattatgttgttgatttatgagagaccaaaacaaattctcggaagaaataattaagagcaagcttacaaagtgaatatatattattattttgatagcaagatagatcgaattacctaacttaatcagatatttttctaacatatttagttatttcgcccaaccgtagtcatacggattttcccatctgccacaaatgcacttgctcccagataatttgcgacttgtaatctgtgagttcgccaccatttggttaaatatttacatattccactgccctgccccgagtttcaccttttcggtaatgacattagctgctgcagggcaggcaatttgattagcaccctggcaaaatcattagcaagccgaaggaaaacacgctccccgctcagtttagtacagtttcggttgagttaaggacacaatacactcgaagtcccgtcgaacaaacaaacgaacaaacaaacaaacaaacaaacaaacaggcaaactggcgaacaggcaaacaattgggagtgagactttgggtgggagttggaagagcatgttaaacatatgcaaacaagtgaatggagccaggaatttgtcgactcgagtcgcattcagttggattcaagaagatggcagcagcttctgtcctggacttgtttgcttgttgctcctccatgagcacaaataagcaacaaattaaataagtaacacactggcgaaatcacagaagggcggacgggacagcatctgggctgtgaatatgtatgtggatctgaagctgtagctgaatcggaatttgtatccagaatggctatgagaccaggagacccagaagacccaaacagataaggcggcttagcagataacacgagacagtcatttgtgttgacgagcggacaaggagcaggctcagccagttgcagatgatgatgtgtgtgctggaggagaataaagattggcatgggcatgcgaatggggatgaggatgaggaaggggttccccaaggagccgcacatgtgcgccgaaatcttgcaaccagaaatttggatggttcgtcaaacaaacccctaccagcgtgagcaaataaattaatgattaaatattaacataattttaatattaggctaagagacggaaacatgccgacaaaaacttccaatatgtatttacaaaatattaaataggataattaaaaatcaaaaattcctattcgcaaatgttttgttcttaaggagtaaagtcagtttatagactaattttgcaatttatgatatattaactcagtgcatcattcatttgtactgtcagttttttcacagtttgttaacttactgcttagtaaagtaaaattttttcaagtgcaattgaaagttggctgcgaatgaaagcctaattcctgcgagaagaaggaagctttcttttttttttggcctttttaataaattaccctgggcgaaggcgaacttcggctggataacgaagggcatcggtggatgggcagaaaaaaaaaacggggactctcgattccagaatccagaatccagaatccagacttcagactcctggtttcatgtgcgtgtcatgtaattaatgcgagtcaaatgaatgagcaagccaaccgaggcaaaggcaaacaaatagacaaattattcgagggggaaaaagtcgtggaggtgtcccgctgccatatgtgactgccattccgacggtgctatatatgtatgtatattcttaaagctgatcgggaatacatatgcacgcccatagctccgccgagcaaaaggagacttagaggtctcgaatgccgccgcctctggggacactaagctggcatttctgctggctccactcgcttgccaatgcactgagggaattaagtttgaaaaaaaatgactgaggatatatattcattaaaatttaaacttattatcagagctcagtttttattgcaggcaaataaatacaagctgtgcatctattacttttggtgtccaaaattgaaagctacttgagaactatgaattttacagacggagagaaaattgagtgattattgagagtaattaatagcgatgtcataaattaactttaaaacacatctagcttaacagcaagttctgcttgtttacttgtgtacattttctcaacgcaattatttccgtgtggaatgatttttcctctccgtgtctgtttttccgaccccttggcatccggcacgcaaatttcttcgcgtttgttgcgcgtgctacgcaagctggcgataaattttaatacctaggcacaggacgaaggactaaaggacgagggacgagggggcggcagacgctggctgccaaggcgcatttgaaaatttattgttattatgtgaattttataaacgatgctgctatcgccgggtttgttgctttcgctgctgctgctgctcctgctgctgttgttgcacttaattaaattttatgtgagcttcgcccaggacccagaaaacggaagccaaaggaagcaaaaaaaaaaaaaaaaagaaatgtaaaaaaacaaaacaaggaacaaggagagcgggaaacggggaaggaaaaggatttccaggttctgtatgctgcatgaatgcgaacaaaaaatattataaacagcagagggtccagtgaccctcagctccaagtccccaatccccatggccccacattttgataagcaaactttcagctaaagcagcagaaaataatttgcttttcgcctcatttttattatttacaatttacgaggtgtttgccaaaaggaagccaaaggaggaaaaggaactgtctggcaaaaaggtgaccaagtggacttaataggcttgtttggtcatcgttggtttattgcaactaaagtgaatttaaatccatggagaaaacgtaaattgaaagcttttcaaatgaaccaagcaaatttcaattccaatcaaaattgcaggcttaccagcgttttaaaacactcacagctaagatgtggaaaaccgccagtggggaaaatcaatttgttttcttaagcacttcaaccaaatgaagcagtcattcaatccgcacaatcagcaattatccactttacgattcgaccaatgaacttcaactgattgtgagaaggcggataaggatttggcagccgagaacaggtttcacagcaatgtcacttttatttttttttttcaccattggtttaattcaaattattcagaaaatacctaaggccagccagaaggggcatgccattgtggcgcgaacacacaaaatacacaaattcaggtcaattcctttgggtatttcgccgatacaaaaatcgcatgaaattccaaacgttttacgacttcacgaatgccgctccgtcgaaaagtcatcgcaaaaatgttatggaaaaaggtgctgggggaaatggaatggcgtcaatgttggcgaaaaatgtcaacgaaaattccagcacattttttattgaacaacttcgattgagcgatgctccatcgaccattcagctgctgcttctccttttaaaaaccatttgccctatctacccgagcaaggagctaaataaactcaatactgaaatccttttaaaatggcaacactgacgccagcaataaaaagcgcaaacgacagcggaacctcggtcttcttttttttttttgtatcctggatgtcgaaaggaaatgtcgtcattactgtgcaacttcgattcggtgtaggaatacatatataaaacaaaaaaaaaacaaaaaaaatacacaaaaaagtagacagtccacaaaaataaatagaggacgcggaatgctcgccatgctcgacacttttacacttgacaatttcgctaacgcaatatgcaaatgtgttaagaatctcacaaatttgttaagcaaatcgaagaaaagccagcagggcgtgtaacaaaacgaagatgaaaacaacccggcacatttatcatctgggatgttgaacgactgggccgattcatattgtatggatacttttttttggggtggtggtggtgggctgtgaatcaccccagtgatttattcatgtggcaggtaacaccacgttggggttaatggcggcacgagcaattgccgcattttgccggttttatgagctgccaaagagctcgccaacaggccaggccaatactaactggagcattcagccattcccattcccaataccccacccccacccccaccaccaaatcgccatccatctcacgaacatcaataaaagatttgttccttttgggtctgcctaaatggcctcataacgaatgcgaaaaatggaaaaggatgcagtggcaagtgagtgcgctgaatacccttcaacaaagtgataaacttaagacattgttgctgcaaaatgccaatattaatatgaccgcgtaagcagcggtgctaaaaactactggatattgttcaaacagagtgcgtttttattaggagatgagtggattgggttgaaagtttgcaaaaaaaaaaaaaaagagcaaacattgctgattgtttttttttttttaacattttacacacgtttgcagtctgaatatttagtaggtatttagatgtggaaatttcgttccgttttcggcaattattgttaccctttaaaagggtaaaggcaagtcataaattttggaaaatggcaaagtctcgtctgtaatggcgtaatcgattgaattaaagaatatctttgcagctgcaggagctcaacttgtccgcccatcagtgttttgcaaatctttatttgcattttctttcttttttttttttggctggaaattttccccgacacgcacacacacacacacacacacacacacatcgataaatacacgtgtacggctttgcatttcaccgtgaacgcctttgaggtggcgccacctagtgagcgctaatctctttgaacgcacgaataaataaaaataatttggcatcgtttaaagccaaagccgcccaaccatctcgattcatcccaccgattttcgccccccctgtttttaatacttcaaacagtttgcggctgccacctgtggggtggttttttttggggttttctgggggaagccctcatggtctggtcaaaaacttaaccgatttccggctgccactctagacgcgtcctagttagtcccagtcgcgactttgataaggatccctttgaaatacccggctgcgaatcgaggaagcgtaacccaaaagcggattcaaatttgatttcgctaccaagaaggtaaacaaaagtttgctcagcctgcatgcaaattaaatttgaatcctcttcaatgagcccacacaccaccacgttacgctggcgccaagtgggcgtggcggcttagtacactgcggtttttattaatttgcaaatattttctttaatgagcttagctaaattaggtaggaatcgaaaagaaagaaagatttaattgcaataaattccatatatatacacttcgtacatatatatgtatttttttctttgaagcgctttcataagtccaattgaatttgtttcagtgcaaagggaagtggccaaggctggagttcgtctcgctttcgttattttcgttatcaatggcggtttggaatggtatggtaagacaaatggcggttggcaaggacggatgggtcgcgactgcattaagcagcgattatcctgcccctgttccggcctaaccactccacccactaccatccactccgcccaccacacccctccaccagcaccaggttttgtgattcggaaagttgccccaagttttcacacacagacatgcacgctcataaataacatacaaccggcgtattatatattcatactcgtgctcgactgttccgttcgcttgttgtgtgagtggtgagcagctagctggctgaaatttatgctaatgctaataacgccgccgcagcaataccttcacctcccatcgccgcccatcgcggtgctctgtaatcaaagagtgtctgccgctcgcacaattgccaaaaaacttggcataaatgtccacgaatgcgaccaaagtgctggctaaaagggaaaatgcacaccgcaaactgcactcatggcaggtgataaatgtcagcgtatcctgttggaaaaactgttgcagtctgcccatcttttgcatttcattttcaactttggtggcggcgttttccctagggttttcacagctaactctcacactttccatatttaagtgatacttaaaataaaacttcaaggcatgcgtttctacttaaaatatatcttttaccaattaatttatggttactgtgactttgaagttttggccatcgtttttgggggcatttatgagaaatatgtacatatctaaatcaatacaagtgaccaatttaaattagttcaaggaacaacaataatacgctacaacttaaaggctcaactagtttgaacttggcatacattctacaaattacatccatttatggttaaaacgcttcgcttctctaccaatttcgtagtcaaatggcttcggcttcactgaattatgcaaccgcaaaacacccactcggtcacacctctttttttatgccagctccaaacggcaaacgagagctccaagccaagtcaattattaatgttaatgtattcattacgttgcgcttccgttgccaatttccagtggccaagtcaatggtcaatggttttgtggccaaaagaccgcgaaaatcgcgaagctataaattgcgtcggcgatttgtgtgcaatcaatatacatacatacatacatacgtacatacatagatacttatatagaagatggatcctggaatgccattgactttaatcgccaaggattgctggctgtgaaatgctagtggtaagggacaccctctggctgagtgactgcaaatgatactttaatgtgacaggcggttttcccaaccgaaggtcgtcatggggtagggggcgggtggggtggtgtgtgccgccgacagcgtgctgatgatttttgcaccttttttttatatatatgtatatatatatatatattccactgcggtttcctgctccattgctgccataaaatggagtcagcgaggggtagtgaatgaaaataacaaaaaaaaaaaataccgagaactatcccattcaattctcttgttcgcttctgcctttttcacatttcccatgctttttgcaaccattttccctcgtttttttttttcatattttctcgctattttccctttttgcgttttaattccccgggcgagctttcaacgcttgtcatcgtaccgctaatggcggctacatgtcaaccacttatatcactcgactgcagcctcggctaaagcttcagatccagcttcggatccaacttgggctaccgaagaaccaacagccgcaactcttcctgtttccattgcgaagctgctcgtttttcagccgctcattcattcgtgacgacgtcatcggaacactgagaatgattttgataattgcgaataatgcttacgaaaatgtatgccattgattttcattacagtctccatccatttaactaacatttctattttatgagtctcagctactaagaattggaatccgatcggatttacaccattctaacgttttcaacgaatgatatttctatcagaaattttttgtcagtgtatctacaccatcatcggtccccggcaggtggcgccagagtgtgcaccgtggaacgtgaagcgtgaaatcgctttccaggtctgccagtcacctcctgtttctacagcatccacacctcccagcgaatacgaataccaaccaaccaagcaaccgacgaaccaaccaacctgtcgtcataaaaatttgtgtacagacacacacacacaacacacacaacacacacaggcacacaacagaaggagcagaacaatgtgtcgaaaggacgagggggagcagtaaacttgcaggcaaacgacagccgtgaaaaagtgcaccacaaacagccaaagggaataccctaacttcacgccaattcgttgcagtgctactttacgatcccaaccggttcaaattgggatcggtctcttaagatgcaacaaagtttgaaatatgagtgccttgacaggcttaaaaagaggcatacatcacaacaagttaactaacaagaaccataaaaatggaaacatggctatttgcggagtgaaagattagttgtaatttactatcggcccatttgtatgctcttcttacgttggacaaaaaaatagtgtcaactctcggattatccaagatttttaactatatatacatttactcaacttaaatcgtaatcgcggaaaataatagctcaaaccattgccacagacttttaactttgattaaccattggaaataaagcaatttacaacggcacgcgcggctgtccgcgtataaattttgaacgtatcatcgacttaattgagaatttcatcaatgaccgaaaatagaacaaacttcaaatacatatagtccaagtatgccaatggtatctgctaaaagccattcacagctggctaaatttaaatagtttttggtctggtctgacttggcttggttcatggttctactgcttgcgtggtgataaaaatactccgaagaaaagccacaaggcttcccggaaagatttgtctaaatttcagcaaatcaatgatcgcttctcccccagacatttatatgctgtgcattcttctattagctaatgtgctctctgttccatcgcagattttcgccggcaggacctgtataaataaacaaaaaaaaaaaaggcggaaaaaaaagattccgggagagagcgtcataacgattctgccaggtgtgatgggcgacaggaaggtaacttcggtttttataccctttggaggagcaccgcgttgacatttggagggcaggtgcggcaggtgattcctctgccaagacacagtttcactaatgagtttccgtctgtgcgctgcgtttgtcgccggattcctatgcacatagaccacctcaccggtaaatacacgcccttcacgacgaaacccctttgccatccgttgcaccacgtccctggctggatgatgttgcctaaatagtcgccgcgataaaggacataggatatagcgcgaagataaacaaatgcagtcaaaataatagcaccaaagctgtcttaccaatcgatggcataaactggaaataactctatatgtttaattctatgtttgagttttcgaaatgtcattgttaatagataactttagtttaatgtataatttatacttgcattttcattcaaagcaaatcaatacaatattcactaaatattgcattaaatactctttataagagtgattttttttaaaggcgaaagctgagtagattttctcccagtgtattgtttgtaagggcctgggtctgaatggcgctgaaagaggcctgcaaatgagctgcagcgagacgtcgctgcaccgccttcatgtggctgctgcactgcatccgtcggcgggcaatgccattagctggcttattaattggccagactttgcggcgccgcttctccgctgacttttatttccgcccggctgtcaattgcacaagtggggcgcttttcagcgccgttttctgctctcagttcccagtgcaccgtttcactgtgttgactgtttactttgacaatatcaacaagcaaacaagctggctgttccagcaatccagcagtcggccaatccatcagtgagtcattcactggctgacaactcaaacaacggcaacataacaggggcaaggtcgtttcttcagttcctccagtcgcctgtcaccggcgaaataagctaatcgcccgcccccctacttctgccacacccccaatcccgtactgaaaatttgtaagaacgatggcaaagattgtcaacgacaacatggttaagtatcttgaactaatatttacactttacgcaaaagacgcaacgcaaacagcaacgcaaacgcaaaggaaataagttggccgcagaattgatggactaacagatactgcatacgtgcccaatgccggttggtctagtaaaatggtcagaaacaaggagcagccatcgagtctcctacttaaataagttaatcgctttgccaatgcgacaatggaccaaccatgtggagctgcgtttcaaaaggagatgggtgggggggtgtcacttcaaaatgtgaaaccggttggggtcacaagataaatcgtctgccagccgagacccaaagtgcagataaaataagaaaaatgtcaactgttcagtgggaatcaaattatgaaaacctcgaatgggccagtgatgggccagttctccaagttgagatctgccaacggaagcggtcccatatcgaaccagtggtttttatgatgctactaaattaccgatttgctctccaagtccaccgcgttttgcggtgaatggaccttaatgcgcatactggtttaatttgtaccaaaacccctattaagctaaaagttagttattcttttcgtttagtatatttagttaaaaaggctacctatacctatgatgatcacattttgtcggcatagcgttttgtcctgcacttgttttatgtggaactgggtggctcctcgttctcgttgatcccatagaactggtcgctgtcgtcgtcatcgaaatcgaagaagccgtcctcagaatcggagaagtctagatcaaaatctgaatcctccgacctaacggtaaagcatccgtacgtaagcggagtgcccagttcctgtccgaatgttgcaaccccaaaggccacatcgtcgcccacgaaaatttcataaaactcagagccaaggcgatgttccttgaagttaagatatatgccatggatggattcctggatagaggtggatgagagtataacgatcggttcccacaccgaagtccacagcttaccaggtctttaatgaaaatcctcccatttcgaacaacaacgacggcatggatatcggacatattgtcgtaggttagtaccacattgcaagctccgctctttcccagtaaatgaataccagtgttcaggtaaacgcgatatccagtcatcacgtgcttcagataatatcccatttttgcaaaaattgtcgactgtactcaggtgcgtcaagttcgaaaataattttccctttctttttctttttttacaatacaatgacaagcaatcgattgtcggacgataaatttaaataccaaaatggtatttattttttattttaaatcaaaagttatagagtattgttactacacatcttatggattatgaccctagctactcttaattaattataattgaaggtgtgtttacatgtttaaagctcttgaaattttcgttcttaaccatagagcttacattattatccccgttgtatgtatgtaagtattatgtatgtaagtattcttgatcagaatcaatagccgagtcgatctggccttgtccgtatgaacttctcgatctcaggaactattaaagctagtagtttaagattcagcacacagattctagagacaaagacgcatcgcaagtttgttgaccaatgttgtcacgcccactctaacgcccttaagccgcccaagactgccacgtccacattattgaaaatttgctggatatttttcataattttatccgtcttgtaaatttctgggtggctgcaataatgcacaaaaaatgcaataacgcccgcgcccgcgcccgcccaaaatgattgtcaaataaagttcgcgtatgttatttacaaaaaaagtgcaataacgctttaaattttttttagaaattgtcatttatgcatatagtgtagtagttgagtcacaactgagttgagtaactggtgtctgatagtcgatgaactcgactatggcattctctcttgctgaaaacataaaaagggtgacccatctttgcgaatcgaaatctgagaacattgtacaacactaatagacgatagttgatcgctggaaagttatcgaagcctattaaatggaaaacatgtgattacaactctgaaacgaagcttccgcataaataatttgctaaatatatgattccggtctggactgattattacggaataaacggaataggatgcaagagatgacaacgtgggcgaggctaaaatgcacattcctatatcatatgcagtagaacaaagaaacccagttaataataataatttattttactagtgaacagctgagagggctatgcgatggccacctgaaatctttaaaaatcgaagcgggcacaaaaacactatgttctggatggtcaaggatagagaattcgtattatcatatatattatcatcgcaggtaagttatagaatataagatcacaatcacacaatcacaatttagatagcccaacaattggagatacagctacataaactatttaaagcagagcgtttattaaggcgttttataatctatcagactacgcttacaacttcttgcaatatgccttaaattttcttatcacaaaatcgataaggaaactttacctttatttgcatattgaacgtttttgcgagtgtacgaaagcaggctgccgcagtcatatttttagcttaacctgctcatttcgaccctccgattttgcctcccaacccgaggaagccacacgcaaaactatttttaaatgacgccggggcagatgcagacaaaacggcgcagacaccacagattcactaggtgaagacacgggagtggggtttacttcagaagcagccagacttcgtggaatgggggacagcacaggtccaccatcttcgggcaccttttagctgggataccaaagaccaagaccaagtcgttggggtttttgagccaaagatgcggtcgtttcatctcggccttctcgtccgcaattgaaattgcatttgcatttgcattcgcatttcaatttaattgaattgcattgtttttggtggggacatcaggggattgccataaaggtactatctgtggaccatcgtaaattatccatttagctttatggcctacgatatcgaggctttgatctggccagctaatgcggagttattagatgatgactttaggatggcgatacgtttttacttcatatcatatcacatcgcgcatacaatgttgagtccagacaacagcttttagatcttagattgtagtgattttcatttacattttcccagaacttcttgttctttaattgctttggtaaattcaactaaaacgtatagcggtaaattaaaaaaccggttaccaaaaacttcccatatcacatttttgacaaataatagttatcttagccagctgaatgctgtagtttcaacttttccgccttcatttgatcaaacactttgggccctttaattggccaatttagttggccgacttttatttccctccgttttttttttttttttttttgtttactttgccactcgaaaaaccgcagaaggggaaattcgaagggaaaagtggtaaggggcccaactggtggccaacttcatctgcaactcgaagtccaagagtctggctttttgtgtaatttccaagagataattgaaaattaaatgctttcgacagctgaacatggccacggagtgcctggtctggtcgtggacttggatatctggatgtctgctctctgggtttcggtttccagctccgtttccatgcgaatgcattgtcgaacgagttatttaattagttttgacgcggtgttttccccttttatttctacccattataccatgccctcttcattttgacaccgatcatttgttgaattctccatgggttttttggggattgatcgcgtgcggttctagtggcacctcgatggaatttcgatttcgattctgtgtgacccatgactcaatttgccaagggactatgaggcacacagaggacggccaagatattccagacaaccgatgtacaacatccaatggttgggcaatgggacaatgggacaatggacaatggccagtgttcaatgattgagaggatggaccaataaagaggggatgtggggtcggtgatggcaacaaacaaacaagatttcacaatcagcgctagaccgaaaagtgtgtttgggtttagagttaaatggcagcaggggggccagaaggcttggccaaaactggccaacagagatgcccgattaaaatggtagtgctattttttttattttttttatagccactagtgatccgtttgatcttaacgtggatattgttggcaaaccataagtaccttttctgttgtaatcgcgtttaaaagtaattgccagttaagtggtcataataaccatttaataacgataatcaagtggaaaaatcttcatgaacaagcctgcattttatgggttattgaattacattgaattataagtagggaatcttcatgattttatttaaacattttgaatttatatttcctcacttattgtgaatagtttttcaaaaatgtctcttctctcgctgcacgcaatcgatctccttgctgtattctgatttcataaaaatgatttgctcattgcccattgatttcacatttacgatggccataaattccagttctggccaactggcatacacactcagttatcactattactggctggctaacgagtttactggccaaaatgctactgcttctgctgctgcttctacttgaactggaaaatagtggagtaaatgtaaatgcctcctgccttcgagcaactgagcaatgtttgaccaaatcgccgggaccactgcgattacggggagtatgttcggttgtacaatacatatgtgtatagtatcccatccccatccacaattcagctcgatttccagacccaactgctgtagtcgcatgacaacctgcaggaggcaggcaatcgtttgccagagcagatatttcatggcatttctagccataggccatgaaagtgcacagttgtcaactctcaacaggcagcaaaaacagacggcacaagttgaaagagcagcagtttcgggtagaagttcctgaagtaggaggtcacaagtacagacattcgaactgcgaaactgggcaacttcgatatggatttggacttggacttggactctaacgatcgccgctggccaaacatgcgagcatctcctccttcttttgactctctgcgcctttgtgtgagtgtaattgaagcgtcaagccttttaccatatgcccagggccacaaaatcgcagatggggattcggtatttggttgaacagctgaacggtggacttttggctctattgtgccggcgaatgatgtccgatttgcgtgtttagtgcgtagagggtggaatccaaaaaaaaaagaagaaaaaaacgcaggggaaatatagacgttcgtagctaagcccaaaacacatcaccaattggtattcaaagttatttataatatggttgcaaatatttctagttacatcaaaaatggcactattgcttggcagatttaattgatttaatgatttaacctttgttagccaccgaatcacaatcaaagtgcaatttcgcggtttcctagtgcgcgacctgtcacgcgtgaatcacgccacacttttccatcatcacaccgggcctttgtcattttcacgatttcggacagcttgaagttggctttgcagctgcgttttgggcgcttttcgctgctggctggcgcccacgtcaaaagagccagaaacaaaagcaaaaaaaaagcccgcatccaaacaaaaactgaaactcaaacaagaagaaccaaacggcagcagtcagctgtagcataaatcataatttgtcagcgtgaaatttggttgacgttgctgccccgtcgttgctgctgctttgttcttcctctcgttttgtttgggatttttattttctttttgctttgattttttttttatagttaacctttttgtttttcaatttagttgagcaccggcgtctcccgttggcgtccctcgcatttttcttcatttaatttgcattcttcttggggtcttgggatgcgttgctgctttattcgcctgtcgctcttttttaattagccgaaaatgcgcttaacgacaaataacaacatcaacaaagagaaattataatttatatgctttctcggcttcccccaaaggagctggcggagcaagggcatagtgcggggcgcgggaactccttggctctcttcaactgggtcagcatgtcgtatgcgcaatgcgaaattcgcaaaatttacgtgttcgccccgtcgactcgtgactcacgccagataaaactgaaaaactgacactgacaatgcccatcactcacgacccagagaaagtgggtcaaaccaaaaaaaaaaaaaaaaaaaatcctatactttcgattcgagggcagcgggaaatatgatgaaatgctatttggtcaagatacatatatggataatgtatgaaagatgcacattagcactcatgtacttattttacatgatgtactgatgtatttaataagttggtggcttattgctagccctgcttatggaaacatattcaatgttctatgttcgcaaacacaaaagaaaagggcttattttttacccgaacgccttaaatcttttgataataaaatgcaagctttccccgccattcatgacagcaagtgtcacatttatttttataatctttttcgatttccctgcagctcaagtgataaagtgaccaacaaacggcattgtccttgcgccaagtcgcagattcgtagagttttattgtctggcagtgcacacatatgaaaatcaatttatttggaaacagcagagtggggtaaacaacaacgaaagccatattaaaaaaagaatctaccaccccaaaagcggtcccagcggattcttcgcctttttcgatttatttttatttattttttggtattttgaatttttgttgtattttttcctgtttttttgccaatcaagtgctactcggttcggtcgatgaataaatggcaactgtaagtgaaaacaattcaaattaaacatggtcggggccatgtgcttgaaaattgcaacagaggcagaaacttcaatggaccagtgccggtcagcagtgaaatgcgaaaagcaaaaaagcacagagagagaaaaaaaagaatcagcaagtgtacttcaggctaatatcacaaacgcaattacacggactccctcactcggaccaccaccacctccccttctgccacccaccgttcacgtttggttgggagctggtcagccgttggctgctggtgaaaatgtgttttttgttctaacgaaacaaaagcaattgcccgatggccaggccagactgaactctgctctccttccgcctcattcgagaaactcccaaacaattcccatggggctattggacattgtggggtcctcgatggacacacacatgcaccgcaggaaactagaaggtcgtattactataacttagaatgctattgcacttggatattcattaaaactgcttttattgctatttaactactattttactatgtaattactatgtaggaagcactcaatgactatgtaaaatagaatccccaattctgaccgatttttctcgcagtgcacccacttataataggcaggcacttggtctgcctgagcctttgtctccggaaccccacctgccccactgttcacaggtagtcagcagaagtttgtttgttcttttcaccttttttttacttttttatatatatatatttctcttctttttttttggcccgtgcccacccattgggcaagttaacggaagcaagcaatttagctgctaagaaggccgataactgggaattggcaatggccccactgggaggccacaagaacgagtatatcgagctgcgattgaaaaatcagtgacttttggggcgaagcgctttaagctgtggccttcattaataaaacgatttatttagaatacattttttaaaatcctttgaacttttattagtgcaagcaattgtttttgcttatggtttgttagcttcggtataccactatgcatttgtaataacttttgtcttcgcaaaatattgctgtaattatttgaattaacataaatacattatgtacattatataaatgttttttgttacaaattatttggcgatattctttttgattcgtttttgtacatatatgttgattttgtttccaattgtacaattgtttaaatattcattccacttgactttcatgcgatctccagtcccttgatttgttgcattccccactttttaggtgacccataatatcgcataacgtcggttctattcgcaacactttctattccaactttacccgtttgccgcatattgcgtaatttgcgcgctttgttttaattaaaattcaaatgcgtcgcaatttcattaattaccaggcagacgctcacacacacacacaaccacagtgacatagacacacacacacacatggacatggttggtgtgccacttgcagccattttatagttgggaggcttttgaaaatggcgctgacgtgactctgctcgagtttcagtgttcagttgtcggtgtttagtgttcagggctttttgttgctgctggcgattcccattgcatgccggcagtgcagcgaaccatgaaagcaaacgcattcccatcaactaagcgggggaatctgcatcccctggccagcttctactgctcccccagctgctcgtgcccagcgcctcgtctcctggaaacccaaaagcggtgaaccgcattcgcacgaagcctgtccagcaatgcaggccccatttggaaccccgctctgtggcgccactgggcctgtgcgtgcgtgtgtgtgtgtgtgtgtgtgtgtgtgtgtcagtcaacaattcaattaacgtgttgatgattttgcggcatgcaacatggcgaacgagttgcaaatgcgtcgagaacgtcggtgccttgccacgccgcctgttattcggttttcatctctacattttgaggagccactgattgccacctccgcatggcgcctactcagccaccattcacgaacgatccacccagctataatcaaccatttacccacccaaaatcacccgctcacccacaggcgttgcctactttgctgcgtcaatttgtcaattagtttgccaattgttgccaacacttttcactttctctctcgcgggttttcaaaatgagtgggcttttccgagtgcttggaaggggtaaacggggggggggattgttttccagttgggaaaagtttttccaggaaagcgtcgccgcaattaaacaaatgctccattgatgctctggcattggccaacggcaagaatacttaacactttcaattaaacgcattaattttatgggattacgccctcacggactgggcgtggcagtgtcccgtttctatctgccaatgtcgcatatcaaatttaatttgctcatttgccctaagagcttttaatgtgtcttgggtggccctatctcctgcacttgtacatacatatataccatactaaacccacaccaaattaaacccaacccagcccagcccatcccatcctgactgccgagcgagacggaatgcgtgtcttacctagcaaaaatgcgcccccaattaaattcaatattaaattgagcaaaacgcaattaactccaaaaggcgcgcacaccgagcagacggggcagatgagatgagatgatgacgatgccaccgatggccacaacttggaagcgagccaggtccatgggccagagcatccccatctctatctccgccatcaacgccctcctcgggccaagtctggtcccccagtctcacccccatccccatctaaaatcccctttcccacaatcatttcataggcacagaggcagtcgcacagcagcggttgggataatagcctcgattttcaaataatcatttaggctagaacgtctttaagtaccaactaaaaaggataatatagtatttaaaacattattcatttactgcttgtaaattgcagcgataaatgtgaaatacagattaaaagcagtatttttagacctggtaataatgaccagcattcagagttcgtaatgctataaatgtgaccccaattgtgtatctatcgtaggtataacacgtatacgacgcgttcgccccacagactgtgatttgcggcacagatacagtgcgctgcagataagggggcaaatcgaggacagtggcgatggagtggaggggcgtataaacagcctgggtggcaatgggagacaattggcagcaaatatccatcgtcttgatcaagaaatcgataaagaactattaagatgatttaaaaagcacagggaaaagcagtcgagaacaacaaactaagttagtaaatagaaaatactttagctagagtgttgttcaatttttcaagaaggaataacaaagtagctagtaaatcggtatcaagccaataaagtatcatatcctaatatacgatatatatctgaaccatccacgtaactcgttaatttccaatcaataatgcactgtgcacgacagatatctttaattattgcaaacgatgtcccactgtgcgacatggccaccagtcaagtgtgtttatgagccgctgactaactccaccggcagttggaagctgttctctttgtcgctgcttgggcgttgaaacaaaagcgggggacaacacagccagctcgctacatagataacaatcaacaacgtttgccagttttgccaccacctgacccctgaccccggccacgccccccgcccacagccccacctgctgctaaaagctgctgtgtaacccgctggctacgtttgccaatcttagatgtcggcaaacatttcgtgtgcgtgttcctctgcctctccacaaaatgttctactaaggctatatgttataattacgcgcactgtgggaagaagcaatatactttaaacaccgatttcttaaacatcttaaacagttgcacatattgtttaatacacctaaaggaagttaactacattttcatatagtaatgtgacttttaagcatactcttttatccactatttcaaaggtgttaacattactctacatttcgagtggattgacgtgatctctgccagcgttaacagtgcaaggatgtgaaaactgaactgaaaaccccctttattccggttaattccccctgaatcaagccaagctgacaaccaaaactttagcaacagcatgcaaagtgtttaatgtttcataacacaactgacgaactgcgacgaaggatgggatgcggtctcatccgcgcagaatgaggatgagaatgatgatgatgatggtggtttcaggtgggagttggcagatcggagcttgccggatccgggggtcagagttcggaggggggttcggtgcagaagtcaagcaggaaacttacgcaatggtaaaatggagaagcagcagaacaaatgtcattgcaatctcactttcagtcgcctgtcagttttgcgacttgcctcgtttagttctcagtcctgcaagccatcatgcataaatgccacatatggagggctgaagccatctgaagttttgaagccaccgtgaagatgggcatatttatgtcttcggaaccacagatcgtttcacaacggagagcacacaaagaaatttttgaaaccaattcaaaaatgggataggctaaaataacaatcaacttgttgcaaaaagccttaaccgtttaaaaggctttccaatagcctctttgcaatatcctaatctcatcgtttatctacgatattataattaaattacaacttgtctatgattccacccagcagaccgccttatcgataaggctgtatcgtttcgccgactaaccggctcaaatcgcaagtcgccccatcaatctgcatcagcatcaaaatgccatcgaaatgtgcggctcatgcatattcatttgaccaccagcacacttggcactaccagcaccaccgttgcaacatccgcaccacttcaatttctttgaggcacgtagcggtgggtgttgctgtagcaaaatgcgcaactcaattgcaattacgagaaatgttagcttataatttgattaaacttttcaattacaatatgcaatgaagttgctcactcgacagcaaaagcaacagcaacactaacagcagcacaaggtacgagggcgtgccacccaaaagggggcgtggttggatttggatgggatggaaagactgcccggactgctaattcccacaattacaatttgctggcaaagcaatcgggagcaagtcaactacgagacccatacccatacccagtccagacctcccagtcggcagaggagatcggagcgggaatagggaaataaaataagtacggaggattagagaccgataccgcaacactcgactacccttcaagatttgggggaagcgaagtgtgatgccattaagctttcgaggtagcacagcaagcaatctaattattctcacttatttaataattgtatttgcagaaatgttatatttggaacatatcttttcagaaaaagtcaacgaagatactaagatatcgaataagagatagatttgatcgcttgagtttgaaatttctttagtctgaataacagatcttcacatcatcgagcagtcagcacttcttagcccagctgatggactttaattcgtgaaaagggcatcaaaattaagttgcaggcagcacctgcagcctgcaactcggcggcgaagtggaggttggacacggggcttggccatgcgccagccaaagagtggagcatatgccaaggcctagacttgcctttaggcccggtccccagctttcctttcttttcgactgttttttcccctttcccctgcatctgccccctctgccccccctttttgtgccgcccctgtcgccagactgctgctgtctgcgtgtggttcataatcttaaattgccaggccggcccaagttcggctgggtttggtttcgcttggttggtcggatggtcggatggttggatggttggaaccctgccatgtacgtgctcatgtgtgcaatgcgatagaattttctttttcctcctcatcttctttgcatgtattttttattttctccccccctttttttttttttttttgctgctggttaatctaaattagtaaaatatacacgcagaggcagcatcgggtttaactaactcaaaggtaaatagacaacgtcaccgttgcgacgttgttgcaacgtcagcagcagcaactctgcagtttgtttgttgctgctgctgcggcattgatgctgctacgatgctccgtctgctgcggttgtggatgtaaatgggactgaggcttgacgttgccaacgtcatcgtcatcgtagtcgtcgtcgtcgtcgtcgtcggcgttgctaaaaccaaagtaaactttaaacaaaacttggcacaaagcagcctgacatcgttgttgtgactctgctgttgctgttgctgctgctgctgctgttgcttctgcttttgttgcggcccattgcctcgccagagatgccaagtggtaaagtggatgcaaacagtgactttgtttaagttgcaagtgcaacttcatccttttccctgtgccacaatctactatgcaatagaagttggcttagaaacacattatgaattccgattgcttactctttgaagtaaatagataacacaacctcttcgacgttaggatcttcgtgaaaagttgtcactgtttccaatcacggatgtgatcccttcacttccgctcactttgacaagaaatacgcaaagtcaatgagatgaggcagcttggtttttatacctattttaagccgatttgcattcacaaatcacgttgcaataacaatcgcgtcttgtcagctcgtgactgcccccaaaaaaagggaaggagatggcacaactctattcgctattcgcaacgagcataagaggattttcattaaagcgcataaaaatgtgccccctcctgtggcagttgccattcttcttatttcttattcctctgattgtgggtatctctgcatgccgatacaacggcaaaacgaccgaaacagaacggaacggagaacaacaaaaaaaaaaaaataaaaataagaatcaaaaggtatatatgtatatatgtaagtagagagtttcagccaggagacactcgactctcgactcgactcgactcgactttcgacctcaggagtcgcagcttcagccggaaatgcgcaggcaaggcaaataagaacaacaacgcgcgtgccccaacaacaggcattgccttggcctttggaccccccccccctctaccgcgaccctgtcaaacatgccccattccattgaagtcactttacccctagatgtttgccccaaaaacgcagccaaaggtaaacatagctttcatgtctgcacgggcagaaatttaacaccatcttttcgctgcttaatttgcgtatacatatatctcttttgtcatagcttttctatttatcttgttaatattgatcatatctcattattactacaattatgaaccaatagacaattgcagtatgtctattattttggcggaaatcaaaagtagtttatttctttaattgtcttcaggcagtttatcttgtttaactatcgagatgctgcaatgcaaaaaccattgatgaaatgggtggcacacacagacctttccccgttcaatcttacatgctcgtaatttgtgatctaattatccatcagtaccaccacttgggtttcactgtgcacagatactccccctttttttttgtttctacacccaactcgctctgttcaggagcggagtaatagatgtcacagattagtagcagcttgtaccgcccctggagtttcgtcgagctgagctgagtcaagttgagtctgcggctcagccgatgtcgctgtcattaaaagtgtaataaatacaacgcaaagcagcaacagcagcagcagcagcagcagcagcaactgcagcaatcgcgacagcagcagcaacagcagctacatgccgcagcaaagtcaagtacatcgtacgttgtagtatcatttgcacgtacttgtcactcgagtcgagccgtcctttccattcctttcccttgattccccaccagaatcctctaccttcatcgtagatcctcttcagatggttttcttctcttggctactccccgctgttgagtttgatgttgctgctgtgtgttgcaatgttgcaatgttgctgctgttgctgctgctggtttgcccagtggccaaagtctcgacatgatggctgctgtttcagttacgattgccctttgggcaaccaatgctgcctcgttttcaaggcctagacagcttgtcagcatccatcctcctgcaaacaaaacactaccgaggcacttcctcaacgttttgacccacggcgcattatgtccagtcggctgattttggcgatggggaggtcggtggtgctggtcggtggtcgtggtggtggacaatcatcatttgaatagtccacactttgcataaaattaatattgagtctgggtcttggacggctctactcgagaaatgaaatcatgtttccgacagttcatcgcgagtgttttaacggccgccacatccgccggcggtcagattctccatcttacttttcaatttttctttttttgttatatttattatggtttttttttttttgtagcgctgcttgcccgcataattcgcttttttttttgtgccaactttgtcatttcaaatatttaattttaaaaaataatttattcatttccggccaagaggcgatccagaggaaaatgccctgcttgtgctgttgatgattttcttggttcgttttgatgtttttgttgccgctgccaaccgcaatttcatttggctttgttttcaaagcaaaaaaaaaaaaaaaaattgaaaaaaaagtgaacagagaaatgggaaaggcagtgcgaggtgttgaggaaattaaaaccgaactgtaatgaaagaatggctattgatgtcatttcaccccaaggaacgcaaacccagaaccatcatcatcatccggtgtgtccagtgagtgggaaatgtaaacgaatttatgcatcaattgccaatatgaatttgagatggacgatattgggttccgcgattcaataagctatccgattggggaaactaaacggaatcgggtcaggattgctcaatcggtatcatgatattattgtcattctatgcttaaagctttcaaattgtaaaaaaaccatctacatacgcatgtaattagatttaaccaatggtttatctctttacgaaacgactgtttttggttttcctgcactaatacaatttgatagtaattaattgagttggattcattgaaaccgcatcaaccagcttttaaaaaaccgtaaaatccatttgattcctccgttttcacacgcgtgttaaatggccaatgaaagttaacacggcatatcaattgttcccttcgtttggaaaaaaaaaacaggagtcaggtgattaatgggcaatattaagcgaaagttgagggaatcattcgttagaatgtttcgctcgcttaatgggttaaatcgtaaaaatcactcatacgccatgtgcgccgttgaaaaatgcaggcacttaagtgcagcgaaatcaatcaaaatcattcgtgcacagcttaaaaatgcattcgatttaattatcgcgtataaatttccttactcctgctttcggttccacccacgatttcgattattcgaatatatgatatacatatatacatatatatatatatatagcccgaaattccatccaatcagcagcagccgacgattcttgttaattgtgcggctttttgtggcagcggaatcgaaatgaaaatgaataggcattcgaatgcacgagtgccagagtgagtattcgagtatttgcgattgtttaacgactttaatgccattgagccaaacaatggcacccaaaaatgaacaaattccggccattgtacaaaaaaaaaagcattatgaatagggcgagatatggtcgctataaatatgcgaatgcctctcattttattacctaattatattggttcaatcggcttggaatggtgctatgcatttttttccaattaaatattttcaccaactgccaacaaaaaaaaaaaatgtaattacgaaaatgtattcctagtcacgtttttggcattgtggctttttgatttcctcctcttcgtttctaaattttgtgttggaaacgttgacaattaacgatgcattctgaatgtttttatttgaatgaaatgtttttaaactatcacctcttcaccattttagttatgctaataataactttatgcttgtgtgttgtttttgtggcacatgaacaacaaattatacatgcaacattttaatgaagtcaaaaatatgtgagattttattagcgcattttattgttttttgtctgagtgcgtttatatttgttaaagtgggtggcttttccccaccgaaaatgtttgcgtgtaaattttctttttgttcgcctgccttttacgaccataaataatgcgtaatgaaccagggactggagtgaaaactaaatcactttgttaagctgtttccaaacgattttgccaattttccaagagtaccctataattgtggtcattacattgtgtatattggttgcatatcaaatgcattaatattataaacttaatgaacttaagttccagcccagacaatgatttcattagaataattatttattcttttcaaataggagaataattagttatgcagtgcaatcgatggtatttattggctgctgggtaaactcattcgccaacaactttgcagcactcgacttttacacatttcatgtaaaatgttgagcacttttgtgtgtgcagacgggttttatttatttattttttttttttaattagcctgcattttattgcaacgctcggtgggcttaccacctcattagggccctggtgccacaacaatacatcatttaagccttcattagtttatcgcccactggcaactgttgggtcgaaagttattagcgacagtttaaaattaaattggcctgaaattttcttttatttccgccccgtttgtataacttttttctctgctgtcctatcgatatgctgccgttgttgtttctcgcttgttagcatattcatttgaaagttaatgaagtcgtcaattaattttccattgtttgagctgccgctgggcaatgacaaataattcaatattaatatgccgttgccgggatagtctggccatgtgaatggaatgggaaatcgaatgggaaaatttaaattatcctcagctgaagagcttaaagtttggcagtctgtgttttattttccttcgatctagtctaattatgatttatcatcgatgcgagagatatttacatgcaaagggtaaatgtcacaaaagctaacataaattgcgtgaaattaatattcttgttatcataaaattgagagtttgaaaaccaatacgacacattcataaaacgagaaccacacaaacgttagtttggtataatataacactacaatcaatgctgaccctgaaaaactcgatgaaatgggaacatccaatcaggcatcatccacaaatctaagtggagctcaaccgcaaagtaattccaatggggatcgtcggatgcattcctcattaaattggagtctgtatgaaagcccacacccacccatgtgtatgtatgtgtatgtatatagaatctgtgtggatatagccacacatgcaggcttgccccttttagagtccccacgccattcatgcatcttcgatgcataaaaaccacgcaatttgctacacttttaacacttgcacggctcaatgaagtgcaacgagacgcactcaactaaccaccccagtccgaggcaccaccgacgccccacaaccccccccccctttttattccgaggacccagaagtcaaagcaaaaggccccagagagtgcggaaatggagaaaacaaaaaaaaaaaaaacatgcaccagaatgcactgtgaacacagcgaggggcaaagaaatggaatctgaaatgcttttgcaggcaaaagggattcaaactaaccgaaggccgcatgattctgcggtttgtcaccgccacccgcccgtggcagagaccctcccccaccaccaccatcaccagcaccagctatggtcagtgtaatcgaatctctggactgcgcgtccccttttatgccccttgtgtccattcccctatccacttttctacgcccctgctctttgggatggcttttatttgcctggcttttcatttggcagtcaatgctacgctttcgcgcttttcaacgctaacgactacgtgccacagttttaactgccttttaccaagattccctctttaataaaatcagcccactgccccaccgcctctgccaatttcgaatgagcctgcttttgctgcccacgtgcaaataccaaaattgctcctccattacatgcgaaatccaggcgaaggttaaacaaactgggtttctaaagagaaacaaaatcaaaaagcatccgaaaaaggcaacattacaatgtgcaatgtggaaaaagtatgatatgaacaaaaaaacaccaattcaaatgggaagtaattaacacttgaatgcagtgaagcctcgacagacaggcaacaaattgctgcaacttattaagagctcactccacgccattccattcccaattcccatctggtaaaatctcaaaaaaaaaaagaactggtaaaaaaaccatccgaatgctgctttgaaattaatttaggtgcgtgtgttgggactccccgatgggtttgccttacacccgatcgaattatgggtctagaggttctacgaccacggccagttttccactaacaagccagcatatttatgcgtttttctcagtttccgcacttgtactttcccagtggattcggttggttgaaactttacgaggccgtaagtcttgtgccaagtgaatattttccttcaattggatgtttgattttctagaatttcagcacatatcaaacccttttcatttaagtactttgattcaaaaatcatcacattaagtataagccaaaaccagcttcaaagtttattttttaatttaaattcaaattaatatttcacactattcactccaatctattcacattcccattcaattcacgattcactctagcttgcgacatttttaagtggggcatttgaatgttgggtacaaatttttggccagtaatagctgcccctcaaactattaaatccccttctgaagccacaaaacccatcttacactcggcaccatataattttctccattaacacacactctcaaagggaacacactcgcacacaaacattcacacacacacacatggcacgacaaaatgctttaatagtttttccgtgcctttaatttatgtgaattttcaaggtagctaacgaggtggtgagccgggcagattttctggtgtttttcgtgaaaggggggatggagaagttgtaaacgagcctgcgacaacgccattcgatttgtcaaccccccaccattctggaatccccctcatccgttggccatttctcccccgaattcatttagattgctatgaaaattgcttttaaattaagttctgtgtggctgcaatggcggcttctgggaaataaaaccgacaactaactaaccaaacattatttctgtttggttccttttgccacacggagaaaaaaaaataggcagtgcctattgaacgttaaattttccaatatatcccaaaaatttgttcacaaccttatcttcattatactatctgtttccatgcttgaaattctataaatttgagtgaaattagcgtatgcagcccccccatttcgctgagtgtatgtaatcgcagttgtttgttggttgttttaacgttgttcgtgttgtttttggatcgggtgcggcgtaaaacaaagcatttggcaattaaaataccgccggacggcggcttttcacaggtgagcaggccacaggtgggcagaaaaggggcagtagtagctgtattttcctagagttttccaactgctgcaacaaagccgcagaagctgaggaagatgaagcggaaggtcgaaaggagtgcaggccgagaaattgcattttcattgagtcaattgagcaagtgagcaactgagatattgagcggctgcagccgaaacaaacccgcaaatgccacaagaaaatgggggaaaagcgtcggaaaagcgttggcaaagcagaggcaacatagcagcataagtcaacactaattgcaatttgcagctaaacacggacggggcttagagaaaaaatggtgcggtggaatggtgaaatagaggcatgtatctataggatacatgacataaataaaagaggattcccggcaaagatagcgcagatgaaatgcacaaacagaaaagatacattttcttttttcgaaccaaaagagtgggggacttagtgtagatatatctaaatgaatgagtttaacacatgcggatagagaatgggaaataggttttatttaatcctaagtgcagagtaatcatttatttaaaagaaaattttattgtacctatatattgctgctaatagctttagaagttaatcagaatcaggaaagtattatcatttttatacatttaatcaaattgcttcattttttcttcaagtgcatctggctgtgtgggtgagaagtagacacgttggaaaattcaatttgcacagttcaatgcaaatgaaaagaattgacacacgaggaattcaaagcaaaagaagctgaacatgtgaatagagctctcgaataattagtgaataataatgaatggcagtgcacaaatgtgaacttgcaactcaatgaacttgagggcagtaaaaaatacatagaagtcgtgttcgtggcccagggtcatagtgtaattagagtcgtgaaaagatatttaaagtacccatgcgtgtgttcatttgcatgtatcattcgctgtaatttgtagcattattactaacctatttaagcgtgagtatctcaagagagctgcattcaataagtgcacaactgaattatcttcaaaaattgaattctccaactctgtggcaacgaaatgcagtttatcttgtcgctttaccatgttgccagtgggaaaacctcggaaaagtgaaaacaaaagcaaagcacagtgaaaacaatgcgggaaaacaaggaaaataagtgtgcatatacatatatgtatatatactacttcttggccgtttttgggtttttggaccacgattctggaaggaccgaaacccaacagcactgggtaaacaatatgaaagcaaacaaaactaaggggaaatggcaaaggaaaacaaagcacatacagccaaaacaaaaaacccaagtaaatttctctcttttcggagtgaaaagcgcacaaattaattgaaatatgcttctgtcgttggcaacagcagcaaataaatgggtagttcgggggaaaaaaaaaacagaggtacacagcttgcacggaaatctcagggtgaatttaatgaatttcattgtattaatcattacacattttcttttaactgatttacaaatcaaatattgatttgagcacgcttttagctcactaaaatcgtttaattccaaatccatttgattgattgcatttgttgtgactcccctttccaaatcttaaaagtcgcctggcaaccactgtgtgtctgcatatgcaaatagacgaaattctacttcaatcgggcaataaattaacaactctagtactgtccaaagagtatttcttcgttttctgccatttctgcggtcagatacatcagcatcgtcaaaggcaacacggcaacgaagcattttggtcagtttgtttgatatcataaattacaatttaaattttataacgaaaactaattggagcgatgacgacagacccaaaaagctctttgaagtgctctgttgtggcccaaagcggcggatgatggtcgataggataggtatttcggtctcttaaccacaaaaagcagccaaaaaagccaaaacagctgcaacagctgctgtttctggccaaaagagtcataaaaacatgacttgatgcggtcgatcacatccactaccatattttgtataattccacacctccgcatggagaatcgaagaacggatcgcgtgggcggtgggtttatagcgctaactaaagccgcttgctgcccaaaaaccacaaaaataatacaaaaaaaaagccagtgagttcgccataaggcgttcacactgaggcaaatcaaatctagattccagattccagaatccagattccagaaataaccatttgccattttaaagttatctgcttttggttggccatagatcggattgtgtacttggaaaactagttctatataactcgccattaaagctcaatctttgggaattgggtttttgtagtaaaagatacgaaaccaacttctgtttatattttctttacctgcgtgccaccaagaatcattcatgttgccagtttagtttgcctgggtataattagttttaagaactaattaaatcgtttctaaatgttgggctatttcttagaataagtaggtttagtaatatttcacagatccctgtttttctcagtgccgaaagtttaacgtaagacaagtagctttatttatatatttgtgtgtgtgtgtgtgtagctgcagtagaacgcggcgtttaagggggcgtggcaactaccgacacgctgcattgttgctgtttttgatttttgttttgttttgttttttgtttttttttgccggcgccaaatgcttgcgcaaattaaaaagtaattgcttgagaaaaagtcagaaacagaaaatatgcaacaaacagcggcagcatcagtagaagaagaagaaaatcgagtgactgagaatggggcaagcggagttggctgccggctcacagtttggtgtagttgaaaggtttcaagttgccagccaaaatgccaaaaagtcatcaacttatcgttgttggctcggttaagggcgaaggtcgatggtcgatggtcgaaggtcgaagggcaagagcaatacgcaatggatgtttcccaaaacaatacaagtagaatgcaattgaagtgctggctttttcagcggcaatcttggcgagaaacgctcgggggagcaattaaatagaagtaaaagtgatgaatcaaacactggcactgtgcgaaaaaggaattagagtgctggcgaagccattagtcggaaatgattggacagttggacgttgaacgttgaacgttggacaaatggaatagggtagtgtagtggtggaactgcaaggatctgcggcaattccccgaggataagcaagagtacaccatgctccccagtaaattcaatctcaatctcaaacccgctagttcaaaagtactttcctgtgttacctttatacaaatgattatcgaaataaaaagaactatccgcagatgacactgatctgaatgggaaatgtcccttttttttgcaaaaaaaaacaaaaacccagacactgcagcactctatagttgctttcaattatattgcatatcctttaaaatcgctcgtcttttgtactttcaatttgcacgagtgtcctttcgaatgctctcggctccattagatgagtccttttttggtgcgctccaccgagcacatagttttactccccaaataaaatgaacactcaaaagcatttccacatggcaaacaaaggatgtaattcagccttattaggattcccagagcgaatttcttaaattccagccattcagcagtgcaaatcacatccacataacccgacccctccgcatgcaaattaagtacagtctccgagttttgccactacacaaaggacactcattatgcacttccatgttctgcccaccaccccacttatttttttgcgttttttttcactgcttcttttaaatagctaacttttatgtttttttcctaactgccacacacattaaagcatccgcccaaccatcaaagtaaaaaaaaaaaaacacaaatacgggaggcaaaaaacaaagcaatcgcaacaagcgaaatggaagctgccagcattttatcacattgacacgccacgcccactctgccccctgaagaggctgatgggggaaggggtggggcatggagccgcagtgttgcggttatgcaataaaatgttgcattttgctttcggtttgccaaacgcctcgaccagaataacccagaatgcagaatgctgcgtgctgcatatatgcaacaacttaactgccaaccgctaaggtaactcttacaattgctgctactgtttctacaactgtttcttctgcactgcaagaaatgcttactcgatctcttagtttatgcctataaatactacttaatacataagaaaatcctatgtagagcatagtgtacattagcgtgattgactgctagctagtatttttttgaagtgcattagtgcctttgcaacttaagctggggcaatttgttgcaagtcagttgtgggtgccggggattccgagtgagctcgtggctccgtttacacctctctccccgccccctcccccgccctgcggacacgttaaatgcgcacagctgccgggattaccaggcaaaatttgcaaatgtaaacgcagcgaattagtcgcgccccgaacacaccgaacagccctcggaaaaccagggaaaaacatgaacggcagtatagcaacaccctcactcacacactcacccccgagggcgaatagtaaacatatgaaaatcacacacaaataaatgtaataaacaatgcagcatctctcatctcgatgagggtggagcgagtccggttcagtccagtcaaaaatgctaaggtcaggggacacagccgcatcgatgccccttggcttcctggttccatggcttcgattgcagcctgccaaaaaattaacagatgtctcgcattagatgcgcttcactcgaccccagagacccgcgagcggcgagccaatgaggcgatttatgccacagtgggccacaggttgccattaaatgtagaaaaaaaattaatgctaaattatagcaaacaaataattgaatgaaataaagaaagatttgaacatttagaatatttaatattattccattgtcgtgtacaaagttttgaaagctattctagcataatttgagtgtgtttaaaatcgcatattataaaaatttaaatttaagctccaaaaatatcagtttcgacccactgtgcactgcgaccactgcgggttacccatggaatggaattggtagcaatttttgggcaaacggaatcgagacaaatcgccaacgaataaagcaaatcggaataaagcattttgggcaaagtggagacgagtggaagtggaagtggcagtgggtagcgcgagataagccacacggcagcaggtagaaaaatgtttgtgtttgtacttccatttcctttttcaatgtttacactatccgctggataccatattttgtcgcacgatttgattactcaaggggaggtaattcaagactaccctataattattaacaatacgatatttcagcaggcaaataaacaaattttcagtgaaatataaagaattttaaatgatatgccgctcattttcatttataatgttagttttattcacgcttaagcatttttcaaatatttaaaactctattaaatataaagtgagtagtataacgatttcggtgtttttctcttgttatgcatattgtttgccgcgcgatttccgctgtgttcgtaaatctttgtgaatatttggagccgactgattctccagtagccaagtggtcagctggaggagattgtgagtggcgcagaggagcggtgtggcgctagacagatgggcttggtgggtaaatgggacagaataggaaacaaggacagccagcggctggaatttcgcccagacataaatattttttatcactttccgagcgcttcatctctcgagcaacccttgtccttgtgcccccgcgctgtttatttcgttgcatttgtaatgaagtcccggactcgggattccggcggagactaattcaaatttaagccatagaaaattaattttttggctaccagcacatcccatcccatcccatccagccaaaaatgcttcgcggtggttgcaaactctgatggaagagcacggaaaagtagatggacaactttcggcttattcagcttagtaagcttcaaggtcgattaagggccgttggccatgggttaaagagtttagggaaattttctggccgggatctggggcgctttgttcatggagatttaccgacattagttggaaatccccagactagagtaccaagcactcgaatctaatttaaatatatgaaactttcaattgttagattttacattctatgcagtaagaacttgtgagggtttctgctatatgatagagaatagctccatcctagttattagctagcaaataactaatacctagtaattcccctcattttccttcttcaagctaatcctttccgcttcaactcgttggccatttccagcggcaattgtcatgggattttcctttcccttttttttttctttctttttgccataagccataaattagtgccgaccgacgttccgttgagtctttaagctgaccttcgaccccactctccatcaactttgcaccacccacttttgggctgttccactcccccacttggttggcttttgattaattctggatgaggacaacaacgtgaacgtcaatggtccacggaaaagttaatcgttagtaatttatggccctccaaggaggcgtatagttgggcgtggcagtaaaggtaagacgatctgaaagtagtgttaataccaaatggggaacatcgcatgggataatcaagatgatggtcgatgggcgctgtccaaagtagatagaaatcccgatatgtttgggtcacattcccagtgccaactcggttgggtatgtatgtactacatatgtgtggacaatcgtgtcgacattccaagtaaaataaaatcgaataaaacaccaaaaatgcaaaaggagaagaatgtggatggcaattgggagctgtggaggcgatggcatcgatggcgattgccagtgcaaggctaaagtactcaagtgcaatgcgaaactggagtgatgatgaaaggatgagcatagggcactggcacaagcacaatcgcaatcacacaatgctcgcaattgaaaacgccactcgaatcgccgtccccaacttttcagccatccacctccaccgcgtgcgccatcttctcctgcaacaaatgcactcaatcgcaccaatgtccaattccgagtccactgtgagtgaccatgaaaagaccttctgctcttgaccgagggcagctccaaagatcaatatcaatggcagttccacaattcggtttcaatgaaagaatatgtgctactcaatcaattcatgctttatcatcggcatagtcgagatccccataaatttgctattcaaaatgtgttgcatttaaatatgttatatatatacttcttgaactactgaaaagtattatatgtttcagataacactatctcacatttctacattctcccctgcccattgaaatgagatatatgttgtgagtaagatattcacgtctgtagaatccgttgggattcagtgagattctcatgaatctggttataatatatacttggataagtactcacttttgcattcgttggcatcattgtcggtggccctgccccagggtcgatcgaagtagaagggtttgcagcgttcgcattccggtccggcggtgttgtgcttgcaggcgcaggtcatggtcagtttggcgctcatctgggtactgcgaccaaagtggttggccagcgagggggcggacggcgtgtcctcgtcctggccatcgtcctgatccgaaagtgccgttcctgatcccgaactgacggtggccacacactcggaggcgtgaccattgcacttgcatcgtccgccgacggcaaaatccgatacggcgtaatgctgcgaaatgggcaaggtcaccgcggaggcagcggcagaaggggcagctgtgctagggggcgtgaccttgccaggtggcgtcaccttgggcggctgttgtgggggcgtggtggccgccagtttgctctggtagtgcttctcataggcgctacccttgtgcttgccctgcctctttacaaccgattcaccatcactggcatagtccaaatgcagatgatcatcatccagttccaaatgcttcttgggctcctcgtactcatcgtacccagcatcggcactgtcgttgtcctgcagattgtagtcgtactcatcctgctcgccatccagttccagatccgcatcatcatcctcatcctcctcgcgactgccgcccatctcatcgctaaaggcatttgcatttttcaccttcaacaattgtggtggcaattcaaggcgatggaatacaactcttatatccgtggccgtcacccaatcctgcaggaccagcgaggaatccagatcattggccgacggacgaccctccaatgtattgaaggcaaatcgctgagcagctccgcccgtgtcatgttgcgaattgatgcatctggcctcctgctcattaaacttggagatcttagcgcgatccggtcgtccatagaacttttgacactgtgagctatagaactggaagggttgccaggtctgtccaaaatccgagctcttgaatatggccagcgaatcgggacgcggcgagcggggacaaaatgacaacgatatataggtcagctcgtacttcttgcccagcgacaaggttagggtcacattatccggcggcgcactgtccggatcgtggggcacattaacggcacccgatcgccagcaggtcacattactgggattatttagatcggttaatgccgccggaccgtaccgctgctgttcgcatgaacgacactcgccggcatttccgtcgcgcaacagttcgcagtaacgctccggctgttgggcgccacaaacgctggatgcctgaacgggattcccataggcggcattcacaaagcttggcaggcacttgcgcggcttgccctcgaagtagcagggatcgttggaggatatgccggcggccgaggatccgatggccagtgccaggattatgggcaggagcaggcccatccttgtccctgtcgctctgaccctgaatcggaaaggggaaaactatatagtcgacgctgatggcgactatctttaccctacaagcttctcacattccctacttttaatcaaaggatgaaaacctaacagaaaatacttttcaaaacacagtgaatgccaggaaccttatttttctatttctctgttgtacgaattccattaaatataaaattaaagcataaattagttggtgactccagacaaacaaaaattccttaaaattttgtacataacaacacttaatttctttctcctaaagcactttccttttacatgctatcagtattaaactcttaaacaccgttgagttattcaacaaatttaaaaaaaaaaaaagtttatataaagcaacattttcactttatattagcaagtcggactaaaaagtaaaggaacttgaacagttgaactatccaaaaatatgataagccacgaataaagttgaaaaaacttttaaaattccctccttattttcattttaattgaatttaatctttaattgtggattgggaatattcgaagcttatgggatcgtttgcggcaattacgtacattggctcgaatgcgaaatacctcggactctttctctcttgcactgtttcttcaattgtttatcagaggataatgtgtatatattgctgtctcggtcacacactcgcgaggatcgattcgcgtcggggtcaccaaacaaacaagcaacaaaaacaagacacggcgacgtcactcgcggcgtcactgagtctgccgcaacagcatgcaacagctgccaattctcagtctcaggtttggcttcagtctatccgattcgatgcgatacgataattcgatacgagatactctagatttggctcgaatgcgaaatacctcggactctttctctcttgcactgtttcttcaattgtttatcagaggataatgtgtatatattgctgtctcggtcacacactcgcgaggatcgattcgcgtcggggtcaccaaacaaacaagcaacaaaaacaagacacggcgacgtcactcgcggcgtcactgagtctgccgcaacagcatgcaacagctgccaattctcagtctcaggtttggcttcagtctatccgattcgatgcgatacgataattcgatacgagatactctagattcttctgaaaaaaaaggtaggggaattcttcaatcccaaagccgattctccgggctgcgttgccactcggtcaacggccagcgtgtttctgttcgccgcggcgacgtcctcgcgccaagtgcccccaaaaaggtcctgcaaagtctcgtttcctctcgtttggttccgattcgtttcgtttcgattctctcgtcctggcgcactgaatattcaaaggaggctggtgctccttccttgtcgcaccactcccactctcgttctctatttcgctcactctcgcactctcaaacaacagagtgtaactgaaaaaaaaaatacaacaacgaaggcccgacgcgcacttcggttgaattcgatttcgtaccgcctcgaaaacgcctcggaatcgcttcgaaatcgctcgcttgcgccgctcaatgttgttcacctggcaaacgctcggtcgaaactgtttgcgtttgctttgctttgcttttggtttgccagagagagggcaacatttgatgatgctgcttggcaacattttagctgccgcaacattgatgcagactgaatgtcacaagatgatgctggaaattctcgaaagaaagttcatttaactcttattcaaaaatattaaattacatgtatattctattagtttatttttaatgtgtaatgcatttctaacttattcttaagccaaaaataattaaaaacctattttcgctgtttaaaaactaagatagcaacttcaaagagatcaatttgttttacgaataatgctcttttttttaaatgtactttgtaaatttcgattattccaagatccaatgttgctggatgctggtcgtgttgctgggagcagtctgcaacatttgttgctggctctctcagcgcgactgtcatcatgttgccttcgattctcagagtgttgataagggactcaataaatatgtcagaaatatgagatctatgaactctcaatctaggaaagcagctttatctatcgtttaaattatttaatgttcttatttaccataaatatacttcttcattaacattctattagtacaattatttctcagtagacgtatccttcaaagatatgttgtttttgtgacgaaaaagtcattataagataaatatgtatatacttaaatttaaacctactttcccttttaaatattttgcacacgaaatcttatggaaaataaacctatcttactcgatttcaggtcgcaccttcctcacaacaaagaccccgatctcaaaacttccgctgtcatgattccgtttcaaaaaaccactcattcaccaatgctaatcgcagacggaggagatatacatacatatgtatgtatttatacatacg

SEQ ID NO: 22121 - DNA, 4630 bp, DROSOPHILA
gaattcaaccgaagtgcgcgtcgggccttcgttgttgtattttttttttcagttacactctgttgtttgagagtgcgagaaatctagagtatctcgtatcgaattatcgtatcgcatcgaatcggatagactgaagccaaacctgagactgagaattggcagctgttgcatgctgttgcggcagactcagtgacgccgcgagtgacgtcgccgtgtcttgtttttgttgcttgtttgtttggtgaccccgacgcgaatcgatcctcgcgagtgtgtgaccgagacagcaatatatacacattatcctctgataaacaattgaagaaacagtgcaagagagaaagagtccgaggtatttcgcattcgagccaaatctagagtatctcgtatcgaattatcgtatcgcatcgaatcggatagactgaagccaaacctgagactgagaattggcagctgttgcatgctgttgcggcagactcagtgacgccgcgagtgacgtcgccgtgtcttgtttttgttgcttgtttgtttggtgaccccgacgcgaatcgatcctcgcgagtgtgtgaccgagacagcaatatatacacattatcctctgataaacaattgaagaaacagtgcaagagagaaagagtccgaggtatttcgcattcgagccaatggtcagagcgacagggacaaggatgggcctgctcctgcccataatcctggcactggccatcggatcctcggccgccggcatatcctccaacgatccctgctacttcgagggcaagccgcgcaagtgcctgccaagctttgtgaatgccgcctatgggaatcccgttcaggcatccagcgtttgtggcgcccaacagccggagcgttactgcgaactgttgcgcgacggaaatgccggcgagtgtcgttcatgcgaacagcagcggtacggtccggcggcattaaccgatctaaataatcccagtaatgtgacctgctggcgatcgggtgccgttaatgtgccccacgatccggacagtgcgccgccggataatgtgaccctaaccttgtcgctgggcaagaagtacgagctgacctatatatcgttgtcattttgtccccgctcgccgcgtcccgattcgctggccatattcaagagctcggattttggacagacctggcaacccttccagttctatagctcacagtgtcaaaagttctatggacgaccggatcgcgctaagatctccaagtttaatgagcaggaggccagatgcatcaattcgcaacatgacacgggcggagctgctcagcgatttgccttcaatacattggagggtcgtccgtcggccaatgatctggattcctcgctggtcctgcaggattgggtgacggccacggatataagagttgtattccatcgccttgaattgccaccacaattgttgaaggtgaaaaatgcaaatgcctttagcgatgagatgggcggcagtcgcgaggaggatgaggatgatgatgcggatctggaactggatggcgagcaggatgagtacgactacaatctgcaggacaacgacagtgccgatgctgggtacgatgagtacgaggagcccaagaagcatttggaactggatgatgatcatctgcatttggactatgccagtgatggtgaatcggttgtaaagaggcagggcaagcacaagggtagcgcctatgagaagcactaccagagcaaactggcggccaccacgcccccacaacagccgcccaaggtgacgccacctggcaaggtcacgccccctagcacagctgccccttctgccgctgcctccgcggtgaccttgcccatttcgcagcattacgccgtatcggattttgccgtcggcggacgatgcaagtgcaatggtcacgcctccgagtgtgtggccaccgtcagttcgggatcaggaacggcactttcggatcaggacgatggccaggacgaggacacgccgtccgccccctcgctggccaaccactttggtcgcagtacccagatgagcgccaaactgaccatgacctgcgcctgcaagcacaacaccgccggaccggaatgcgaacgctgcaaacccttctacttcgatcgaccctggggcagggccaccgacaatgatgccaacgaatgcaaaatgtgccagtgcaacggacacgcccgtcgctgccgcttcaatctggagctgtacaaactatctggacgggtttcgggaggtgtatgctacaactgccagcacgatactaccggaagatactgccactattgccgcgagggatattatcgggatgccactaagccgccaaatcatcgcaaagtctgcaagcgttgcgattgccatccagtgggctcgacgggcaagacgtgcaatcacctgagtggccagtgtccctgcaaggagggcgtcaccggactaacttgcaaccgatgtgcccgaggctatcagcagacccgctcccacgtggcaccctgcatcaaggtgcccactaatgcgaacatgattcaggccgagagtgctggcggcggtggaggaggtggcactggtgattacaaggatggcggtggctcccaggtcgaggagatgaaaaagtactgcggcaagtgcaaggcgagtcccaagaagctcaatctcaacaagttttgcatggaagattatgcaattttggccaaggtgattggccacgatcgcgcctcccaggacatcagcacggaaaagttctcgatagagcgacagaacgagatctacaagtacgagatcaatatccagacgatcttcaagcggaatcccatgtcgggcactacgagttccttgctcggtaggggcaatatgatgctgctggtgccgcgcaagagcatcgagtgccagtgtccaaagataaagctaaacaaatcatatctcatccttggacgtgactcggaggcggcgcctggttacttggccatcggaccgagctcggtggtccttgaatggaaggacgagtggtcgcttcgcatgaagcggttccagcggcgggcacgcaaatgcagttgaatcgaaccggaaacggaatatgtcagagcggatttcaatttcacacacttggctaggtatcggtttttgtataaattgtacagtttactcaagtttctgaccttcttcggcatcatgctataaattaatcagccacggcgatttcccaaccggaagtggccctcaagccccatagcccgtctatataatctcaattcctacccagataatctccatccggggcggtctctagtctataaagcgcttttacataacatcagcaaacaaacaagccatccaacaatcggaaaacaagcgaaaacacaacgtacatcgtattaaccccgccctttttatgaaacaccaaatgctaattacagttacgtgccaatgggtgggccagttggcgtatgggcatgtgggcgtggccgcgtgtccttaacggttatgtgccggtcataaaaaacagttataaattgaaaataagtgcgaaaaagagcggtaacatcgcgtgtcgcgattctagacaagcaaacaaactgaattttgggtggcaaatgaacgggcaatgcaaccggatggggtgatgatggacaaacaggccgcgtcgacacataagtgcagtcatgaaccatcaacacgactctcgaccatctgccacacacttctcaatactgggggaactcggccaaaatatgatcgccaagtgaaatttatttaaatcatattctatacatcaaattacacttttgttttttttttaatcagatgaaacttacaaaagagcaaaacaagttctcagccgttctcagtttctactgactatacatttttacatcaatttataaaggtaacacaacttttcaataggcattcatttaattttcaaatcaataaaaacttaggaaaccttaaaattgaatcgaatgattttattttcaaactaatcactgccaagcaactcaaatcttttatgatggaaaaccgaagacaaaaattagtaatcattgtgcatctgcttcgatgtcattaataattagtatcaaaaattaggcatcattgtctgagatttcaatgtcataattttcaaagggttttaattaaatattttttaacttttatattttgaatacccctcacaatgcttcgctctgccatccaatcgaaaaattgattcaattttccatatgtaccaaatttctatttaaatatttaccattttgtttcgtagtccagcagttttcatgtgcacttatttattttactctagcaaagaatatttttgtgttttatccatctgtctgtttctttgggatatatttacacaacttacgcaaaagcattgcgattgaaaaattgcaatattttcttccaatttataacaaatatttgtggacttcagctgcaagggtatttaaattcaggtttcgagtttcaattggtatcatttctggttttcctgcatttcatgtgcgagcagaaaaacgcctctcaagaatttatgcaaacagttttggccgataattatgcacatgtttattgactatctgctagttgatttttcacgcgcttttgcataccaatttgtttgatggatgcatcaataa

SEQ ID NO: 22122 - protein, 793 aa, DROSOPHILA
MVRATGTRMGLLLPIILALAIGSSAAGISSNDPCYFEGKPRKCLPSFVNAAYGNPVQASSVCGAQQPERYCELLRDGNAGECRSCEQQRYGPAALTDLNNPSNVTCWRSGAVNVPHDPDSAPPDNVTLTLSLGKKYELTYISLSFCPRSPRPDSLAIFKSSDFGQTWQPFQFYSSQCQKFYGRPDRAKISKFNEQEARCINSQHDTGGAAQRFAFNTLEGRPSANDLDSSLVLQDWVTATDIRVVFHRLELPPQLLKVKNANAFSDEMGGSREEDEDDDADLELDGEQDEYDYNLQDNDSADAGYDEYEEPKKHLELDDDHLHLDYASDGESVVKRQGKHKGSAYEKHYQSKLAATTPPQQPPKVTPPGKVTPPSTAAPSAAASAVTLPISQHYAVSDFAVGGRCKCNGHASECVATVSSGSGTALSDQDDGQDEDTPSAPSLANHFGRSTQMSAKLTMTCACKHNTAGPECERCKPFYFDRPWGRATDNDANECKMCQCNGHARRCRFNLELYKLSGRVSGGVCYNCQHDTTGRYCHYCREGYYRDATKPPNHRKVCKRCDCHPVGSTGKTCNHLSGQCPCKEGVTGLTCNRCARGYQQTRSHVAPCIKVPTNANMIQAESAGGGGGGGTGDYKDGGGSQVEEMKKYCGKCKASPKKLNLNKFCMEDYAILAKVIGHDRASQDISTEKFSIERQNEIYKYEINIQTIFKRNPMSGTTSSLLGRGNMMLLVPRKSIECQCPKIKLNKSYLILGRDSEAAPGYLAIGPSSVVLEWKDEWSLRMKRFQRRARKCS

SEQ ID NO: 22123 - DNA, 5806 bp, DROSOPHILA
attcgaacctattaagcaaattgtgtgcgaatattgattctggatttttcaagttttccacggcgaatgtcggggccgcaacgtaatcgaaggtcggggaccatgaaatagttttccaactagtacgcctgtaaatagaaatatgattccaaaaaatgttatctttcaacaattaacgcattgcattacttgttttagtatatacatatgtatatatgtgcatattttactcttgagataacaaaaatgtttgtctacttatcacgtactcaccgtatctacatcaaaatgctgataaaagctattaagcgatagtctagtaaaataatctagtcttgaagggataataattaatttttcacagtaacatcaaaaaaattattaataatattaaaaattatttgcttacagctttcaaagccaaaatcaaaaaatttttccaaaaatacaatacttttggcagttttaccccacactcaattcccaaattgtttaagttcaaattaacataaatacgtactcatgggtgcaccaacatatgtacgtatgtcaggttatcaggtattcccatcaccacactgctaccgttgataagcccggcgcccagtgcacccagtgtctggctactgggagaatgggaaagctctggcaattatcacccactgccttcagagagagtcttttggccaacgtgcccgacggacgatgctcagtgtccgtactgttgacgaaccagttagacgggcagttggcattgcttttggggcgttgataagtgcgcacctcaagtcacccacctcgacggatggttgttgttgttgtgcgtgcaatgaaataaaaataacatcgcgggtctgaaataagaaaaacactctcgataaggcaaggcaacgcaaaacagttgcgctgcacacttcggaccgggcacaacgccaattcacagccaatccgtttagagccaatcgccgcagtgagctcactccggcggaatcccagcgccatgcccgataacagcaataaatttagcgcctccagcgatgtccgcattccggcctggatcaatgaggcctacttcaagcgactgctcaagcgggagtttcgggagttccggcgcatcctcaacctctcgatcattccagccacgccgcccggagaaacctatacatcgctgctgatgcgcatcgtcatcgacatcgagttgaaaggtgagaaaaaagggcgcagttcggtacacaatcgttaagagccattacgcatacgcactgttgccattttaaaaaagcaataaacaatagctattaccttatatttttttaaatcagaaaaaccatagccaaattacaaaaattaattcctatttagtaattaaaacaaatttgattcaaatcaacttgagtgctttctatatataatactatttatatcaaacaatataacaactattcgatttatcgatcgttcgatagatggattctcacagcaaaagtcctacatagtaaagaccatgctggacgacgcccagggaaatggtggattcgtgaataccctcaacatttttccaaaggagaagatgatgtacgaaacgattatacctaatttggaacagctttacgaagaagctgggctgagtgtaaagtttgcaccaaagtgccaccatgcggaggatatcaaaggaaggatctgcctggttcaggaggatttgcaaacgaaaaagtaccgaaatataaatcgcctcaagggcttcgacatggcccacatgcatcgagtgctagaaaagctggcggaattccatgcagcaggtgccgtttggcgtcagcgaaaaggaccgtttcccgatgattttcagaggatttacctacccgccaactatcagaaatcgaaatcgtatcaggcgaggctccagagctataaaactgcaatagccagttggggtctggccgatcacgaacagtatgtgagtcgcattgtaagttaaacaatctaataaatatcttaacattcaataacatcgatttgatgatgtattcaagcccacggccgatcaatttgtgcaatcctacgccagctgctttaacaacaatccgcaggagtttaaagttctaaatcacggtgatttttggtccagcaacataatgctaagctatactcaaactggtgatatcaaccaggtgcgtttcgtggacttccaactgtgcaagtggggtagtccggctcaggatctttgggaactcatcatatgttcggcacggcatagtatacgaatacaatactttgactacttcatcaggatataccacacacacctagtgcgctgcctaaagatcctaaaatacagcgaacgaataccaatgctaagggagctgcatatgagcatgatcaagtatggattttggggtaagaatttaactagacgatcactatatataaatgatacaaaactcttttatcaggctactttaccaccttcacgcaccttgtgttcattttgctgccaccggatacggaagctagcttggtgaagcttacgcagccgggagaggaaggagatcgcttccggtccaaggtgtacacaaatccactctacgtccgctctgcgctcagcatattcccctttctacttcggcgtggtattctagacttttgaagcggttcaagtcattactgttaaaaccgaaattaagtatatgaatttgtattaaagactaaaaatgtatacaagtagatcgatatatatatatattttacatactttatcccgtttggactgtaacttcttttacatcataatttaatatgttttcaactatcaaaacaaatatagtaaacagcatagtttcagcagataaacaaatctatttgtttattgaaataattttctgaagttgataacttgtagaaaatgtgctaatgcatttctgaagttctgaagaaaatcctctaactggcatagaatatgtataaatctatagaatatagaatatatacctatagaataaatacattagataaatgccaagtcattaaagcttatcacaacagttgcctgtattcagatcacattttatttgttccccaaggaaaacagtaaaacatcactaacaagtacgttaaatatatatgtatctctgtttttccacttttatttgttgttatcgggcacaagttccacactgctcaataaaccggtttcattgccgccatagattccacatgtacatataaataatattatatatacataaatcagctgataagccagcgcaaagctaacaacagagagagctttacagaagctctatctttctcccagcccgtcacatgttttgccccacattcttgattcgatagcccccagcgtaagttgctactcagctctctgttatttttattcggtgcggtcaggtgacttgagaaaaaaagaagaaaatacaatgggaaccggcagcaagaactaccaggctccggaatggctcaccgccgaattcctgcaggatgtgctgaaggaacacttcaaggaagagcagctggcagtcaccgagttgatagtaaagagcgcccaagtgggcgaccaggcggcgggatttgccagcgaaatgcatcgggccagtttcaatcttcagaggggcactgcacccaaaggcaagttttcagtgattgtgaaggatcatcccaagggacaaacaggtgctgtggcccacaggagtaagctcttcaagcgtgagattctggcttacaaggaggtgcttccacgtattcaagccttgctccaatccattggagatcaaacgaaaattgcacctacgtgctactacaccacggaatcgccggagccattcctgattctggaggacatgcagctgtccggcttcgagaacttcgaacgcggtcgactgctgaatctggactacgtactgcccaccatcgagaaggtcgccaagctgcacgcttgcagcgcccttatcgcccaggatagccccgaggtgctggagttcttcgacgaggcgcccatttcgaggaatccggaccgtcgtgacttcctcaccttcttccccgtcaacattcgctgcgtggccgaggaagtggctcactggaagggctacgaggagatcaccgagaagatgttcaacctggccgagaatgtcctgcaaagagcgctgaccatgtttgagagcacaggcaaggatttccgggtcttcaacctcaccgatctgtggatcaacaatctcttgttccacatcaacaacgagaccaaggagccagacgatgtggtcacagtatgtcattcatagacgagaatccattcgaaatccacgttaatttatctcttcgttcactagttggactttcagttggcctatgtgggatccccaaccattgatctcaattacttcctctacggatccttgaacgagaatgttcgtaaggtccactataagtacattgtgagggaataccagagagtgcttcagcagaccctggagaagctaaactaccagggacacattccaactcttaaagaaatccacatcgagttgatcaagaccagtcttatgggtatgatcatcatcaccatttatctatattggttttcataatgactccaccattataggtgtcattggcgccacttgcctgactccactgatcttcagggagggagctggtttcgaaaaccttgaggatctgaactcacgcactgagagcggtgatcgtttccgccgggaaaatgttgaaaaccccaagtatcgggctttccttcagcgaactattaaagaattcgagctatctggattcttggatgaatagtgacaaagggctaatgaagattgcgttacattcgatcaaaagtattcgggcttccacatacagtaagctttccagacaaatattccatgagtattttacacccaaattaaaaaaaaagaaaaatttaatttgatgatacgttttgttatttaatttaaagcaaaaggaaaccctaaaaaattacatggttcatatagttgcgatcaattagccatgcaatatatacacattttaactgatagctttaaaaatagatcaaagatcgttaaagtatcccatttcctcatatttacccaaaagctttttgacatcttgaacataagggtcatagaggtatgatttttgtctgatttccggatcttgaattaactcgtgtattttaaacgtattcgctttaacggccacaatcattggcgaaaaagtggttaaaaggaagaagtctgtaaaaatattgaagtggttaggcttattgaaactaggcgataaataaaataggcacttaccataaaacttgtgtcggtgtatttgcttccacagaccatcattggtcggcatcttgcccttgtagccaactttttttaacgtgtcctccaaaaccgaaaaataaaagttaataagatcctttccgagatcccatcgctgctctggctccatgagcatgtacacagaataactcaaatcgattgtaatgggacacaggttacagatttggaaatctacaaacatgacctcctcatttttattgaacatcatatttcggccatgaaaatctccgtgacacatcacgtagtatccatcggattgaacgttcttgcgatattcctgcattacatcacccatacgctgtatgtagttctcttttattttctcaaagtgtggcttgtactttgtaagttcaggaatctggtccatcattttcaaaaagttgtccattccagtagtaaccattggatccgacataatagaaggcatttccattagcccatacttgaagtctttc

SEQ ID NO: 22124 - DNA, 2529 bp, DROSOPHILA
atgcccgataacagcaataaatttagcgcctccagcgatgtccgcattccggcctggatcaatgaggcctacttcaagcgactgctcaagcgggagtttcgggagttccggcgcatcctcaacctctcgatcattccagccacgccgcccggagaaacctatacatcgctgctgatgcgcatcgtcatcgacatcgagttgaaagatggattctcacagcaaaagtcctacatagtaaagaccatgctggacgacgcccagggaaatggtggattcgtgaataccctcaacatttttccaaaggagaagatgatgtacgaaacgattatacctaatttggaacagctttacgaagaagctgggctgagtgtaaagtttgcaccaaagtgccaccatgcggaggatatcaaaggaaggatctgcctggttcaggaggatttgcaaacgaaaaagtaccgaaatataaatcgcctcaagggcttcgacatggcccacatgcatcgagtgctagaaaagctggcggaattccatgcagcaggtgccgtttggcgtcagcgaaaaggaccgtttcccgatgattttcagaggatttacctacccgccaactatcagaaatcgaaatcgtatcaggcgaggctccagagctataaaactgcaatagccagttggggtctggccgatcacgaacagtatgtgagtcgcattcccacggccgatcaatttgtgcaatcctacgccagctgctttaacaacaatccgcaggagtttaaagttctaaatcacggtgatttttggtccagcaacataatgctaagctatactcaaactggtgatatcaaccaggtgcgtttcgtggacttccaactgtgcaagtggggtagtccggctcaggatctttgggaactcatcatatgttcggcacggcatagtatacgaatacaatactttgactacttcatcaggatataccacacacacctagtgcgctgcctaaagatcctaaaatacagcgaacgaataccaatgctaagggagctgcatatgagcatgatcaagtatggattttggggctactttaccaccttcacgcaccttgtgttcattttgctgccaccggatacggaagctagcttggtgaagcttacgcagccgggagaggaaggagatcgcttccggtccaaggtgtacacaaatccactctacgtccgctctgcgctcagcatattcccctttctacttcggcgtggtgacttgagaaaaaaagaagaaaatacaatgggaaccggcagcaagaactaccaggctccggaatggctcaccgccgaattcctgcaggatgtgctgaaggaacacttcaaggaagagcagctggcagtcaccgagttgatagtaaagagcgcccaagtgggcgaccaggcggcgggatttgccagcgaaatgcatcgggccagtttcaatcttcagaggggcactgcacccaaaggcaagttttcagtgattgtgaaggatcatcccaagggacaaacaggtgctgtggcccacaggagtaagctcttcaagcgtgagattctggcttacaaggaggtgcttccacgtattcaagccttgctccaatccattggagatcaaacgaaaattgcacctacgtgctactacaccacggaatcgccggagccattcctgattctggaggacatgcagctgtccggcttcgagaacttcgaacgcggtcgactgctgaatctggactacgtactgcccaccatcgagaaggtcgccaagctgcacgcttgcagcgcccttatcgcccaggatagccccgaggtgctggagttcttcgacgaggcgcccatttcgaggaatccggaccgtcgtgacttcctcaccttcttccccgtcaacattcgctgcgtggccgaggaagtggctcactggaagggctacgaggagatcaccgagaagatgttcaacctggccgagaatgtcctgcaaagagcgctgaccatgtttgagagcacaggcaaggatttccgggtcttcaacctcaccgatctgtggatcaacaatctcttgttccacatcaacaacgagaccaaggagccagacgatgtggtcacattggactttcagttggcctatgtgggatccccaaccattgatctcaattacttcctctacggatccttgaacgagaatgttcgtaaggtccactataagtacattgtgagggaataccagagagtgcttcagcagaccctggagaagctaaactaccagggacacattccaactcttaaagaaatccacatcgagttgatcaagaccagtcttatgggtgtcattggcgccacttgcctgactccactgatcttcagggagggagctggtttcgaaaaccttgaggatctgaactcacgcactgagagcggtgatcgtttccgccgggaaaatgttgaaaaccccaagtatcgggctttccttcagcgaactattaaagaattcgagctatctggattcttggatgaatag

SEQ ID NO: 22125 - protein, 842 aa, DROSOPHILA
MPDNSNKFSASSDVRIPAWINEAYFKRLLKREFREFRRILNLSIIPATPPGETYTSLLMRIVIDIELKDGFSQQKSYIVKTMLDDAQGNGGFVNTLNIFPKEKMMYETIIPNLEQLYEEAGLSVKFAPKCHHAEDIKGRICLVQEDLQTKKYRNINRLKGFDMAHMHRVLEKLAEFHAAGAVWRQRKGPFPDDFQRIYLPANYQKSKSYQARLQSYKTAIASWGLADHEQYVSRIPTADQFVQSYASCFNNNPQEFKVLNHGDFWSSNIMLSYTQTGDINQVRFVDFQLCKWGSPAQDLWELIICSARHSIRIQYFDYFIRIYHTHLVRCLKILKYSERIPMLRELHMSMIKYGFWGYFTTFTHLVFILLPPDTEASLVKLTQPGEEGDRFRSKVYTNPLYVRSALSIFPFLLRRGDLRKKEENTMGTGSKNYQAPEWLTAEFLQDVLKEHFKEEQLAVTELIVKSAQVGDQAAGFASEMHRASFNLQRGTAPKGKFSVIVKDHPKGQTGAVAHRSKLFKREILAYKEVLPRIQALLQSIGDQTKIAPTCYYTTESPEPFLILEDMQLSGFENFERGRLLNLDYVLPTIEKVAKLHACSALIAQDSPEVLEFFDEAPISRNPDRRDFLTFFPVNIRCVAEEVAHWKGYEEITEKMFNLAENVLQRALTMFESTGKDFRVFNLTDLWINNLLFHINNETKEPDDVVTLDFQLAYVGSPTIDLNYFLYGSLNENVRKVHYKYIVREYQRVLQQTLEKLNYQGHIPTLKEIHIELIKTSLMGVIGATCLTPLIFREGAGFENLEDLNSRTESGDRFRRENVENPKYRAFLQRTIKEFELSGFLDE

SEQ ID NO: 22126 - DNA, 8786 bp, DROSOPHILA
agaaccctgatgcaagtggaacttgcgttaacttggatatataaatatgataaatagcctgcatatgtaatatattatatgcttatatctaacctttaaatgtttaaatatcgcaactatcatataatatatatgaatacattcatatataaatatataaatatataaatatataaatatataaatatataaatatataaatatataaatatataaatatataaatatataaatatataaatatataaatatataaatatataaatatataaatatataaatatataaatatataaatatatccatatataaatatataaatatataaatatataaatatataaatatataaatatataaatatataaatatataaatatataaatatataaatatataaatatataaatatataaatatataaatatataaatatataaatatataaatatataaatatataaaagttaagaaccctcttcttgcgctcttcgtcaggactcaccagcgctcggctctcgtgttttcgggccccgtcagcaggcgactcggggcctgtctagtaacatggttcgtgtaagttacgaaccctcttcttgcgatcttcgtcaggactcaccagcgctcggctctcgtgttttcgggccccgtcagcaggcgactcggggcctgtctaggaacatggtttggggtatgtgggcattcggaacaaggtgccggtggtcgcactcagggtgagggggcaacgggggaagcgggatataaaagcagcggggcgggagaagaggccccagtgtcgaacggacacataacggaaccgctagcagatcgcgaactgaatcttaaaataaagctaatcgtaaactcgaaccctcttaactatcttgactattatttggagaaccacagcatgttggttgtcatatcaaggtgaggtatgcggcagcgagtgccgagaaccctgatgcaagtggaacttgcgttaacttatatcacttattcagaggactgaatgtccgtctttgaggaaattaattaaataaaaaccacttaataacgttaattaagaactcaatcgataagattagaagctagtcatatcgggggagagatccaaccacttaccgtgcttctcctttcccccctgctgctgttgttgtggatagcttgtgctactatcccagtctgacttctccttatccttatccttactattacttgatgtagctgttactgttgcggttgctgtggcagcgctatcgacttggttgttgccgctatttttaccaccgtgccgcgttccattgttgtgctcattatcagcagcgtcgcccttgttgcgatgcttatccttgtccatgctgcgtcgatggttccttgaaccaccagcgtgaccattggaggttgctaaatgagtataataatagatagttaaatgcatgctatttatacacgtcgatatacaacataattgtgttttttattgattcgtgatggaatcgattcagagggcataactattcgttggggcctgctattagcaatcgaaattagattggcattacataatgatatgaagaggtttcaatttgtaagggctgagaactgccgactgtggttgctgtgggttagataccgcgaggaagcctcgccggaggttactatatggatgggttcatggattacatgcgcatacacaaacaaacaaatgtgtctggtacaaattagtgggttctgatctgctgttgtgagggacagcaggaagcagttgaattcattattaccaccacaacaaccgtcagcatcgacaccttcggaagtagaggaggaagaacgggcagaagaagtagccgggtatgctgtcgccaccgactgatgttgctgctgctgtgtcgccagacttgcagccaaagcagagaaatctgagacgggagtggaagaagtggttgctgcacctgttgtggccgcggatgccgcagatgacgacgactgcttgcccgtcgacgccgaagacgacgatgagccggatgtcgtggacgctgatgacgcagacgcagctgctgctaatgctgctcctgttgctgaagacgctgtaatggacgacgcggcggcgcccgatgcactctcgctcgtactgttgtccttggcgccgccactgctactgttgctattgtggttgctgccgctgttgccactactgttgttatgatggtggtgatggtgatgattactattgctcgagctgctgctgctggcgccggcgccgccgctgtgatgatgctcatgatggttttgtgcttgcgtggcagtggccaaaacaccgttcgccgcagttgctcctgatgaagcgaccaaggccggcgtagttgcagacccgttggccacgacaacggtgctggatgtggctgcctgccccgcagccgcctcctcggccgcctcctccgcgggcagagcctgctgcagaagctgcatatagaactcgttgtccttggctacctcgcgctgcttgcgctggcgcatgcggtagcccacgtagcttttaaagccaaatccaagcgtgacaaccggatagccaatgctgaaagcgaacatgattggttacaagtaggttcagctttagtctagtccacacatcgattcttaccaatgcgctgcgaacggccggcagagatccaagtgcggcatgtggcgactgtccttccatcttatgcccacctccaggtagacaaataacatccagagtattatagtcggcaaacagatacccttatctgtaagaaaacggacaataaagttaggagaggatgtccatagaatctccccactgccactacggatgacgcacctgtgtgccagacgtactgcacccacacataagtgctcgctgcaaagagcagccagtgaacgggtatgaagaataaacagaccagatccgacgttatcgctatgcacacgaacagtacggagaatgcctgcaaatgaaattggaccgtatagagttacaatcactttggccatcctcatgccacttaccagtcccttgtacttgaaggaatcgtgcacggagcgaaggagcagccagaatggccacaagaactcaaagcggaacataaacatgaagtcggcaaccatgacgatggcccataggatcaaaaacttcatgtacagaactgttgtgctgcaagaaaggaaaaacaaaagaattgaagcaaaaactcacatcaatataatttgcactaatattaaccaagtattacagttccacttataaatttgttaacttaattagttgtgtgccaaaacagcaatctccattaataatcgacattctcagtttgtcacgcgtactggtttctcctcttgtcttctgtcccattaacaaatataaacaataaagggtcagctttaataacatgctattggaaccgaaatggaaaccagcctccatcaatcaggcagctaaaatgtttaatgagaatgggaatgaatggacagaatgaagaaatctggcgaaacagaagcgcgaagaggcgggtagaatgccaaaaaaaaaaaagcaagtggcgtccaaataatacatgcttaacaatataaaacaacactcgggcgcaatcaaatcaaaaagtaaacaaacgtataaataataaaaagtgagcgcacacatggggcacactctcggaattttttgttggtggttttttgctcttttgctcctcaaaaatctgataatcatcaagttgactggggggcagttcgcatgccaataaatcggaaagtatctttactgcctcaattgagaaatgtgaacaatttaattactgggctatcataaaatggtatcgtttttgaaagttaacagctatttaggaactgaatatcacatatgaacaattgcagctattttatgtgtcattttattctaagtaattgtttttaaaaacaagataagcgcatacattagaatcggttgtttatcccaaaaattctgtcgttctgctttcagaaatgacttttcaaactggctttagtttattttgatatgcagatcagtactatgattaatttacttaaataattgtttatataacatttataaacactcacctgccgtacattccctctgtgattttgttgcgcttgatcggccgccgaagttttccacaatctgcgttgcgtcgcttcatcctgaatgagcgccgtgtgtcctccgcccgaaatgctcgatgatgtccttcccagtcgtctgctgcccaagatcagttgtcccgctgctccctgaatatcctgactatcctgactataatgtatcctatatactgctatgtgctatgtatcgtttcgaacggagtgcttgctcttcacttgataatcagatgctgatgcggctcctggtatttccggaggcgatgtcggcgtggttttgtttgctggtgctggtggtgcctctgctgccggcgcgacggcatctcatttacatgtgatgcgtttggaaaacgttgttcgcctcctgctgagccggcttttcttcgcttttcacactgcaaacagatggcagaggagggagaaaaaaaacaaggggaagcggtggatgagtgagggcaaacatcgagagcaaagagcagagaaaacgtgagaaatcgcgaacgacccacccgatcccgttcccgatcccgatctcgtcttggcattgaattgtctgccgaaattgaaaaaatgtcactatactactcccatttgaaattatcgagcatcgtataataggtaaaagcaaaaatgttatttttagtcctgctattctgtcgattgcactttcgctttgttgcgaaaaacaaaaggcaccgagacagcactttagtatttaaaagatatccgaatttaaatgcccaaattatctattggcaaaaaatcggggatattgacgaagtaaaattcagcaaagtgctaattgactcatccatttgttatgctaatttagataatacaattattttgagctcgcatttcgcattgaaatttgcatttttcttgtaaatgcctgaaatattgtgaaattaaatgggtttagtaaagtgagtgtagcttctcaaaattgcacatatatggagatatgcatgagcttctgacgaattcgaaaagcgttaaaagttaaaagcacacctgtgggccagagaaaagtatgattatgtagcaatgtgtgcatcagatacgtgccaaataaggcgttctgataatcagtggaatccaagtagtgtagacaactttatattcgattaagatatatgcactaaacttaagaattgtttacatttaaaagtaattattaaaatcttcgcttcaggttattatagtaaaaacttgtcgaattgtaagtcatcattagctgatgaaaacaccaaaattattttcgaaaaggactcgaaaatcacaagtgcagacgaaaaacacgcacactcacttagcaacacaaacaaatcaatgcaacgtcgagttttccgagtgcgggataagtgtcttttggggtggacatggagtccgggaggcgataacgatgtggcgactacatctcaacatgtgaatgtgaatgctacccggtaaattttggtggaacgcgatacacactctctgttgcgccaataaaggatggatggatttgatggatgtggatggttggagctacgtgtatgtgacgatatggatttggaacggacatgacagtgcgactgcgccaactcaatcggaagcggaactatgcagatttcaaggaagcagagcagaatcagtggcctggcatccttgtgtgtatgtatacgggcgaaaaggtttataaatagcatccaaatgtggagcgcatccatcgcagtggccacatggcagcaaaagcaagagcaacagaagcagcagcagcacgagaggcacaggacgaggaagcttctcatctgccgatgacgtatgtgtggtgctgttgctcgattgtcctgttcctgtttccgtttgtgtttcgctttctaccgctcgtcctgcgaaatggacacctgaatcctcagcctgctcagtttttgcatcaatcctggctggcctatgcacgtatccgccattttgtaacgactgtctgcatgtagatgtaatgtagataaataccaattgggcctaatttgaatgccaattgagcatgaagtatgattacttgtaaggaatcaagatttatgcttaaaaacttcgtttatatgaaactagtttggagcattttgagcgagaataatataaatacaaataaatttcgcacataacttggcattgacttttaagctaaactcattctggagtgaatcaaactaaacagtcaccgagaattggcaagacttcggttttgagaaatcaaaagaacaagagtaaacaaagcattccgttgccaccaaatgattaggcctttatagatgtgatcgtgaatataacatttaaatgacccacagtttccaacggctcataaagtgcactgatttcgctctcgccagttttgtttctctcccccattgccccatcctcaaagagtgttctctctcttttatttaacactttcccaattgcatttcgttggccaaaacgagatcgcacactgacacactcccacgcacggtgcacacatgcacagatacggccacattgcgctcgtcgcatttagaaaagccacaaaaacaaaacgaaaaacgaaaaaggaagcaacgaaaacaacaacgtcagggcgacaagattcgacgcgcaacaaaaggctaaagaactttgataaaatgcggtaatttcgtggctgctttttgcataactcgagggaatttggcgataatgggcgctccagttttatcgtggtttgtttttatcgtggcagatggtcttatcagatgggcgtagcgactggatgataaataaggtgaataaataacgagacccattgatgccggttagcctgatcaccttggtttttttttccgaaaataggtagaataaaacaaaacatctgtgtgtgtgtgggggtatgcatgtttgtgcaggcagagagcagcaaaaacaaaaacaacaaaagggggaaaagtgaaaagttgcctccgtttgagctttcaaacagcatccacatgttagcccaggaagcatccttctgcctctatctctttctctcttcgaacttatttctttgccaggaagcatcctttttggcctctctggctgctctgccaacgtcgactgcggttacgtatgcgtatgtgtgtgtgtggtttgttggcggctggcacacgtacagggacacctatgtgtacacctatatatttctttttcacactcctcacctacacgaacacaccgatatacacagccaaaaagcactgcaaaattgcacacgtttctttcagtactttgggcatgcttttggcattttcattcgctcacaatttgccaccgattatttcactcgattttccactggctgtgttgctcaacttatttactttcgaacggatttttgatacaatttgcacatttccaacaactgcgctgtgtctgtgagagtgtgtatgttcctcggcctgcgtgttgctctatgtgtgtgcgtgtgcatggatggattcttgagcacccgaaaattttccctcttcacttagacaactcaggtgatgcttacactggattagcactgcatttttttacgcgtttccgtaaccgtcgtgcacacaattcccggtgatcagtatcgattaacttgcgttttgtatattttaacacgaaatcgaaactcgaacgcttcgaaattagagctgggccaaagtcgatgctgatgagatgctatcgatgctagctgtaattcgctgatatcgatattttcacgcaatcatcgaatgtttcgcaattttcgctaagctactttcatcgacaaaattatcggactacgcgcaaagatttagaaatatgaataatatctaaccactaacaaaatgcaaagcaacaaacaatcaaatctaaagttttttgttcagtaatttgcgcggctaaatctgattggacaccgacactatttcttcgtaaagtgtccttaaataaaccaatcgccgcaaggtgtagaaatttagtaaaatatgtaacatttctaaacttttgatctcctctcggatattatcaaatttaattgacttaatgttccttgctgcctgcctgaaaaaaattaattaacaacgaaaatatttaattaaatttgaacaataatttaatggcactggctgaaaacacaaaaaagacactttcaaaaataagatccttattgaccccgacgtgatttgaacacgcaaccttccgatctggagtcggacgcgctaccgttgcgccacggagtcagatgaggggagggatattaggtaccgttagtcaccaaatgatcatatcatcaagaagaagattcttactcaattctcagagcaaaattgagatcctgacgacgaaagcacaaaagtccggaagactccgaaaatcccttttgatctctgacaactaaaaaatgtaaaactatatccacaaattggtgttttaagcctaacaaatactaaaaaatctattttgcatcggccgggaatcgaacccgggccgcccgcgtggcaggcgagcattctaccactgaaccaccgatgcttatgactcttttgaaacaattctgctgaagattctacagaagtctcgttcttatgatcatttgggaactaagagtatctgatatccctcccctcatctgactccgtggcgcaacggta

SEQ ID NO: 22127 - DNA, 1976 bp, DROSOPHILA
ttcgagtttcgatttcgtgttaaaatatacaaaacgcaagttaatcgatactgatcaccgggaattgtgtgcacgacggttacggaaacgcgtaaaaaaatgcagtgctaatccagtttgtctacactacttggattccactgattatcagaacgccttatttggcacgtatctgatgcacacattgctacataatcatacttttctctggcccacagtgtgaaaagcgaagaaaagccggctcagcaggaggcgaacaacgttttccaaacgcatcacatgtaaatgagatgccgtcgcgccggcagcagaggcaccaccagcaccagcaaacaaaaccacgccgacatcgcctccggaaataccaggagccgcatcagcatctgattatcaagtgaagagcaagcactccgttcgaaacgatacatagcacatagcagtatataggatacattatagtcaggatagtcaggatattcagggagcagcgggacaactgatcttgggcagcagacgactgggaaggacatcatcgagcatttcgggcggaggacacacggcgctcattcaggatgaagcgacgcaacgcagattgtggaaaacttcggcggccgatcaagcgcaacaaaatcacagagggaatgtacggcagcacaacagttctgtacatgaagtttttgatcctatgggccatcgtcatggttgccgacttcatgtttatgttccgctttgagttcttgtggccattctggctgctccttcgctccgtgcacgattccttcaagtacaagggactggcattctccgtactgttcgtgtgcatagcgataacgtcggatctggtctgtttattcttcatacccgttcactggctgctctttgcagcgagcacttatgtgtgggtgcagtacgtctggcacacagataagggtatctgtttgccgactataatactctggatgttatttgtctacctggaggtgggcataagatggaaggacagtcgccacatgccgcacttggatctctgccggccgttcgcagcgcattgcattggctatccggttgtcacgcttggatttggctttaaaagctacgtgggctaccgcatgcgccagcgcaagcagcgcgaggtagccaaggacaacgagttctatatgcagcttctgcagcaggctctgcccgcggaggaggcggccgaggaggcggctgcggggcaggcagccacatccagcaccgttgtcgtggccaacgggtctgcaactacgccggccttggtcgcttcatcaggagcaactgcggcgaacggtgttttggccactgccacgcaagcacaaaaccatcatgagcatcatcacagcggcggcgccggcgccagcagcagcagctcgagcaatagtaatcatcaccatcaccaccatcataacaacagtagtggcaacagcggcagcaaccacaatagcaacagtagcagtggcggcgccaaggacaacagtacgagcgagagtgcatcgggcgccgccgcgtcgtccattacagcgtcttcagcaacaggagcagcattagcagcagctgcgtctgcgtcatcagcgtccacgacatccggctcatcgtcgtcttcggcgtcgacgggcaagcagtcgtcgtcatctgcggcatccgcggccacaacagcaacctccaatggtcacgctggtggttcaaggaaccatcgacgcagcatggacaaggataagcatcgcaacaagggcgacgctgctgataatgagcacaacaatggaacgcggcacggtggtaaaaatagcggcaacaaccaagtcgatagcgctgccacagcaaccgcaacagtaacagctacatcaagtaatagtaaggataaggataaggagaagtcagactgggatagtagcacaagctatccacaacaacagcagcaggggggaaaggagaagcacgacggacattcagtcctctga

SEQ ID NO: 22128 - protein, 435 aa, DROSOPHILA
MKFLILWAIVMVADFMFMFRFEFLWPFWLLLRSVHDSFKYKGLAFSVLFVCIAITSDLVCLFFIPVHWLLFAASTYVWVQYVWHTDKGICLPTIILWMLFVYLEVGIRWKDSRHMPHLDLCRPFAAHCIGYPVVTLGFGFKSYVGYRMRQRKQREVAKDNEFYMQLLQQALPAEEAAEEAAAGQAATSSTVVVANGSATTPALVASSGATAANGVLATATQAQNHHEHHHSGGAGASSSSSSNSNHHHHHHHNNSSGNSGSNHNSNSSSGGAKDNSTSESASGAAASSITASSATGAALAAAASASSASTTSGSSSSSASTGKQSSSSAASAATTATSNGHAGGSRNHRRSMDKDKHRNKGDAADNEHNNGTRHGGKNSGNNQVDSAATATATVTATSSNSKDKDKEKSDWDSSTSYPQQQQQGGKEKHDGHSVL

SEQ ID NO: 22129 - DNA, 2674 bp, DROSOPHILA
taagaaattaagatgttccttattgcataatcacctcacatccgtgcaggccaggcaaggaacattcttgatgttattcttgattagattcaatggagccgcaaaatccttctccccgccggagacatgctcagcacacttgaagaagaattcagcgaagggcggatcgccagccgcgttgtccacgcaggccacctccagactttcacaatgaccgggaattctacgcgacttcaagacatcatcccaacactccggatcacgatggacagtaaaggcgccgcccttgcataaagcgcagcggacccgaagtttgccattacacagcttatcgcattggctgcaatgtacaaagaaatgcgctttggcacggactctttctggagaggatacgacgggattacaaggggtttcgttaaaaaaaaaaaaaacaataaaaactaattgttgcctaccttcatcggttatattcagacgctcctcgctttccagctgcaagtccaacagagtttcatttagaggcttggaggcttcatcgctaagcgaaggttcctcctcctccaaagtggccgactggattttctggcgctgcacgggcggtcgcaaacgaatggcatgcaaaacgctttgctgacccaagtcacattgctactagaagacagtaaaagttaacttcatgtagcggatacattaaagaaacttcttacctctattgtcgtggcatcgcttagttccttaccggcaaatatgatctttagatcatccggctgaagtcccaattgtggtgccaccagttcctttacgtttttaatatcccactggggctccagattaacggtcagcgttttgcccgtgttcgtttttacataaatactcagcgtgtgcgtaagggttttccctccaaattgcaacagctccagcattttgcgtacaaaagtggcaataaatttaaaaataaaactcatttgttatcagctgatcgggtttaattttagtgcagtgtatatgcttcagtgttgccaatcgttgtttacttacgcgttgccaaacaccagctggcagccattcggaggaaaacgtggacacgcagaaagcgcacaattgaaaacaatttttgtgaagaagtcggaggagtataaatgtaaaagttttatggaaatgtcaggactaacttacagagagatcaatggcgacctattcaaatgccaaagggattattccatgtgccactgcgtggctgccgatttgcgaatgggcagaggcatagctgtaaagtttcggtaggtaatggcttagtgtttttaataaaatggtaaatttgcctattttccagaaacaaatttggacagttgttgaatttgcagagacaaaatgttcagccaggcggcgtggctgtccttcaggaccagcagcgatttatttactatctgatcaccaagaaatccagctggggaaagcccacctacgaacttctccagagttccttgatcgccatgcgaaaacacatggtatgtttatgtatcttctataagaagttatgatatacgaatctttctaccatttgcagatctcccaccaagtacccaagctagccatgccccgcattggatgcggtttggatggcctaaactggcccaaagttaaggaaataatttgccaggtttttcaagcggattctgttgagctggtcgtttataattatgttgctatgaagtaaatggctcatattaaactaaacgatccattattttccctgtggaggcacaaaattgtagacaacaatctccagcggctcttggccaaaaacgtactcgaggactccgctgactttttcccattccaagccatcaattccgcagccaatttttgggatggccagcttattcacgttgtttttgcgctaatgtaggaataataaaatgtagctcttattaatataacttgtctaagctttatatatataataaataaaagcagggatacattccattcataaaagatatgtatcaggcatgtatttaccatatgctcacgcatctgctccaaagatgcttgtacagattcgtaggtgggctttccccagctctgaggcttggttactaggtagtaaatgtaccgctggtcatccttcagcaccgcaatatctccactgcccgcttgttgggcttgcagctcgtccaaccttccgaataccttcttgaactgcacggcaattccagcacccatcgcaagatctgcgcccacacagtgcgccaaggaataggtcttgggggcggaaaacagatccccatccacttcgcttagggtgtactgaggtttggatgacattccgactacaaaagctcgccgaaatgcgctacgtagttctagaagtttgggagaatacatttagtttaaataagggttttagatctgtctgacttagtgtaacaggcagctactagattaatttttggtcatacgataacactagataatggttcgtaagggtatatatatgtatttatcaaaactccaatctttggttaatatcctctcgaggacgtgttttatttattaatacattaaatacagtataaataaccaaatatggaaactttgtgtgctataaaaacctcttaggtgtatcgttcttatcaactatataagtatttggtgcatatgatgccacaag

SEQ ID NO: 22130 - DNA, 674 bp, DROSOPHILA
tgtatatgcttcagtgttgccaatcgttgtttacttacgcgttgccaaacaccagctggcagccattcggaggaaaacgtggacacgcagaaagcgcacaattgaaaacaatttttgtgaagaagtcggaggagtataaatgtaaaagttttatggaaatgtcaggactaacttacagagagatcaatggcgacctattcaaatgccaaagggattattccatgtgccactgcgtggctgccgatttgcgaatgggcagaggcatagctgtaaagtttcggtaggtaatggcttagtgtttttaataaaatggtaaatttgcctattttccagaaacaaatttggacagttgttgaatttgcagagacaaaatgttcagccaggcggcgtggctgtccttcaggaccagcagcgatttatttactatctgatcaccaagaaatccagctggggaaagcccacctacgaacttctccagagttccttgatcgccatgcgaaaacacatggtatgtttatgtatcttctataagaagttatgatatacgaatctttctaccatttgcagatctcccaccaagtacccaagctagccatgccccgcattggatgcggtttggatggcctaaactggcccaaagttaaggaaataatttgccaggtttttcaagcgga

SEQ ID NO: 22131 - protein, 92 aa, DROSOPHILA
MLQCCQSLFTYALPNTSWQPFGGKRGHAESAQLKTIFVKKSEEYKCKSFMEMSGLTYREINGDLFKCQRDYSMCHCVAADLRMGRGIAVKFR

SEQ ID NO: 22132 - DNA, 3865 bp, DROSOPHILA
ccagagtcctgcttgggggtttcccacgttcgctgtgtgaatgaggtatatgttgtgtataggctcgatttatcgatgtccgggccacgaatttccaccagcgtgcgaaaaaccatagcacactttctggcacactcgtggtgcactccgccaagggatgtttccgcttaagagcgtcccgcgaacctgtggcatttggccagcccaactttagatgaccgataagccgcaaggcagactgataaccaggcaggtgaactttcaggcgtctcgagtttccaagacggcttttctaagcggactaattgcaattcttgtagaagtttataaatttaaattagttattcaggggaatgcgtgtttcctatatataattgcctaaaatctattgatttacagatgtgtcctagggcggttgcacatatgaattataaaactgtattaaagtgaaatatttaattttacgtattaacggccaaaatttaagtttcagtttcttaataattttctcttttgtgttttctctctttagcaagaatagtagttagtacttttgaaaatccaggaacatttttgaaatgcctttaccatcccccaatcaattattagtccccttgcggctacgcgcctgggttgaaatcacatgaaccttgtgccgctgaccacccactgcgcattcgcggcactcgctctctggctgtttggccaaatgcacgtgtttgttgcggttttcgcatgcctggccgaagaggaaagccctcaaaatatttgtgggcgagcttaaaaaaaaacgtaaacaaagtttttgtgcgcacgcaacaaaggaacagagtggggtaggatgtgattcgcgttggtccttgtcaggggtgtttctgctattgattgcgtagacgacaaacagggtgttgttcgagcagtctttactatggtatacaatttaaaagtagtcaacaaacaaaaaggacccgtcgggccgacgtacaacgatgacgaaggattagccgaaccagtgggctcccatgcagtcgcgtgtccactcagtctggcagacccagcaccactcgaatccgcagccagcgcgtgtgcagaccatgtgcatgcaaccgcctggtaggaagagaagaagacggtatggatgtgttacaaactgcgtcttgggtgtcttcgatgctcgcccaactcaccatctcgctccgtgggggttctgcattttggacagggctttgtgctgactttgatggtgacattgctggcctcatcccatcgcgcctcggcagctcgctaaaaaagcacatgattacacaagcgggaatgggccgtataagagccaactcacatttgggtccacggtgtactcgcaggagtttgtggcactggcgcccgtcccctcgggcagacactccccgatatggtagccctgcagacaattgcggcagaacacgtatccacagccgttctggcatgtcaccttgcgacaatcgggctccaccaaaaggcccatgccgcatcctggctgggggcagagtactccacctgcctgtaggacatactcctcggtggcgaatctctggtaccgatcgtactcctcgcgtgtcaacagcttgaagtgatgaatctcctcgatgaacgagtgctcgcagcctgcgggacagggcaaggtgtagccgaagtccggatgcggcataaactgacgctcgcccaaacgggaacggcaataatggcggaagcagtcgatacaggtgacgtgctgcgatgcgcaggggaaaaccaacacggtatcactgcgaacataataaggtgattatagcagaataaaattatatgacaaataattactttaaagactttaaaagaactttttatgacattttcgatgatatgaaaattataagaaattaagatgttccttattgcataatcacctcacatccgtgcaggccaggcaaggaacattcttgatgttattcttgattagattcaatggagccgcaaaatccttctccccgccggagacatgctcagcacacttgaagaagaattcagcgaagggcggatcgccagccgcgttgtccacgcaggccacctccagactttcacaatgaccgggaattctacgcgacttcaagacatcatcccaacactccggatcacgatggacagtaaaggcgccgcccttgcataaagcgcagcggacccgaagtttgccattacacagcttatcgcattggctgcaatgtacaaagaaatgcgctttggcacggactctttctggagaggatacgacgggattacaaggggtttcgttaaaaaaaaaaaaaacaataaaaactaattgttgcctaccttcatcggttatattcagacgctcctcgctttccagctgcaagtccaacagagtttcatttagaggcttggaggcttcatcgctaagcgaaggttcctcctcctccaaagtggccgactggattttctggcgctgcacgggcggtcgcaaacgaatggcatgcaaaacgctttgctgacccaagtcacattgctactagaagacagtaaaagttaacttcatgtagcggatacattaaagaaacttcttacctctattgtcgtggcatcgcttagttccttaccggcaaatatgatctttagatcatccggctgaagtcccaattgtggtgccaccagttcctttacgtttttaatatcccactggggctccagattaacggtcagcgttttgcccgtgttcgtttttacataaatactcagcgtgtgcgtaagggttttccctccaaattgcaacagctccagcattttgcgtacaaaagtggcaataaatttaaaaataaaactcatttgttatcagctgatcgggtttaattttagtgcagtgtatatgcttcagtgttgccaatcgttgtttacttacgcgttgccaaacaccagctggcagccattcggaggaaaacgtggacacgcagaaagcgcacaattgaaaacaatttttgtgaagaagtcggaggagtataaatgtaaaagttttatggaaatgtcaggactaacttacagagagatcaatggcgacctattcaaatgccaaagggattattccatgtgccactgcgtggctgccgatttgcgaatgggcagaggcatagctgtaaagtttcggtaggtaatggcttagtgtttttaataaaatggtaaatttgcctattttccagaaacaaatttggacagttgttgaatttgcagagacaaaatgttcagccaggcggcgtggctgtccttcaggaccagcagcgatttatttactatctgatcaccaagaaatccagctggggaaagcccacctacgaacttctccagagttccttgatcgccatgcgaaaacacatggtatgtttatgtatcttctataagaagttatgatatacgaatctttctaccatttgcagatctcccaccaagtacccaagctagccatgccccgcattggatgcggtttggatggcctaaactggcccaaagttaaggaaataatttgccaggtttttcaagcggattctgttgagctggtcgtttataattatgttgctatgaagtaaatggctcatattaaactaaacgatccattattttccctgtggaggcacaaaattgtagacaacaatctccagcggctcttggccaaaaacgtactcgaggactccgctgactttttcccattccaagccatcaattccgcagccaatttttgggatggccagcttattcacgttgtttttgcgctaatgtaggaataataaaatgtagctcttattaatataacttgtctaagctttatatatataataaataaaag

SEQ ID NO: 22133 - DNA, 1458 bp, DROSOPHILA
tgataacaaatgagttttatttttaaatttattgccacttttgtacgcaaaatgctggagctgttgcaatttggagggaaaacccttacgcacacgctgagtatttatgtaaaaacgaacacgggcaaaacgctgaccgttaatctggagccccagtgggatattaaaaacgtaaaggaactggtggcaccacaattgggacttcagccggatgatctaaagatcatatttgccggtaaggaactaagcgatgccacgacaatagagcaatgtgacttgggtcagcaaagcgttttgcatgccattcgtttgcgaccgcccgtgcagcgccagaaaatccagtcggccactttggaggaggaggaaccttcgcttagcgatgaagcctccaagcctctaaatgaaactctgttggacttgcagctggaaagcgaggagcgtctgaatataaccgatgaagaaagagtccgtgccaaagcgcatttctttgtacattgcagccaatgcgataagctgtgtaatggcaaacttcgggtccgctgcgctttatgcaagggcggcgcctttactgtccatcgtgatccggagtgttgggatgatgtcttgaagtcgcgtagaattcccggtcattgtgaaagtctggaggtggcctgcgtggacaacgcggctggcgatccgcccttcgctgaattcttcttcaagtgtgctgagcatgtctccggcggggagaaggattttgcggctccattgaatctaatcaagaataacatcaagaatgttccttgcctggcctgcacggatgtgagtgataccgtgttggttttcccctgcgcatcgcagcacgtcacctgtatcgactgcttccgccattattgccgttcccgtttgggcgagcgtcagtttatgccgcatccggacttcggctacaccttgccctgtcccgcaggctgcgagcactcgttcatcgaggagattcatcacttcaagctgttgacacgcgaggagtacgatcggtaccagagattcgccaccgaggagtatgtcctacaggcaggtggagtactctgcccccagccaggatgcggcatgggccttttggtggagcccgattgtcgcaaggtgacatgccagaacggctgtggatacgtgttctgccgcaattgtctgcagggctaccatatcggggagtgtctgcccgaggggacgggcgccagtgccacaaactcctgcgagtacaccgtggacccaaatcgagctgccgaggcgcgatgggatgaggccagcaatgtcaccatcaaagtcagcacaaagccctgtccaaaatgcagaacccccacggagcgagatggcggttgcatgcacatggtctgcacacgcgctggctgcggattcgagtggtgctgggtctgccagactgagtggacacgcgactgcatgggagcccactggttcggctaa

SEQ ID NO: 22134 - protein, 468 aa, DROSOPHILA
MLELLQFGGKTLTHTLSIYVKTNTGKTLTVNLEPQWDIKNVKELVAPQLGLQPDDLKIIFAGKELSDATTIEQCDLGQQSVLHAIRLRPPVQRQKIQSATLEEEEPSLSDEASKPLNETLLDLQLESEERLNITDEERVRAKAHFFVHCSQCDKLCNGKLRVRCALCKGGAFTVHRDPECWDDVLKSRRIPGHCESLEVACVDNAAGDPPFAEFFFKCAEHVSGGEKDFAAPLNLIKNNIKNVPCLACTDVSDTVLVFPCASQHVTCIDCFRHYCRSRLGERQFMPHPDFGYTLPCPAGCEHSFIEEIHHFKLLTREEYDRYQRFATEEYVLQAGGVLCPQPGCGMGLLVEPDCRKVTCQNGCGYVFCRNCLQGYHIGECLPEGTGASATNSCEYTVDPNRAAEARWDEASNVTIKVSTKPCPKCRTPTERDGGCMHMVCTRAGCGFEWCWVCQTEWTRDCMGAHWFG

SEQ ID NO: 22135 - DNA, 4574 bp, DROSOPHILA
ccagttgaagatcagagcgggcatcgccagaacggccaacacactgaaccgctgggcggttttccacgtaagcgttttaaacgctaccgcttcctggggcatggggaaatccgggtccaggtcgaagtcctccaagggctcctgcgtggcgaagacggagaacttgagcctatgaataagaaagtaggagaagggcagacaggagtgcacgaagagattcagcgaagtacggcgctggtggtagcctacaaagtccaggtactcttctcccaggaaccgagcgaacaactgttcaatggtgaatcccaggcgttggaactcctctggcgggtagatgatcaccatgcacaacagaatataaaacagattgaatagcagctccgactcgtccatgttgcgaataatttcggattttgtttggctcagtggtttcgtcgaacactagaggtgtccaacaaattcccgattattgttcttaagatatcgatattatgaatggtacgcgatagcacgggaccaatatcgtaccgcgcccgccatagcaaatgagaatttaaataaaaacaaggtgcgagacatttttaattgtcagcagtttgaagatcgactattctgcgtgccacgggcacggggcattagagcaaatgtggagtaatactgtttgctgtttcgaacaacaaaaataaaacaattaaaatcaaaaatttgcagttatacggaaaaggcaatggacatgtcatccgaggagaaaggtaagtgtacattttggaacggacaacagtgtattaatttagtaactaaacgaaactaacctgtgcacataaataaaatagtacaaaaattacatacaaaatgcattcgttcatttgaaaaacctaaagttttttcaccgagaaaaaacagtcgccttaaactcttgaacttacagccctgaaaaaggctttgacttaagcggtcatgtggtatattatcagtatgaacgtcgagaaaaacagacaatgttttcaaaaatattttatttgtatttagccattatatcgtacttgtgaaatattttaggcaacaatcaattaataacgaaaaatgtcataagatcgcagtttgtcccaagacaaaactgtcacagaaacccattatgcgtttaaggaaatttatactagaaaatgaaggagtatttcgtaagtatacaaaatttgttaaattttggtattgggttatggctttcttgaaacggaaatatttgatattgccgtacttgtcatgtactgtcacgattacagacgtgatatgaacaaatcgtgcactgaatcttagattctagttggacctcatgcataacataagaaggtccacacccagctgccaaatgaatacatctgggttgcataagttatcgaacggaatgtcatctccgccgatggtcggtgcttttatctattgctgcagctcactcaagtctggaatgttgcaagcgtaatcgtcgtttgaggtggagctggagtcgttggttagctcaaagctgttatcaccactggtgccagtaaccgttgtcaggctggagtcattgtttgagctctgctgctctgagttactcagatttggcaagaaggcatctgggtactcttcctctccatcctcctcaccatcgttatcatcgtcatcatctttgctcaagctgctggagctgcttctgctctcaggacgcaaggtctccctgctgcctttacttatattcaaggcgcttatcattggcaagttgtttgagctcgccgttgatgtggtagccgttgaagctttcgctggagcgtgatttggtcgagagtttacatctccagaattatcaattaaaagagtgattcgcggaatgttaggcggatccgttgagctagttctgttgcttgggttgtccgacacagttgcccgcaaatcaccagagttcgaaatgagtatagacagatcggggatgttcatcggtcgtggctgcagcactggctcctgaatttgttcgctgggattgagaattgtcagattgggcacattcgggatggtcgtcgacgtagttccggtgcctgtcaatgttgcaaagttggagttagtagtactcctttgctgtcgtcgaggtggcgctatgggaggggtgtttcctgacggctggggcacactcttgtcccgcctcacaatgtctttttcaaagttgtccaggttcaggccaacgctaccttgagcgtctgccccaagagtggcagtgcttgactggtatttgaggctcagcccctcgttgtccacttccatttcctcttccagcagctcaaggcttatgagcgcaccgggaccgtcaacaggccgggcaggggtggactctagagaagtcagtggatacactttttttagttttgtcagtttaaggcaaacatagtcatacttgccatttaggaagtctagtgccacaaagtctgccgcactgaagagctctgcctgcaccagaagttggagcaataccccaaccgtgggccgctcgttgagcttgccagaggtcttccactcgtcgatcatcatctgcgacttgctttggtccggcggtagtcggtttgcagcctcgtcaatctggaacacgtcctgcgcagtgtacttaaatccctttttgatttccgccggaaaattcaagcatccggctccgctgcaggcctgcacatccatgcccttgggtatgatcgacatcaatttgcgccagcatgagttctcatctagtattttggcaagccggtaaatgtcattgtcctcaacgcgtcgcagctccgtgttgcgagaatacttcgaggataaacctatggcgccgttgcttccgttcacctgcacgcccattccgcatccgttccagccatacgccatggtgttcccttagctacccaggataaccttacgggaaagcctttgcctgtggcaggtcgatggttcaagttcccagatgtccagtgcgattgtatgagatttccgctataaaaccatgtttgcatctatcttctctctctatgtttttgccaatgcccacagctactgctcgctgctcgcagtatttcagtgtgaccgaggaggaccgcagcaccatattagattcgtcatgtaatattagggggattcccgaagccgattggtattgtgtggtatttccgtatgcggaaaatagctagccatttgcaatactgcactaatttttaacgcaaagtaagaaaaaaccaaactttttttttcattaatgacatattccggcgttgtgagcaataaatgtaaccccaccgatagatggctttcgtttgtaattgtagaagaataccgggtacctggtagaaaggaaattcgaatagacatttacgtatacatatatataagtattaaatattcttaatcagtaaaaacagacaagtcgatatagccatgtccgcccgttttacgcgggcgatgaaatagcagcaaaataaataatcgaaaaaccaaaaataaacacttagttcttagttctttttgatatttttggacaataattaattttgatttgtgatagtttctgagatctcgacgtccatagggacggacatggccagatcgatcctgatcaagacctcttctacctgctacatattttttaactagtctggtatacccttttacttcacgagtatcgggtataaaatgcaggagtagtattaccaggtgaacaaaaagggacataaatatggccaaccggggcacacgttcataattaattcataattcattattccaagtaaaaaaatagggatattgttatttttagttcagcaacatactggaccatataatggtattcatatttattttgttgataaaattttagaaattattttttgataaaagtctataaaatggacggaattgcatttgtatcaattaaggggcttgcaagagagcacggatggaatgtagttctttttataacttcacttactcaaatataaggtcacttcttagtatatgtatgttcttactgcctaaagttatggatcttaatttgtgctgcattcattggcttgtgtaaagaaaggtgctaatgagtagcaatgtgcttaagataagagccgtattgatattgtggccatgtcgggtatttgcgccgttgcgcgtggtcttgcccatctggaagtgtaaagttggactggacatgcgaccgtctcctccattgctgtatgcgaggactcgcatgttgtaactcttccctggcgtcagattgttgatgtacgactccagtttctgtccgattggcactatggtattgttggccgtaatcatgttctggtccgattcccaaatgcgaacctagaaagtttcaaactgtaatcgattttcttggtcacggtgccgggagttgtaccttataaccctctactggttcctcgtcttgcgaaggtgaaacatatctccaaacaacccgcacggtagacgggtttattccatacacgtgaaccgaagatggcggcttttgcggggcctttctatatgttcgttctaaaaagcatggtgtttaagcattttctttaaat

SEQ ID NO: 22136 - DNA, 2344 bp, DROSOPHILA
tcgagatctcagaaactatcacaaatcaaaattaattattgtccaaaaatatcaaaaagaactaagaactaagtacccggtattcttctacaattacaaacgaaagccatctatcggtggggttacatttattgctcacaacgccggaatatgtcattaatgaaaaaaaaagtttggttttttcttactttgcgttaaaaattagtgcagtattgcaaatggctagctattttccgcatacggaaataccacacaataccaatcggcttcgggaatccccctaatattacatgacgaatctaatatggtgctgcggtcctcctcggtcacactgaaatactgcgagcagcgagcagtagctgtgggcattggcaaaaacatagagagagaagatagatgcaaacatggttttatagcggaaatctcatacaatcgcactggacatctgggaacttgaaccatcgacctgccacaggcaaaggctttcccgtaaggttatcctgggtagctaagggaacaccatggcgtatggctggaacggatgcggaatgggcgtgcaggtgaacggaagcaacggcgccataggtttatcctcgaagtattctcgcaacacggagctgcgacgcgttgaggacaatgacatttaccggcttgccaaaatactagatgagaactcatgctggcgcaaattgatgtcgatcatacccaagggcatggatgtgcaggcctgcagcggagccggatgcttgaattttccggcggaaatcaaaaagggatttaagtacactgcgcaggacgtgttccagattgacgaggctgcaaaccgactaccgccggaccaaagcaagtcgcagatgatgatcgacgagtggaagacctctggcaagctcaacgagcggcccacggttggggtattgctccaacttctggtgcaggcagagctcttcagtgcggcagactttgtggcactagacttcctaaatgagtccacccctgcccggcctgttgacggtcccggtgcgctcataagccttgagctgctggaagaggaaatggaagtggacaacgaggggctgagcctcaaataccagtcaagcactgccactcttggggcagacgctcaaggtagcgttggcctgaacctggacaactttgaaaaagacattgtgaggcgggacaagagtgtgccccagccgtcaggaaacacccctcccatagcgccacctcgacgacagcaaaggagtactactaactccaactttgcaacattgacaggcaccggaactacgtcgacgaccatcccgaatgtgcccaatctgacaattctcaatcccagcgaacaaattcaggagccagtgctgcagccacgaccgatgaacatccccgatctgtctatactcatttcgaactctggtgatttgcgggcaactgtgtcggacaacccaagcaacagaactagctcaacggatccgcctaacattccgcgaatcactcttttaattgataattctggagatgtaaactctcgaccaaatcacgctccagcgaaagcttcaacggctaccacatcaacggcgagctcaaacaacttgccaatgataagcgccttgaatataagtaaaggcagcagggagaccttgcgtcctgagagcagaagcagctccagcagcttgagcaaagatgatgacgatgataacgatggtgaggaggatggagaggaagagtacccagatgccttcttgccaaatctgagtaactcagagcagcagagctcaaacaatgactccagcctgacaacggttactggcaccagtggtgataacagctttgagctaaccaacgactccagctccacctcaaacgacgattacgcttgcaacattccagacttgagtgagctgcagcaatagataaaagcaccgaccatcggcggagatgacattccgttcgataacttatgcaacccagatgtattcatttggcagctgggtgtggaccttcttatgttatgcatgaggtccaactagaatctaagattcagtgcacgatttgttcatatcacgtctgtaatcgtgacagtacatgacaagtacggcaatatcaaatatttccgtttcaagaaagccataacccaataccaaaatttaacaaattttgtatacttacgaaatactccttcattttctagtataaatttccttaaacgcataatgggtttctgtgacagttttgtcttgggacaaactgcgatcttatgacatttttcgttattaattgattgttgcctaaaatatttcacaagtacgatataatggctaaatacaaataaaatatttttgaaaac

SEQ ID NO: 22137 - protein, 462 aa, DROSOPHILA
MAYGWNGCGMGVQVNGSNGAIGLSSKYSRNTELRRVEDNDIYRLAKILDENSCWRKLMSIIPKGMDVQACSGAGCLNFPAEIKKGFKYTAQDVFQIDEAANRLPPDQSKSQMMIDEWKTSGKLNERPTVGVLLQLLVQAELFSAADFVALDFLNESTPARPVDGPGALISLELLEEEMEVDNEGLSLKYQSSTATLGADAQGSVGLNLDNFEKDIVRRDKSVPQPSGNTPPIAPPRRQQRSTTNSNFATLTGTGTTSTTIPNVPNLTILNPSEQIQEPVLQPRPMNIPDLSILISNSGDLRATVSDNPSNRTSSTDPPNIPRITLLIDNSGDVNSRPNHAPAKASTATTSTASSNNLPMISALNISKGSRETLRPESRSSSSSLSKDDDDDNDGEEDGEEEYPDAFLPNLSNSEQQSSNNDSSLTTVTGTSGDNSFELTNDSSSTSNDDYACNIPDLSELQQ

SEQ ID NO: 22138 - DNA, 4399 bp, DROSOPHILA
tcggctactccactccaattgtcggactaatttattgggtcttcgtcgcgtgctttgaattgtaatatttatactagcgaccggtatttgtatctcaagtacagattcattttttgtttactatcccttaagttgtaaattttctcaagaggtacttcaacatttaaaatgtttgtgatatttggcaaacttaagtaatcaaggcatattaggtttaataggaacatgaatactttgtcctttaatattttggatcgaattttaagttgataagtatcttaagcttgtgtccaaacattattacctctaatcaatgagaccaatttaatatagactattatattttataagcttcacattggcagaagggtatttttgggtctgtaaatatgatacttttattattttaaagccatttcaaagccaggtgttcaaagaaacataaaaaggttagttgctgacctaaaaacttcacatgctggttactgactttaatatagttgatagactaaaccgactcagttatacccttaatttaaatgtaaataggccaatatgatatgtttcattcattttaaaaatgaataaaagaaaacatgttttggtataaatatatatatatatagcaatatgttccttgtactgccaacatttcaactaactttgtatgagtgttttatgggttcactgataatgagattaggaatagattttcattgagtgggagtaaattattttcaattgcctgcttaaactaatctatagatttcagtcatttcatttcagtcatgattttattaaaaaaaaagaatgtttgatactaatttcattgagtacaaatggattaaaaggtgattaatgattgcgatagaactgttagattcactaaaaccaaaatccaactaatcttaacacaccacttttttgaaaaattaaagcagctattcagcttattttatatttatttccaagcttaatgaatgcaaataagtgcctatttcagatatgttattttcttaaacatatttattgtttattaaccaatttcgttgaacaatgtaataaacttttcgacataatatagagattctttaacagttttgagtagaaatgcacatataaataaaataaaatttctgcgaccagttgaactgtaaagcgctcagattaactgatttaaaacgttttgtttcagtgcgttggacattcgatccgtggcttagttggtcacatagatttcgaactccttgtaggccagctcctcgccgccgtacggaatgtagcagcatccgtgggagggctgcaccttgcccacagtgatagttccgtcgtgggtggcacggccgatgaacagtggttcgccctcggcggtctctccggcaggcagggcgttgggcgggatgtttccggcatccacgggcaaccactggccgccgccggcgcacagcacctcgtattcggcgtggccgtgctcaccacctccccaggctacgtaggtcactccgtgggagggatgcagcttgccgggaatgaggtcgccctcatggcgggcacgggcgatgtacagctgctcgctgctgtcgaatcctccctcgagggcgttgggtggcacctcaccgttggcggcgggcacccagcatcctggtccgcttcctgtgggcgcggcgaagcccatgacgggagccgatggagcgggctctgcaaggaaatagtggcatttgttagaaattcatgaaatcattagcaaatcttatacatatatgtatatataataggcaaatacatatttatagcaaggatatagtcttggagagcaattaagtgttattgatcagtactcaatagtaccaactctacgagtagcgggtatagtaatactcgatattcaaactgaagcagctgactagacaatagatgccattgagcagctgtagaacaatagctaacttagatcattacgatgggtaaactaatcagagagggtaaacacctgtgctttccgtttgatagaaaaggcgtggaacagagtgtaaactcaccatcaatcagccaggtgccgctggcaccccatcccgtgcagatgccgacgaagttgaccgggaacaggctaccagcatcgtaggaaaggaaggcggcggcgtctccttcgcggccaacggtgatgacattgtcgtaccagcgcacccagaagccacggaactctccggcatctaggatgcccggagtgggcacctcagcgacttcgggcttctggcggtccttgcggatcaccgacttggtgttctcccatcctcccagaaagatctcgaaaatgggaccgttctcctcgggcgcgggtgtgagtgccaaatgagcatccttgggggaacgcaccttgaaggtaaaaactccaccgctggcggggaagaattggtactccaacttatcgggggtgttgacttctgcaaatgagatggcatattagtacaaattctcagaggcaactgtacactcggctacgtttttctgagccaactgtacccactactactttgaaaggtgggaaagttttgaggtttgaattaacaacctcaaacatgagaatgttgtcataaaaaatacttgaactggaaagaattcgtagctatttttatgtttgttaggtttctacgtacatataaacatacatatatcagcatgtttagcgtctgtttttgttttcgcttgcttattagcaccattcgcatgatgtcatttagatcgccatcagttcttcgcaacaaattgttctagctaattccactcaagcttaatttcgagttttgagctctgagccggctctactgccactcgagcgacaaacatttgcccagatatatgcgaggtttgtgctattcactttgaatagattacacgaatggtttctcaagcagcattatttcgcatgacatcattggaggtgcatctttcgtctgacctccctagggtcaaccctgctgaattcctattgattattgtcggagttcaaggcgaagaccagtgactcatcgcatatggtgaacaatttcggacacctttggtcgagaatcaattcgatgggtcataaattaggccaaataaaggcagtccaatatgtatagcatattgccgttaattgaatctggacgatcacaaggtgaaagtcgcttgtatttttcactggtaaaaacccagcatagataaagaatgggatgtttcgattctaggaattggacgacacaatgctattttggtcgtgggccaaaaattccgccgcacatttccctatctttaaattcacccaattatccattccattatccaactgctcagggcactccacccacacccactgggaaactcaccgattggcatgattgctgtttcaatcaacgatgttcgcttactgagattctgattcaaactgccccaatggagcccaaatgccggcgaggtaagcaatgctaaaaaaccgagacggtgagagagtaaaagctccaagagctttggcgctctcacttgcaaagtgggagatcgttggccatatagaaagtattcgaactgtaccagctcgaatagctaacttattcacatagcggtatactgcacatgctaaggcttatctttaattattttaaaggcaattatttttcttaaatgtaaatcttaattaaaggctgataatttctagcataatggcatagctttaaaaaaaatttctttacttacaaatgtacatataactattttgtacatgggcacaatattagataattgtaatttcctttttaactttttgttccctggactttcacctcgtggtaagggcatgtaagcttcggtataactaaggtagttttgtcacctagttttgcttaagaggtctatgactcaggttggcaaaagctgctgcttagtcatcagaaccataagcaagcttttattgctaaaatgctttttctatgggcatgataattttcatatcgctatgcgaataaatatttactatttactactgtatgcaaggtgtacaattagtatgcaaggcacttaatgatgtgacctattccaaaaaaggaaggccctaaaaaaatctattaaataatgagctataaattggttaaaagaattggttgatcttaaaataatgaatttcttgagtataagagacttacttctatactctatgatgttccaatgcttctaaaatatatgattaactttcatttcagctagggtacattctattcgatcaacttgtgtttcgccttcgtttgccgttagtagtgtcgtcacttattttggcgtcatgtgccgcttttatattgtgcggtcacatggatatccaaaccagggcatcaaaagctactgtcaatgatttcaccgcaagggtccaaaatgg

SEQ ID NO: 22139 - DNA, 1137 bp, DROSOPHILA
cgaacatcgttgattgaaacagcaatcatgccaatcgaagtcaacacccccgataagttggagtaccaattcttccccgccagcggtggagtttttaccttcaaggtgcgttcccccaaggatgctcatttggcactcacacccgcgcccgaggagaacggtcccattttcgagatctttctgggaggatgggagaacaccaagtcggtgatccgcaaggaccgccagaagcccgaagtcgctgaggtgcccactccgggcatcctagatgccggagagttccgtggcttctgggtgcgctggtacgacaatgtcatcaccgttggccgcgaaggagacgccgccgccttcctttcctacgatgctggtagcctgttcccggtcaacttcgtcggcatctgcacgggatggggtgccagcggcacctggctgattgatgagcccgctccatcggctcccgtcatgggcttcgccgcgcccacaggaagcggaccaggatgctgggtgcccgccgccaacggtgaggtgccacccaacgccctcgagggaggattcgacagcagcgagcagctgtacatcgcccgtgcccgccatgagggcgacctcattcccggcaagctgcatccctcccacggagtgacctacgtagcctggggaggtggtgagcacggccacgccgaatacgaggtgctgtgcgccggcggcggccagtggttgcccgtggatgccggaaacatcccgcccaacgccctgcctgccggagagaccgccgagggcgaaccactgttcatcggccgtgccacccacgacggaactatcactgtgggcaaggtgcagccctcccacggatgctgctacattccgtacggcggcgaggagctggcctacaaggagttcgaaatctatgtgaccaactaagccacggatcgaatgtccaacgcactgaaacaaaacgttttaaatcagttaatctgagcgctttacagttcaactggtcgcagaaattttattttatttatatgtgcatttctactcaaaactgttaaagaatctctatattatgtcgaaaagtttattacattgttcaacgaaattggttaataaacaataaatatgtttaagaaaataacatatctg

SEQ ID NO: 22140 - protein, 296 aa, DROSOPHILA
MPIEVNTPDKLEYQFFPASGGVFTFKVRSPKDAHLALTPAPEENGPIFEIFLGGWENTKSVIRKDRQKPEVAEVPTPGILDAGEFRGFWVRWYDNVITVGREGDAAAFLSYDAGSLFPVNFVGICTGWGASGTWLIDEPAPSAPVMGFAAPTGSGPGCWVPAANGEVPPNALEGGFDSSEQLYIARARHEGDLIPGKLHPSHGVTYVAWGGGEHGHAEYEVLCAGGGQWLPVDAGNIPPNALPAGETAEGEPLFIGRATHDGTITVGKVQPSHGCCYIPYGGEELAYKEFEIYVTN

SEQ ID NO: 22141 - DNA, 2445 bp, DROSOPHILA
ccggatcaaaagacgttccctatgctaaatttaatatttatggtagggctatatcaatgaaaagaaaagtatgacgcaagagatggaagaacagggtgcctgttctcttcacattttccatacgcaacgttgaacgtcgaaatgcggtgtgtgtctcgtcttggctcgtctcgtctggcgactttgcctggacggccttcggttggcagaaacttgcaaatttttggcacagccaaacatgtttgggtttttgttgtctttgtaattaatacataattaaagtggcgcatattgaaaaatgtgcgagggatctggccacaaatgaaaacgaagttttgaaggttaatttcaggcgttgatttaaatttcatgcgatgctaatgaaatttggaagataccttccaaaaacaacatacagcgcacagagagccaaacggccaaattaatatgcatgaaataaaaagctacaatgatcaaactagttttggaatgaaacgattggacgcattgatcgatctttaagctaacagagcgctgacgtagtttccatgcccaattttaagttgaacacacttgatttacatacttattgtcgttgatgtacagaactattggctggtatgctcaatgaagttctaaatatacgtatgcgaatcgatcgaactgaactcattgctattttccgattgttatattaggaagggatgtgaaaatgaagttgaacaataagaagtgctacacatttgaatttgtctaagaattgtttaattttatggccattgttagtggtgaactagccaattagtagaactatcttgcctgacgactatttatttcatgtcattccagcttgatacgatgcgaaatgtatgtgcagggacattaattcgaaaaacccgatgaagcatcccattatagttttgcgatttccaaaatgcgagtccatttaatgagatatgcaagattttaggtttgacagtgtcgtggattagattgcaagtcaaatataaaagtgttcatcctgcactccgtcgatatcattcgcatcgaactcttcgagatctccaaaccagcccaaattcaacatgaaattcctgatcgtctttgtagcaatcttcgcttttgctttggctaacgaagcgcaaattattaacttggaatccgatgttggacccgaaaactttcagtggtcgtaagtagactgacagggtcctcataaaaatgcctaactgattctggaccttcgtattagcttcgagaccagcgatggccaggcggctaacgctaagggacagttgaagtaccctaacaccgaccacgagtcccttgctgtccagggatccttccgcttcgttgccgatgatggccagacctacgaagtcaactacatcgccgatgagaacggattccagccccagggtgcccatcttcccgttgcctcctaagtggttcgaagtggaataccatgattttaatattgctttaactgccctaaatccgttttggccaagtcaaaagtcaaaattgtagagctactaaataataaaaaataatgaatgtatataaaagaatctgtttttcaatttcctatttgggtcacaagaagtcaacttctaaaaaatgaaatatttatagcacaacgtgtactcatcccaaaagatcagatcgatcgatctgatgattggaccgatatcttaagtatttttttatatatattgttagtcgattttaattgtactttctgatatgcagtaagagccacgtatttagaatgccagaaaatgggatttcatattccctatttccacctatattaatggaaaatgcctaccctaatctagttttagtttagtttacttataaattttatttaaatcttgtatacgaaataagcttgcttaaaaactgtattaatattttcttatacctaacaaataaatccgagttgttggagcaattattgctacataaagttacatgcctggcctactttttcccatttcttttgaattttttactaattagaattttatttttaaaaggacttcattgaaagaagtctacatttcccattcaaaaataatataataaataaataaatgtatcgttaatttaaattcatccacatctctctagatctctagatctatgaatattaaatttccacagctagtctcaaacaaatttgataaaatgtaatcaaaattgaagcgctgaaatggcaacactcaaaaacgttcaccattgagttgaaagcaaaactgaactcaatatcatgcattttatgctcagtatgcgaattagattagcgtcaccgcaccttggacttgttcacaatttatgtataaatgagttcatcccaaagtcaatcgatatcattcgcatcgaactcttcgagatcagcacataagccaaaaatcaacatgaagttcctgattgtcttcg

SEQ ID NO: 22142 - DNA, 340 bp, DROSOPHILA
tcaaatataaaagtgttcatcctgcactccgtcgatatcaatgaaattcctgatcgtctttgtagcaatcttcgcttttgctttggctaacgaagcgcaaattattaacttggaatccgatgttggacccgaaaactttcagtggtccttcgagaccagcgatggccaggcggctaacgctaagggacagttgaagtaccctaacaccgaccacgagtcccttgctgtccagggatccttccgcttcgttgccgatgatggccagacctacgaagtcaactacatcgccgatgagaacggattccagccccagggtgcccatcttcccgttgcctcctaa

SEQ ID NO: 22143 - protein, 99 aa, DROSOPHILA
MKFLIVFVAIFAFALANEAQIINLESDVGPENFQWSFETSDGQAANAKGQLKYPNTDHESLAVQGSFRFVADDGQTYEVNYIADENGFQPQGAHLPVAS

SEQ ID NO: 22144 - DNA, 3241 bp, DROSOPHILA
caatgcccaaatcgatactaacttcatcctgcacttcgtaggttaatggtaacaatagctattcgtatcatgtttccgtgtttatataggccgctccccagcaaatttcttatcgccagaacatcgacagcgttgataaatcgccacttcactttggaaatcgctgaaatagaaaacaaaagtctaatatattgcattcggtgaggaaactgaaacgacaagtgacctatatctatactcgtacattatattaagcatataaatctcaatttattgcctcaattttaagtgcatcttgagatttgcagaacgccaagcgtatcgtataccacactcgaagaatcattttatcatcgtcctggaatgtgactcatactgttgctagctactcattcaggcaactcatgaagtgtaaattaaataaataaacttgtattcaatgaataacaaaagaagcatatttattcattcatgatttatactttttactagaaatgtagaactactgtcatcacatgaaaatataacgcacttttgtagatatgggtaattggatttaaatctgacatcaaaaattacaatacttgagaacttttacattattatgatgttaaataaaacatattgttgtaaagttatatatatatatatatataatcataactgaaatacatatactctacgactaaacagaaatttacacaagtaatcaattaatatattacttattctcattcaattgaaggattcaaaggattctggaacaggatactaaatccctataaaattattcttattatttgcttttctttcgaattcatttaaagtttgttacggatttgtttacaaccagtttaaaaggtttccatattgatagatctggttttcacttaagacttcttgtgaaataacttttgaaacattctccaaagtcacaaacagcagtgtggttttttttttcaattttcaaacatttattcttaacaatcggattctccttttaccaacgcagcttcctgttgatggtcttgagcagaggataggtctcaccgcactgaccgcggtagtcgtccgtctctagggaccagatcatggcaccggccagacccttggacaaagcaaagtccatcttgtactggacactgagcacgttgtcgaagctcacccactggtcaccggagtaggcgtatggagcggcattgtcgtagtcgaaaacggtgtgccagttgttctggcagatctcgttgtagcccaagtagccggtagagccggtgtaggatccagcggagccctcgccgcggcacggtgcacccggccagttctgggaggagtccgacagctggaaggagcgtccgtaagtgcccacgccgagcaccagcttgttggccggagcaccttggctcagccaaaagttaatggcgttctccacggcccactggggggcattgaaaccggtctggccatcggaggccatggcaaagtcgtaggtcatcacgttgataaagtcgacctgctgagcaatgttggcgatttcgtaggatgcactggccaatgattcaccggcgcccaccgcaatacccaattcatagccatagggagcgaacctataggacataaatcatttaaaactaaagtatgcttcggtagtggctcctccactactcacgcctccttaatctcgcgcagcagagtcacaaagttggcacgatcgttccagttgccaccacgctggttggggtactcccagtccagatccagaccatcgaatccatggttgcgcagcaggttcagggcggagttaatgaagttctggcgcttgtaccaatcgccggacatcgaggagtacttggtggagccctcgttccagccgccgaccacggccaggactttcaggttggagttttggttcttcaggctaatcgcctggttgatgaagcccagatcgtagtccagccaagtgtccagggattggatctcaccattgtcgttgattccgaagaaggagtagctcagatgggtgcacagaccggcatcgatattggacacatcgaacttgccattgccgctgcggtagttggcccaggtgccccagtagcagttgacgatgcctggataacagatcaggaatacagatcgattagcttttaagccaacaccaaattcgcgtagattagacttacgttcagcaccgataacctggctaaggcagaggacagcgagtagtgccaataactttcccattgcacgaaatgcttattacttcttgttccatctaggtatttatacccttccgcaccgatcttatcaataccattatctttatcagctgtgtcggctactccactccaattgtcggactaatttattgggtcttcgtcgcgtgctttgaattgtaatatttatactagcgaccggtatttgtatctcaagtacagattcattttttgtttactatcccttaagttgtaaattttctcaagaggtacttcaacatttaaaatgtttgtgatatttggcaaacttaagtaatcaaggcatattaggtttaataggaacatgaatactttgtcctttaatattttggatcgaattttaagttgataagtatcttaagcttgtgtccaaacattattacctctaatcaatgagaccaatttaatatagactattatattttataagcttcacattggcagaagggtatttttgggtctgtaaatatgatacttttattattttaaagccatttcaaagccaggtgttcaaagaaacataaaaaggttagttgctgacctaaaaacttcacatgctggttactgactttaatatagttgatagactaaaccgactcagttatacccttaatttaaatgtaaataggccaatatgatatgtttcattcattttaaaaatgaataaaagaaaacatgttttggtataaatatatatatatatagcaatatgttccttgtactgccaacatttcaactaactttgtatgagtgttttatgggttcactgataatgagattaggaatagattttcattgagtgggagtaaattattttcaattgcctgcttaaactaatctatagatttcagtcatttcatttcagtcatgattttattaaaaaaaaagaatgtttgatactaatttcattgagtacaaatggattaaaaggtgattaatgattgcgatagaactgttagattcactaaaaccaaaatccaactaatctt

SEQ ID NO: 22145 - DNA, 1107 bp, DROSOPHILA
atgggaaagttattggcactactcgctgtcctctgccttagccaggttatcggtgctgaacgcatcgtcaactgctactggggcacctgggccaactaccgcagcggcaatggcaagttcgatgtgtccaatatcgatgccggtctgtgcacccatctgagctactccttcttcggaatcaacgacaatggtgagatccaatccctggacacttggctggactacgatctgggcttcatcaaccaggcgattagcctgaagaaccaaaactccaacctgaaagtcctggccgtggtcggcggctggaacgagggctccaccaagtactcctcgatgtccggcgattggtacaagcgccagaacttcattaactccgccctgaacctgctgcgcaaccatggattcgatggtctggatctggactgggagtaccccaaccagcgtggtggcaactggaacgatcgtgccaactttgtgactctgctgcgcgagattaaggaggcgttcgctccctatggctatgaattgggtattgcggtgggcgccggtgaatcattggccagtgcatcctacgaaatcgccaacattgctcagcaggtcgactttatcaacgtgatgacctacgactttgccatggcctccgatggccagaccggtttcaatgccccccagtgggccgtggagaacgccattaacttttggctgagccaaggtgctccggccaacaagctggtgctcggcgtgggcacttacggacgctccttccagctgtcggactcctcccagaactggccgggtgcaccgtgccgcggcgagggctccgctggatcctacaccggctctaccggctacttgggctacaacgagatctgccagaacaactggcacaccgttttcgactacgacaatgccgctccatacgcctactccggtgaccagtgggtgagcttcgacaacgtgctcagtgtccagtacaagatggactttgctttgtccaagggtctggccggtgccatgatctggtccctagagacggacgactaccgcggtcagtgcggtgagacctatcctctgctcaagaccatcaacaggaagctgcgttggtaa

SEQ ID NO: 22146 - protein, 368 aa, DROSOPHILA
MGKLLALLAVLCLSQVIGAERIVNCYWGTWANYRSGNGKFDVSNIDAGLCTHLSYSFFGINDNGEIQSLDTWLDYDLGFINQAISLKNQNSNLKVLAVVGGWNEGSTKYSSMSGDWYKRQNFINSALNLLRNHGFDGLDLDWEYPNQRGGNWNDRANFVTLLREIKEAFAPYGYELGIAVGAGESLASASYEIANIAQQVDFINVMTYDFAMASDGQTGFNAPQWAVENAINFWLSQGAPANKLVLGVGTYGRSFQLSDSSQNWPGAPCRGEGSAGSYTGSTGYLGYNEICQNNWHTVFDYDNAAPYAYSGDQWVSFDNVLSVQYKMDFALSKGLAGAMIWSLETDDYRGQCGETYPLLKTINRKLRW

SEQ ID NO: 22147 - DNA, 2556 bp, DROSOPHILA
ttgtaacatctcctaaagaagtttttagaatggctttttaatgtgatcatttcgcaataagtcaatatttatgaaaaataaataacttatttcgaatcgtacatagtttccacaaatttgttgcttagcctgcgatccagagtcatccctaagtacttgagtgtgagtaaattagagattcagtctccgcttaaagagattgtacggcattctcctctgtgcgaaagtgaaaattgattttccgcgttcactacgatgtttcacctttgcatcctagggcccattgcatccagttaattttggatgatgtctgtggcttcttcggggacaatcgacgggatttcggcggaacaagttggaggaacagtcggcgggacagtcgacggacaagttggcggaacacctggtgtcagcgggacactccaaggacgctgccttgtgctactccggctctaatgggcctagatgagcttattgagcttccgcatctaacttggaatactctcctctccgtgcaggatttgagacggcacagaaatgtttcttttttttcgaatacctccagtgacattgatcggtcgatccgtgggatcttctgaagccaaactggtgattagggatcattccggcgtgtcccgcagaatctcacgccaactgtcccgccaactgtcccgccgatttatccagccgctttcagattctgcttgtgagattgccatctattgataatttttccttgtttctcatgtggttattaatatcagccgagtatttttgctagtaacaactgagttagtgaaaccaatttgaacaacttgcctaaacttgttgatttgcattttgtgttaggttttaagccattcagagatagctggtactcaataatatacatttttcacattatgttttgactaattcggatgcgttcagcataatcgagaggttgtccaactatttaagacgcgccctggccaacagagagcatcattcgtcgcgaactgttcgatagccgcagatctaagcaccaaacaacaatcaccatgaaattcctgattgtcttcgtcgccctcttcgccgtggctctggctgctcctgccgctgaggaacccacaatcgtgcgctctgaatccgacgttggacccgaaagcttcaaatacgagtaagttgcctatgagaaatgacccaaaaggatacctagctgacactgacttccttcttagctgggaaacctccgatggacaggctgctcaagctgtaggtcagctgaacgacattggaactgagaacgaggctatctctgtgagtggatcctaccgcttcattgctgatgatggccagacctaccaagtcaactacatcgccgataagaacggattccagccccagggtgctcatctgcccgttgcccccgtggcataagtttttcaacatttttaactagttcctttttaatgtcggttaacaggaaatagaaaacctttattaccgttcttatcaaggagaacagaatctaaatcaataagcctaaagtgttattaaagaaaaaattattacatgaagtaatttgttttaaatgggaattaattgtagcaggaaatcattgatcacttatctataaacataagataatttacgtaaaatataaatatactttttaagatatagcttttcccaatggtctattttaaaaacaatattcaaagtgctatagttttattgtgatatagaagttataagttataagtaatagaagttatagacttttgagaactgtgtttagattaatcaatcaataatattgagaactaaacctgacataacaacagttcatcatatatgataagctgttatctaaaacaagagagaatgcttagtggagttccccgactatcggatactctttactcagctggtgtgaatgcgaacgcgaaatttcataatttttctatgataccgatagatattatgaaataaaatgagaaaaaatttaaaaattgtttaaaatgtgggcgtgacagactcggctgctttagggcgttaaagtaggcgtggcaaaaaggtttttcgcaaatcaatagaaatttacaagactaataaaagtatgaaaaatatcgaaaaatggttcgaaaatgtgggcgtggtagttttggcggttgtagggagctagactgggcgtggcaaaaagttttttttttgcaaatcgatagaaacaagactaataaaaatgtgaaaaaattatcaacacgtttttaaaaaggttaggcgtgcttatcagcataaaatatatgagtccaagtaaaaacatttatttttgttgttgactctttttgtttttgtcagttctgggcacttttttttagctgctattagttaaacttaatgcatttgccatgacttcttatgtttttttagctccagttaaatagaaactacgagaagacagctgaaaaaggaatgcgaaactatgcaaactatatagatgaagatgtccgatttacatatcgtatagggcttttaacgattcagctttaggccgaattcaatttcacacattta

SEQ ID NO: 22148 - DNA, 495 bp, DROSOPHILA
gttcgatagccgcagatctaagcaccaaacaacaatcaccatgaaattcctgattgtcttcgtcgccctcttcgccgtggctctggctgctcctgccgctgaggaacccacaatcgtgcgctctgaatccgacgttggacccgaaagcttcaaatacgactgggaaacctccgatggacaggctgctcaagctgtaggtcagctgaacgacattggaactgagaacgaggctatctctgtgagtggatcctaccgcttcattgctgatgatggccagacctaccaagtcaactacatcgccgataagaacggattccagccccagggtgctcatctgcccgttgcccccgtggcataagtttttcaacatttttaactagttcctttttaatgtcggttaacaggaaatagaaaacctttattaccgttcttatcaaggagaacagaatctaaatcaataagcctaaagtgttattaaagaaaaaattattacat

SEQ ID NO: 22149 - protein, 105 aa, DROSOPHILA
MKFLIVFVALFAVALAAPAAEEPTIVRSESDVGPESFKYDWETSDGQAAQAVGQLNDIGTENEAISVSGSYRFIADDGQTYQVNYIADKNGFQPQGAHLPVAPVA

SEQ ID NO: 22150 - DNA, 2474 bp, DROSOPHILA
ccgatgagaacggattccagccccagggtgcccatcttcccgttgcctcctaagtggttcgaagtggaataccatgattttaatattgctttaactgccctaaatccgttttggccaagtcaaaagtcaaaattgtagagctactaaataataaaaaataatgaatgtatataaaagaatctgtttttcaatttcctatttgggtcacaagaagtcaacttctaaaaaatgaaatatttatagcacaacgtgtactcatcccaaaagatcagatcgatcgatctgatgattggaccgatatcttaagtatttttttatatatattgttagtcgattttaattgtactttctgatatgcagtaagagccacgtatttagaatgccagaaaatgggatttcatattccctatttccacctatattaatggaaaatgcctaccctaatctagttttagtttagtttacttataaattttatttaaatcttgtatacgaaataagcttgcttaaaaactgtattaatattttcttatacctaacaaataaatccgagttgttggagcaattattgctacataaagttacatgcctggcctactttttcccatttcttttgaattttttactaattagaattttatttttaaaaggacttcattgaaagaagtctacatttcccattcaaaaataatataataaataaataaatgtatcgttaatttaaattcatccacatctctctagatctctagatctatgaatattaaatttccacagctagtctcaaacaaatttgataaaatgtaatcaaaattgaagcgctgaaatggcaacactcaaaaacgttcaccattgagttgaaagcaaaactgaactcaatatcatgcattttatgctcagtatgcgaattagattagcgtcaccgcaccttggacttgttcacaatttatgtataaatgagttcatcccaaagtcaatcgatatcattcgcatcgaactcttcgagatcagcacataagccaaaaatcaacatgaagttcctgattgtcttcgtcgccctcttcgccctggctgtcgccgatgttcagattctgaagcaggagtccgatgtcggacctgtaagctttaactatgggtatgttttgtgaactatgtgacaaggatttgttttcttaccctttgctcttgattagctacgagaccagcgatggatcctctgctcaggccgccggacagctgaagaacgttggaactgatgaggaggctctcaacgtcaagggtacctattcctttgtggccgatgatggccagacttactccatcgcctacaccgccgacgagaacggataccagccccagggtgcccatctgcccgttgcccccgtggtttgagctatccatcgttaatattgttttactgaaaaatccttcaattatgaataaaacctcaacagattgattaaagatacatgaatatgttcgttttgaaactttagtttcggaaaaattatttaacaattgtaacatctcctaaagaagtttttagaatggctttttaatgtgatcatttcgcaataagtcaatatttatgaaaaataaataacttatttcgaatcgtacatagtttccacaaatttgttgcttagcctgcgatccagagtcatccctaagtacttgagtgtgagtaaattagagattcagtctccgcttaaagagattgtacggcattctcctctgtgcgaaagtgaaaattgattttccgcgttcactacgatgtttcacctttgcatcctagggcccattgcatccagttaattttggatgatgtctgtggcttcttcggggacaatcgacgggatttcggcggaacaagttggaggaacagtcggcgggacagtcgacggacaagttggcggaacacctggtgtcagcgggacactccaaggacgctgccttgtgctactccggctctaatgggcctagatgagcttattgagcttccgcatctaacttggaatactctcctctccgtgcaggatttgagacggcacagaaatgtttcttttttttcgaatacctccagtgacattgatcggtcgatccgtgggatcttctgaagccaaactggtgattagggatcattccggcgtgtcccgcagaatctcacgccaactgtcccgccaactgtcccgccgatttatccagccgctttcagattctgcttgtgagattgccatctattgataatttttccttgtttctcatgtggttattaatatcagccgagtatttttgctagtaacaactgagttagtgaaaccaatttgaacaacttgcctaaacttgttgatttgcattttgtgttaggttttaagccattcagagatagctggtactcaataatatacatttttcacattatgttttgactaattcggatgcgttcagcataatcgagaggttgtccaactatt

SEQ ID NO: 22151 - DNA, 416 bp, DROSOPHILA
ttcgagatcagcacataagccaaaaatcaacatgaagttcctgattgtcttcgtcgccctcttcgccctggctgtcgccgatgttcagattctgaagcaggagtccgatgtcggacctgtaagctttaactatggctacgagaccagcgatggatcctctgctcaggccgccggacagctgaagaacgttggaactgatgaggaggctctcaacgtcaagggtacctattcctttgtggccgatgatggccagacttactccatcgcctacaccgccgacgagaacggataccagccccagggtgcccatctgcccgttgcccccgtggtttgagctatccatcgttaatattgttttactgaaaaatccttcaattatgaataaaacctcaacagattgattaaagatacatgaa

SEQ ID NO: 22152 - protein, 100 aa, DROSOPHILA
MKFLIVFVALFALAVADVQILKQESDVGPVSFNYGYETSDGSSAQAAGQLKNVGTDEEALNVKGTYSFVADDGQTYSIAYTADENGYQPQGAHLPVAPVV

SEQ ID NO: 22153 - DNA, 2821 bp, DROSOPHILA
actaacatcggtcacatcgagcaggttgcaggcaatcaaaggacaaatatagctgggataagatcaatccaaattggaacaaccacaatcacaacgatattgaaccagcgatgagatggagcgtccgttgggatgacgaactcagaaactcagtaagggagctgcaactgatactgaaactgaaacagaaaccacagcggcactcggaatttagaggcgacgaaaatagaaaatctgtgaaattcaacccaaaataaacggcagaggcagccatgaacagtgcggatatattgtaattattaatgagcgcatagagcgggcagagtgagcggggtgacgaagcagcagcgacgaacagagcgatacgtagcgggatatcacgatgtacactctgctggagctcgactaacacactgacacacacccaccccaagcccaggacccccagtcccgacagattccccacaggacgtaaggacgacggcaggcaagaaaggcaacgaaaggctcaatttcaaggaatttgcaaagcgctcgcagacaagctcaccagttcaacagctcacccacacacacacacacacacatgagcgggcatctcgtcaggatagaagtaattaaaagtaaataaagaaggcaagagaaaaccaaaaaaaaaaaagaaagtccctaaagcgtgaagcgctggaaaggcaggaagtaacctgattacgggcagagaagcagcacaagcagcagcagcagcaattaatgccgcaggagaaaggaatccgattcagaaccagaagcagaagcagaggaagcgcatcaggatctgctgccactggactgagctcgactcgatctaccatcacgcgaacgcggaccgaggattggagaaaggaacagaagagaagaaaggaagcactctctaagctctaaacacccactcaaccatacacatgcactgatgtactgactgaatgcctcgctgcctaaacaaccaactaactcactgactgagagacttcaacaagcggagaagtacggagaaagccctgactagaagcccaagtagccgagcggataaaaaaaaagggggaaccagctagcaactaaactaaaggagcaaccttgactaataactgcaaccacaagaacaacaacaaaacaactacaacttactttatacgcaactaaacaaaaaaaaagggaaaacaaacaaaaaagaataaccaaaaaacaaaaacttcgatttttaatgcaagactacgaaaagccacgacagccgttttaaataagcaactttcgcaccctcccgaaatttcaacttccaacacctgaaacaagaaaccaaatcaacacacaaacacccaaacacacagcaccaccatgagtgattcaaaaatggacaagctggcccggatggcgcccctgccccgcacaccgctgctaaccatctggctggccatcaacatggccctgattgcacaggaaacgggccacaaacggatccatacagtgcaagcggcgacatcaacaagctgctgggcatcacgccctccgacatcgacaagtactcacgcatcgtgttccccgtgtgcttcgtgtgcttcaacctgatgtactggatcatttacctgcatgtcagcgacgtggtcgccgatgatctggtgctcctgggcgaggagtagggcgtcgtccacaagcggcgcaagcagtcgagggcgtggcccaaggacacaggagtgaacagcgcgcgagagagtcaaacttggcagggcgctgaaaaaccacacaaaaaatagaaaagaaaaataaaacccagaaaccaaaacccgcaaaaaaaatacagaaaaataggcacaaaaaaacgaagcggaaacaaaactaattttaactagcgatatgaaaatgcagaggcaggagagtttatggtttaatacaattgcgggaaggacacacacacacacacacatattacaaggtcgaaagcaaagaatattgttaaatagatttacacagaatataaaagaaaacataaagaaaacaacattagcattaacaaccaaacgagtataaatgaatgaagaataatcaaaagcaacagattagcaaattgtagtgaaaattatataacgaaaggcataaggcgaaggtattgaggagaattatgaaccgacaaaaaaaaaccatttcaaccacaaatataataacgatcaaaaatcatacgcaacataggcattaaacggaaacgaacggtgactttgagaaaaacctcgaaatagcgcagtcgataagttgatttcaacacaccaaaatactagacattaaataatttccattatctttgcggcgttttgagtttaagtttaagatacgaatgtcctttgcttcccacttcaaaagcaaaacacccggagagtcttcctctaatttaagtgcgttccccctttcagctgcacgctcccagaaaccgcaatgaaaatcaaaccggaacttaaccgatacttaaccgatacttaaccggaactcactatgctgatccattgattgcccattcagttggttgatttgtttattcagaactgacttagcgcttccaagtgaaatggccaaatttattagaaatcaaaatgtagtaatgattaacaatttcgacaattgcaaatcggtttggcgaataatttcgttaagttaactttaaatgtaaatcgaacacgaggcagtcacgtatgatcgagtggtttttaatcatttgcacaagacacaactaaaaaacacacacatatgtacacactgaactcgatacggatgttatggattactttggagcgtgcac

SEQ ID NO: 22154 - DNA, 2340 bp, DROSOPHILA
gagagacttcaacaagcggagaagtacggagaaagccctgactagaagcccaagtagccgagcggataaaaaaaaagggggaaccagctagcaactaaactaaaggagcaaccttgactaataactgcaaccacaagaacaacaacaaaacaactacaacttactttatacgcaactaaacaaaaaaaaagggaaaacaaacaaaaaagaataaccaaaaaacaaaaacttcgatttttaatgcaagactacgaaaagccacgacagccgttttaaataagcaactttcgcaccctcccgaaatttcaacttccaacacctgaaacaagaaaccaaatcaacacacaaacacccaaacacacagcaccaccatgagtgattcaaaaatggacaagctggcccggatggcgcccctgccccgcacaccgctgctaaccatctggctggccatcaacatggccctgattgcacaggaaacgggccacaaacggatccatacagtgcaagcggcgactggcggtggcagcatgctgggtgacgtaaacatatccgctattctcgactcctttagtgttagttacgacaaaagagtaagacccaattacggtggacctcctgtcgaagtcggagtcaccatgtatgtgctatcgatcagctcgctctcagaagtgaaaatggacttcacattggatttttactttcgtcaattttggaccgatcctcgtttagcgtatagaaaacgacctggtgtagaaacactatcggttggatcagagttcattaagaatatttgggtacctgacaccttttttgtaaatgaaaaacaatcatattttcacattgcaacaaccagtaatgaattcatacgtgtgcatcattctggatcgataacaagaagtattagattgactataaccgcatcgtgtccgatgaatctacaatatttccccatggatcgccagctgtgccacattgaaatcgaaagcttcggctacacgatgcgtgacatccgctataaatggaacgaaggccccaactcggtcggtgtctcgagtgaggtttcgctgccccaatttaaggtcttgggtcatcggcaaagagctatggaaatcagtcttaccacaggcaactattcgcgtttagcctgcgaaattcagttcgtgcgttcgatgggctactaccttatacaaatctacataccctctggactgatcgttattatatcatgggtatcattttggctcaatcgcaatgcaacgccggcgcgtgtggcgctcggtgtgacaaccgtgttgacaatgaccactttgatgtcgtcaacaaatgcagcgctgccaaagatttcgtacgtcaaatcgattgacgtctatctgggaacatgcttcgttatggtctttgccagtctactggaatacgccacggtcggctacatggcaaaacgaattcaaatgcgaaaacaaagatttatggcgatccaaaagatagccgaacagaaaaagcaacagctcgacggagcgaaccaacagcaggcgaatcccaatcccaatgcaaatgtgggcggacccggaggagtgggcgttggacccggcggacccggaggacccggtggcggggtcaatgtgggcgtcggtatgggcatgggaccggaacatggccacgggcatggacaccacgcccacagccatggacatccgcatgcgcccaagcaaacagtgagtaaccgcccaatcggcttttccaatatccaacaaaacgttggtacgcgcggttgctcgatagtgggacccttgttccaggaggtgagattcaaggtccacgacccgaaggcccactccaagggcggaacgctggagaatacggtgaatggcggacgcggtggtccgcaatcgcatggaccgggtccgggccaaggcggcggaccgcccggcggtggcggaggcggtggaggcgggggcggaccgcccgagggcggtggcgatccggaggcagcggttccagcccatcttctgcatccgggaaaagtaaaaaaggacatcaacaagctgctgggcatcacgccctccgacatcgacaagtactcacgcatcgtgttccccgtgtgcttcgtgtgcttcaacctgatgtactggatcatttacctgcatgtcagcgacgtggtcgccgatgatctggtgctcctgggcgaggagtagggcgtcgtccacaagcggcgcaagcagtcgagggcgtggcccaaggacacaggagtgaacagcgcgcgagagagtcaaacttggcagggcgctgaaaaaccacacaaaaaatagaaaagaaaaataaaacccagaaaccaaaacccgc

SEQ ID NO: 22155 - protein, 606 aa, DROSOPHILA
MSDSKMDKLARMAPLPRTPLLTIWLAINMALIAQETGHKRIHTVQAATGGGSMLGDVNISAILDSFSVSYDKRVRPNYGGPPVEVGVTMYVLSISSLSEVKMDFTLDFYFRQFWTDPRLAYRKRPGVETLSVGSEFIKNIWVPDTFFVNEKQSYFHIATTSNEFIRVHHSGSITRSIRLTITASCPMNLQYFPMDRQLCHIEIESFGYTMRDIRYKWNEGPNSVGVSSEVSLPQFKVLGHRQRAMEISLTTGNYSRLACEIQFVRSMGYYLIQIYIPSGLIVIISWVSFWLNRNATPARVALGVTTVLTMTTLMSSTNAALPKISYVKSIDVYLGTCFVMVFASLLEYATVGYMAKRIQMRKQRFMAIQKIAEQKKQQLDGANQQQANPNPNANVGGPGGVGVGPGGPGGPGGGVNVGVGMGMGPEHGHGHGHHAHSHGHPHAPKQTVSNRPIGFSNIQQNVGTRGCSIVGPLFQEVRFKVHDPKAHSKGGTLENTVNGGRGGPQSHGPGPGQGGGPPGGGGGGGGGGGPPEGGGDPEAAVPAHLLHPGKVKKDINKLLGITPSDIDKYSRIVFPVCFVCFNLMYWIIYLHVSDVVADDLVLLGEE

SEQ ID NO: 22156 - DNA, 2575 bp, DROSOPHILA
aaaaacaatattcaaagtgctatagttttattgtgatatagaagttataagttataagtaatagaagttatagacttttgagaactgtgtttagattaatcaatcaataatattgagaactaaacctgacataacaacagttcatcatatatgataagctgttatctaaaacaagagagaatgcttagtggagttccccgactatcggatactctttactcagctggtgtgaatgcgaacgcgaaatttcataatttttctatgataccgatagatattatgaaataaaatgagaaaaaatttaaaaattgtttaaaatgtgggcgtgacagactcggctgctttagggcgttaaagtaggcgtggcaaaaaggtttttcgcaaatcaatagaaatttacaagactaataaaagtatgaaaaatatcgaaaaatggttcgaaaatgtgggcgtggtagttttggcggttgtagggagctagactgggcgtggcaaaaagttttttttttgcaaatcgatagaaacaagactaataaaaatgtgaaaaaattatcaacacgtttttaaaaaggttaggcgtgcttatcagcataaaatatatgagtccaagtaaaaacatttatttttgttgttgactctttttgtttttgtcagttctgggcacttttttttagctgctattagttaaacttaatgcatttgccatgacttcttatgtttttttagctccagttaaatagaaactacgagaagacagctgaaaaaggaatgcgaaactatgcaaactatatagatgaagatgtccgatttacatatcgtatagggcttttaacgattcagctttaggccgaattcaatttcacacatttatcacattttgctttatacactacaagtttgactagtttggcagcgttgggctcggtcgtcaaagtttgtccatccatctatataaagggagtacaaccatcagagggcatcattcgtcgcgaactgttcgagaaccgcagatcaaaacaccaaacaacaatcaccatgaaattcctgattgtcttcgtcgccctcttcgccgtggctctggctgctcctgccgctgaggaacccacaatcgtgcgctctgaatccgacgttggacccgaaagcttcaaatacgagtaagttgcctatgagaaatgacccaaaaggatacctagctgacactgacttccttcttagctgggaaacctccgatggacaggctgctcaagctgtaggtcagctgaacgacattggaactgagaacgaggctatctctgtgagtggatcctaccgcttcattgctgatgatggccagacctaccaagtcaactacatcgccgataagaacggattccagccccagggtgctcatctgcccgttgcccccgtggcctaagtgaaattgctttgacctttagcaattttaaagccatactatccaactccttgttaatagccccaaacattaccaaaccaatcctatccctgttttcaaaggatgggaactaagtcaaccagcaccacttgttaaatattaaaggaatttaattacctgaacttatgtgtgtttgttttcataaaattcataattattttatttttcagaagaagtcgaaattaagttttgaatacaattagcttttgattaacatatggggaaggtcgtagtcgaaaaagaaccgactgattatagatattcgaagaatagaaactggtcacagcgtgtatacgtgaccgctgcacgattaaatgtttgtaaaatactctgatatttgatatagaatactctgatatgtagaatattccatgcttgttggattgctgattgatattttctattaataattaatgtatataccaatagtagtgtacacaaagcatttgctgaggctttacttattcaaacattagatgataatatgagaaatgacaatggcaaaatcacaatgcacaataataaaaagttcgaatacagaactttatgcatctcgactagaagacatcgtttaaacctgagtttatatgtatatagcaaatggtgatcgtgtactgttttttatacaaattttcaccgttctatctgtttgtttcaaacaaacatgttcacgattagcttaattaaccaataagatttgagaattcaaaggtgatggcaaggtaaggcgtcattctgtctatcaattgactgtcgacaaggtaattgcatacattaccatctgttggatatacctgcatgcacgattagtgcagggtacttagagtgttaatctgtaattaaaatgtgttttattgaatgtttgcattatagctgatttctttatttttaatttgttttattattttgcatttttcgccgatgaggacataatccagagatttcgtataaaagggcatcagatgatcgcatcgcagctcagtaaagtgcagctagctgtgacggagactctgaaaaactaattctttccgcaatgcaatcgaatttcatgtggctggtagccttcctggcaattggtatctgtttggcctttcccgctggtgaggatgcccaggcggagac

SEQ ID NO: 22157 - DNA, 514 bp, DROSOPHILA
agaaccgcagatcaaaacaccaaacaacaatcaccatgaaattcctgattgtcttcgtcgccctcttcgccgtggctctggctgctcctgccgctgaggaacccacaatcgtgcgctctgaatccgacgttggacccgaaagcttcaaatacgactgggaaacctccgatggacaggctgctcaagctgtaggtcagctgaacgacattggaactgagaacgaggctatctctgtgagtggatcctaccgcttcattgctgatgatggccagacctaccaagtcaactacatcgccgataagaacggattccagccccagggtgctcatctgcccgttgcccccgtggcctaagtgaaattgctttgacctttagcaattttaaagccatactatccaactccttgttaatagccccaaacattaccaaaccaatcctatccctgttttcaaaggatgggaactaagtcaaccagcaccacttgttaaatattaaaggaatttaattacctgaa

SEQ ID NO: 22158 - protein, 105 aa, DROSOPHILA; identical to SEQ ID NO: 22149

SEQ ID NO: 22159 - DNA, 3257 bp, DROSOPHILA
acttttatctttcactcgtccgcttgggcactctctttctccgtttctgttgcctcctctctttcgcaccgcaaacaggtaagaccaggtaaaaaagtggttacacgcacaccgccaagcgcgcgcatttgtgtgcgtgtggttcggttcgctgcgttggtatgtgtgttaccaacgacttttggtaaaaaggcacttttcgatggtatttcgttgtgaacttgtactttctggcgaattattttaaataaaaagatcgcaaaacgtattttctttcacttcgatcgcttttattgtcgacttacaacgaagctgcggagccacaccgattttgaaactgcgatcgacgcgcgagacaaccgctcaattcaaaagcaaaaacacaatgcaacaaaaacaacgggcggcgttagagatgtgagacaccgtcgattcctcggtcatcgataattaacggttaataatctcgatgttttcgttttatcgatactatatactgtctacacttctcgataaatacgttgatgtgaatcaattacactggatttaatataacaaatatttctttaaaaatggaagctggaagataaaaatggcccagcttgggctttcaaatagaattattaacaactatttttcacaaacaaacaggttaattttaaacgagttgatcaatactttaatacttatataactgaaaaatatttaataaccaaaactagctaccatgtacaacaataacataatttgctttaaaaaagttctgattgagtttggttttgaacaggcaatgatatttattggtctcgaggaactatttctataatgtattacattctacatcgttaaaagtttttttattgcaattcaagtaacgcgccaagacttttgccattcacccgtcggattatggagcagtgtagactgcccgtaaaatacggtgaatcgcatccggtacaggtacacaaatatttcccatccctagcaaagagtggaaaaaaaagtgaatcgaatcgtcatcgtcttggcccattaattgcggagaaaaaagattgcagcgccgaaaaaacggtcaaggaagagttccagcgacaccgcaacttccaaccactccacaagaagatcccgtcgaaaggtagaaccctaggaaccggaggggaaaccagaccaaaccaaacaaccgcccagccccgatttcgtgaatcaccagtggaactatggagcagacaccgatcaccgatgcggagaaggtgcgcatcgtatcggacttcatcctacatgcgccgcccggcgagttcaacgaagtgttcaacgatgtgcgggagctcctcaagaatgacactctgctaaaggatggggctagccacgccttcgcccaatacaacaaggaccagctgactccggttcgcatcgagggcaccgatcataacgccatcatatcggaacacaacgatctgggtgagttcagttccatcaatgcccttaaatggacaaagcctgccatatgagtcacctacacacattgtttggctttcggtcgatatcttgagccccacactgataagcaattgcattccaggaaacggtcgcttctacgacccgcgcacaaagcaagccttcaaatacgaccacctccgaaaagaggcttccgactaccaggacgtagaggcagatgccactgcggagccctggagggcggccctcgacctggagacgctcgcctacactgccagtcattatagacacggggtaagttgaatgaaaaacgctctattgcttacaataacccgtaacattttctctacaggtcagctctgtttttggaaaggcgcagggcaaccagatcaccctgaccatttgcatcgaagaccaccagttccagccgaagaactattggaatggccgatggcgctcccagtggcatgtgaccttccaggcgggcagcggaaccgccgaactgaagggtgtgctcaaggtgcaggtgcattactacgaggacggcaacgtccagctggtgtcctcaaaggagtgccgcgaaagcgtggtggtcagcaacgagcagcaggtggccaaggaggtgatccgtctgatcgaggacgccgagaatgagtaccagctggccatttcggagaactatcagacgatgtcggacacgacattcaaggcaatgcgtcgccagttgcccatcaccaggaccaagatcgactggagcaaaatcgtctcgtacagcattggcaaggaactgaagacgcaataagaccaggaggtgcaagcggaagaggagcggacacagtcgacaaagcggcccaatagtcttccacttgccatggccaagcgagcataggaaccgatcaccagcattaacaccacagcatccgaaacgaagtagcaggaatacgagaaacgagggcggccaggtgcaggtgcctgccgaaaaagcaaatgtctgtaattggctatatacatacgaacatatacctacttatatatatatatacggcctgtatttatactgtgttatacaacgacgaaagtgcgtaaacataactacacatatatcgagtacgatcggagacgatttgattgcaaggatttggatgactttagcctgacggtgaacgatgcactgccgcctcgtctacgtcacgatcgccaccaattgtcgcctttatcgtttaagaagagcattaaacgcggattttatcatgtcctctgacctatgtattattctaattttaaacgaatcaagctcgagatctgcgctctcgatgagccagtcaattcttcgtgtctttgaagaccaaccagccgactctcgactattttaagtggtatcattaggagcactcattcaagtttttcgctttcccgattgttcacaaaccaaccacctagtatgagcatgaataataactatgctaaaccactgatcatttttgccagctctccattgacaaacaataactaaagactttgattttataaaaacaataaatttgtaattaaaataacataactataaaacatttaagattgcttgaattagtcaaatttaaagagaataaactaattgaatcggacattcggattgtcttcactttgaatgtgtttctggttgttgatccgatgcggatagaatgacattggaatcaacttgctgggcagtttgtttggttatactctcgggcagatcgaaggttagttcctcggattttttaagcaaaaatcgtttctctgggttgagttttgtttccagc

SEQ ID NO: 22160 - DNA, 1078 bp, DROSOPHILA
aaagtgaatcgaatcgtcatcgtcttggcccattaattgcggagaaaaaagattgcagcgccgaaaaaacggtcaaggaagagttccagcgacaccgcaacttccaaccactccacaagaagatcccgtcgaaaggtagaaccctaggaaccggaggggaaaccagaccaaaccaaacaaccgcccagccccgatttcgtgaatcaccagtggaactatggagcagacaccgatcaccgatgcggagaaggtgcgcatcgtatcggacttcatcctacatgcgccgcccggcgagttcaacgaagtgttcaacgatgtgcgggagctcctcaagaatgacactctgctaaaggatggggctagccacgccttcgcccaatacaacaaggaccagctgactccggttcgcatcgagggcaccgatcataacgccatcatatcggaacacaacgatctgggaaacggtcgcttctacgacccgcgcacaaagcaagccttcaaatacgaccacctccgaaaagaggcttccgactaccaggacgtagaggcagatgccactgcggagccctggagggcggccctcgacctggagacgctcgcctacactgccagtcattatagacacggggtcagctctgtttttggaaaggcgcagggcaaccagatcaccctgaccatttgcatcgaagaccaccagttccagccgaagaactattggaatggccgatggcgctcccagtggcatgtgaccttccaggcgggcagcggaaccgccgaactgaagggtgtgctcaaggtgcaggtgcattactacgaggacggcaacgtccagctggtgtcctcaaaggagtgccgcgaaagcgtggtggtcagcaacgagcagcaggtggccaaggaggtgatccgtctgatcgaggacgccgagaatgagtaccagctggccatttcggagaactatcagacgatgtcggacacgacattcaaggcaatgcgtcgccagttgcccatcaccaggaccaagatcgactggagcaaaatcgtctcgtacagcattggcaaggaactgaagacgcaataa

SEQ ID NO: 22161 - protein, 286 aa, DROSOPHILA
MEQTPITDAEKVRIVSDFILHAPPGEFNEVFNDVRELLKNDTLLKDGASHAFAQYNKDQLTPVRIEGTDHNAIISEHNDLGNGRFYDPRTKQAFKYDHLRKEASDYQDVEADATAEPWRAALDLETLAYTASHYRHGVSSVFGKAQGNQITLTICIEDHQFQPKNYWNGRWRSQWHVTFQAGSGTAELKGVLKVQVHYYEDGNVQLVSSKECRESVVVSNEQQVAKEVIRLIEDAENEYQLAISENYQTMSDTTFKAMRRQLPITRTKIDWSKIVSYSIGKELKTQ

SEQ ID NO: 22162 - DNA, 3068 bp, DROSOPHILA
ttagtacaatcgcttgtaggtcaacagtaaaactaactaaatactaaacctattccttggagacgggtttgcaggctatcatgtacactggaaagagtcccttgggaaagttttgttgcttgaccttgcgtacaatgcgaaatccggcttcctttaggaagtgttcatagctgtccagaggcctcgttaccgacgagtcgttcctatcttccactgtcttcttcgagctgctcacgttctccttcagacacaagaaggcgccgggcgccagtccctgctttatgcgtcgaaagaacgagaccagatcgcggtccgtgagatggcccaggacccactgggtccaaacgaggtcgtactgttgcgtaggcgtaaacttctgcaatcccacgttatagatctgtcccacctttccacggcttccgtcttccgaagtgcagtactcccgtgctttatcggcaaacgcgggatcctgctcgacaagatccacgcagctgaagcgggggatcaggagattccgagtcacccgaccaatgccagctccgcagtcgagggccaacctgttgcccggcacgcggatctcgcgcaggaacacattcgatccctgtatatctatggcactaatgtagcccaggccgccgagcatcccgttaacagtcgccggtacctcagaccaatatttttgtgccttattgtaaaattcggactccggtgcggcgactttggtcgaactatcgctcgaagaaggggacgctgtcttggcatctgaacttgcggctatactgctatcatccttctgcttcgacgacccctggaccttatccgtggtctcgtccatcatctgcaacttgtctgaaagctgctcttctaatgtagtcgtcatttttgtcaggatttcgaaggccgcatgctttgttttgttttagtgcgataaccagggctcctaaacacagtgagccatttaggttttacgaaagagtggcaacccttcaccaatcagctgttcaacaagcaacaaaattgtccgtttgtttatgttactagttttttgtttaatttttctattgtccggacaaaatgactctcgatttggatgcgcataagaaagatgacaagttgctgatcacaaccatacagcaggagtataaaattctggccgaatagtgagttttcagagttcactgataactacgtggagtaaaactaaacttatttaatttcttatgttttagcaaaatgattgagtcggagaagttgagtgggatatatgtgatacccagctatgctaactccttgcgttagtctacccacctgccaacctgtatgcagtctttagctaattttatcttttgttaatagagtggtttggagtcttctttggccgacagggcttgtatgcggaaagtgtttttcgattcacaattttgctcccagatcgttttcccgacgacaaaagtcttccggtgagtaggatcggcaatagagcaaacgtatttaactctacaagtcccctttagagcataattttccagcaggatgtgattcatccccatgtgtgcccgtacacccacagtttggacgtgagccacgccttcccggagtggcgctgtggagaggatcacctttggcagcttttaaagtacctgcaagtcattttctccgatcccttggacagtattcggggcattgaggtagataagctcaaaaacagcgaggctgcggagctgctgatgaataacaaggaggagtatgttgctcgcgtacaggaaaatatcaaggagagcaaggagcatatatttgacaccccacccaccgaagatccgcactacatagtattcgagaagttccagcaggacgtgcacgggcccgttctggagcgcatcaaggccggaagaagcaagctgacggagccttcagcgcaacaagcaaatggtggacatgcaactggtctgtcatgggttaaggagggcgagtttaagccacttagcattgagtaaaaccaatatacatatattctgtaagttatattctatcgttgtctcaattttaaaacgattaaagttattcaattatttacaatcctcgttcatgggaaatcgctgagtattgttaacccactcgttctgcaactctaaacgttctccgttccattggaaatgtgtgggggaagcctcgccagcgagaaactcaaagtgctggctgagctcgatggccagtttggagcggactaggcctattccgcccacctgtggcgcagctggatgatagacccttccgtttcgcggatccatgtacagtttgtggggttcgtaaggcagggtaaggacctgtcccgcgtgtgcatagctgagcacctccgtatcgtccttcctcagctgttcagtaaacacaacaggtgtgtcatcgcacctaataaaattcctttcgcggccacagagggaaatgtatggaaattcgctttcatatctgctcgttttgtttagccgcagtcggttgaaaaagaacttgaggaaatccttctccttaaagcagctggtgaagtttttcatctttgcatcgtccaggaagagctgcaaaacgggttatgcgagttgaagcacagatgcatagttgagagtctcaccattccctcatgatcgatatagtaaaagtattcgcgaatttttggctccggagattgaccttggttatattgtacgtaacggcaagatatgcttggagatctaacgaattttaggtttgtaagggatctagaacgtagtataaacattgttcctctatctgagtactgtgtcttcttatgagcaacaaaaacagctgacttttgtttactacatctgtaggtgcatttgataacctcccattatcaatttaacgtttttacagttttgtattttctcaataggtagcgattatttttgcaagtacattttttggcagtcacatatttttgcatcgcgaatacagcgatatacagaaatgaaaacattttatttaaaaaaaggtggctatgtgactgtctattgaattcgacatttggtcgaaaagctcaggttttgcttaaaatagca

SEQ ID NO: 22163 - DNA, 883 bp, DROSOPHILA
ttcaacaagcaacaaaattgtccgtttgtttatgttactagttttttgtttaatttttctattgtccggacaaaatgactctcgatttggatgcgcataagaaagatgacaagttgctgatcacaaccatacagcaggagtataaaattctggccgaatacaaaatgattgagtcggagaagttgagtgggatatatgtgatacccagctatgctaactccttgcagtggtttggagtcttctttggccgacagggcttgtatgcggaaagtgtttttcgattcacaattttgctcccagatcgttttcccgacgacaaaagtcttccgagcataattttccagcaggatgtgattcatccccatgtgtgcccgtacacccacagtttggacgtgagccacgccttcccggagtggcgctgtggagaggatcacctttggcagcttttaaagtacctgcaagtcattttctccgatcccttggacagtattcggggcattgaggtagataagctcaaaaacagcgaggctgcggagctgctgatgaataacaaggaggagtatgttgctcgcgtacaggaaaatatcaaggagagcaaggagcatatatttgacaccccacccaccgaagatccgcactacatagtattcgagaagttccagcaggacgtgcacgggcccgttctggagcgcatcaaggccggaagaagcaagctgacggagccttcagcgcaacaagcaaatggtggacatgcaactggtctgtcatgggttaaggagggcgagtttaagccacttagcattgagtaaaaccaatatacatatattctgtaagttatattctatcgttgtctcaattttaaaacgattaaagttattcaatt

SEQ ID NO: 22164 - protein, 244 aa, DROSOPHILA [sequence omitted]

SEQ ID NO: 22165 - DNA, 6180 bp, DROSOPHILA
aaaagggcgttgggcggagtccttaaaacgggctcaaaaacaagtagtcccaaaaccatgcatatgcctggacttacccaattttcaatgatgtttgcagctattgctgtttctatttgtttttattgtatgttttggtttgtttttgatgtagctggtggtgctgccgttgcttcagtggttgttgatgttgttgttattgctcttagttaacattccaatccgacgctggtgcgctgccgacgtcgctgcccactccgatgcctgtgctggcgctttaagccatcagccacatgcacatttcattggatttatcacgcatatatatagtaaggtgttccttaatatatatttataaacatttgcaccacctttccgatacgatccgatccgatatgaagaatataaatacacacatacacttgcacaagcactctcacgcatacacacaccgacacctggctgttggttttgtggaattttcgattgtattctccgtattttcggccctcctccgttgatgctgatgcatatccgcacttgcatccgtcttagttcatcccacgcatggcgtgccaataaaattcgattgctcaaacagtccgcaccacgggcgattttaatttaaacaaaaaattcacacgagagcagagcagccatcttgcgctagtgttgtttaaccgtttttgctggactgcagtgtgaccagtcggcaatggtgcagtaatgtaaacggagttggcggagcagatctggctattttatagctatgtgtgcttgtggctgtttttatattaatgttaaagaaaaaattaacaaatcaagaaaatttgtactttttataacctcctaatattgtatataaacatattcatataatcatataaatatcacaaaaaaacctttgatcaacgattgaattattgcattaaagaattatcaccgcagtgacatttaagcctctggtcacacagttccacacgtgcaatatttacgaaatatgcgcaatctgaagctgcgatattgcaaggagctgaatgcagtggctcatccccagcatctacttcttcaacctgaactaaatggcggcgcctcggacatatacttcgtggtggctgataacaagatctacgcggttcaggagtccggagatgtacgactaaaagtcattgccgatttgccggacatagtgggagtggagttcttacagctggacaatgcgatctgcgtggccagtggtgctggtgaagtgatcctggtcgacccccaaacaggagctaccagcgagggaacgttctgtgacgtgggcatagagagcatggcatggtcgcctaatcaggaagtggtggccttcgttacccgcactcacaacgtggtgttgatgaccagcacattcgacgttatagcggagcagccactggacgcggaactagacccagatcagcagtttgtcaatgtgggatggggcaagaaggagacgcagttccacggatcggagggaaagcaggctgcgaagcagaaagaatccgattctacattcatccgcgatgaacaggaattaaatcaggtgcgtttaatcttttaaccagcataaagaaaaacaataattcggttagtttaccccacaggatgtaagcatttcctggcgaggcgatggtgaattttttgttgtgtcttatgtggcagcccaattgggtcgcacctttaaggtgtacgatagcgagggaaaactgaatcacacagccgaaaagagtgcaaatctaaaagattctgttgtctggcggcctacgggtaattggattgccgtaccccagcagtttcccaacaagtctaccatagccctctttgagaaaaatggcttgcgacatcgggagctggtccttcccttcgatctccaggaggagccggtggtgcagctgcgctggagcgaggactccgacatactggccattaggacatgtgccaaagaagagcagagagtgtacctgtatacaataggtaactaccactggtatttgaagcaggtgttgatttttgaacaagcggatcctctggcactgctccattgggacacgcggtgtggagccgaacacacacttcacgttcttaaggaaagtggcaagcatctggtctaccgctgggcatttgccgtagatcgaaataattctatcgtgggagtcattgatggtaaacgcctgttgctcacagatttcgacgaggccatagtaccaccacccatgagtaagatcgtccttaaattcgaaacgtatatcaatgccttcatcagccatggtaccagcttgtgggtatatacttgcgatcgtaaaatatacctaaatgaacacatacatacgttaggcaaagagctacaaaagcccattatgcttatgcccgatgccgagctctctggcttgcatctggccaatctcacccatttctcgccccactatctgctggccactcacagttcagcaggatccacacgcctgctactgttgtcatataaggataatgacaacaagccaggcgagtggttctatcgagtgcacagttccgtgcggatcaacggattggtgaatgctgttgccgtcgcaccttatgccatgaatgagttttacgtgcaaacagtgaataatggtcacacatacgaggtgtcgcttaaagcggacaagacacttaaggtggagcgatcttatgtgcagctgcatgagccggctgaccagatagattgggttatcgtcaaaggatgtatttgggatggttacacaggtatttaacactgatcacttaaaaacgaaataattgaaatgcagttccttttaaatgtatttaatatttttctccctaggtgctctcgtcacccttcgcaatcagcatctactacatatcgatggttatcgcattggcgaggacgtcacttccttctgcgtagttactaattatcttgtatacacccagctaaatgcgatgcactttgttcaactggatgatcgccgccaggtggcaagcaggaacattgaacgcggtgcgaagatagtaacggcagtggcccggaaagcacgcgtcgtgctgcagttgccacgcggaaacctggaggccatttgccctcgtgtgcttgtcctcgagttggtcggtgatcttctggaacgtgggaaataccagaaggcaattgagatgtcgcgcaagcaacgtatcaacctgaacatcattttcgatcacgatgtgaagcggttcgtgtcctcagtgggcgcctttctgaacgatatcaatgaacctcagtggctctgcctgttcctcagtgagttacagaacgaggactttaccaaaggaatgtactccagtaattatgatgcgtccaaacagacctatccctcggattatagggtcgatcagaaggtggaatacgtgtgtcggctgctggaacaacaaatgaataggtttgttagccgttttcgtttgcctttgatcaccgcctatgtaaaattaggctgtttggaaatggctctccaggtgatttggaaggagcagcaagaagatgcgtcccttgctgaccagctactgcaacatcttctttatttggtggacgttaacgacctgtacaacgtggcccttggcacctacgatttcgggctcgtcttgtttgtggctcaaaagtcacaaaaggatcctaaggagtttcttccctatctcaacgatttgaaggcattgcctatagactatcgcaagttccggatcgatgatcatcttaaaagatatacttctgcactttcacatcttgctgcctgcggagagcagcattacgaggaagctctggagtatatccgtaagcatggcctgtacactgatggcttggcattctatcgggagcacattgagttccagaaaaacatctacgtggcctacgctgatcatcttagagccattgccaaactggacaacgccagtctcatgtacgaacgtggcggacagttgcagcaggcgctacttagtgcgaaacacactctcgattggcaacgtgttttggtgctggccaaaaagctgagtgaacctctggatcaggtggcccagtcgctggtggggccgttgcaacagcagggtcgccacatggaagcgtatgagttggtaaaggagcactgtcaggatcgaaagcggcagttcgatgtgttgcttgagggtcatctgtacagcagagccatttacgaggcgggtctggaggatgatgatgtctcaggttagccattgctataatacgatagttgcaagtaataacttctttcgtttaagcagaaaaaatagcgcccgctttgttagcatatggtgttcaactagaaagctccctgcaagctgatctgcaactcttcctcgattacaagcagcggcttttggacatccgccggaatcaagcaaaatccggtgaggggtatattgatacggatgtgaatctgaaagaggtggacctactgtcggacaccaccagtctccactcctcgcaatacagtggcacatcacgaaggactgggtaatccaacgaatgcttcaatgcacccggccaaagtttcacttttccgttgtgttcctcctttccagcaagacattccgctcaagcaaaaaccgacgcaagcacgaacgcaagctgttcagcctgaagccgggcaaccccttcgaagacatcgcgctcatcgatgcgctgcacaaccacgtcacgaagatagcccaacagcagcagcctgtgcgtgacacatgcaaagcgctcctacagctcgccaatgccgcggatgcagatcccctggcagccgcactgcagcgtgaattcaagacactgttgcaagcggtggatgcggcgctggacgagatctggacacctgagctacgggggaacggattgatggcggatcaccttacgggacccaatgtggattaccttgcactgcagaaggagcagcgctatgccttgctaagtgggtgtcttgtgtcaataacaaattcatagcttcgcttaaattaaattttcaaataggatggattttgttgaaatctctatgtcaattttaagagaccaaaaaaattaccatatagtatgtactttaattttaatgaaaatcttttctttttcaggtcccctgaagcgcttcaagccgcagctgattatgatggactggcaacacgagatcctccagtgaatcttcgacgggatcattggatttgcgtgctgcactcatcctcccaccaatccgtagtcgtctcagtctcccacttttgttaactttcactgctttaaaaataaatgtagcattgaaatgctaattgaatgtatcgagattaaacaaaacgaagcgcagtgggcagtctagtgccagtcggatgacaggcagctggcaaaagtgggcgacacgtctccacaaattcctgcttaattggagattatcgcatttattagggggcgtcggctctttgtatttacactaagctacgccctttatattccaatgccagagatcaaaacatattacccgataatatcaatatcctgctcccgccgctctagacaatcattttgtttgccaaacaaaaaccgtaagtgtctggaaccggtttcaactgtacgggatttgttgtgggcgctcgttgttgccaggtagacgtgatatgaacactggtcaaaaacgttcttgaatggagctcggaataagagcgatttgaatatattatataagtatgatattataaatatgtgatttattcttgcaataacattttattcaattttcaagattatgttaagtatcctggtccaaacgggtcccctttaacagtgcacttgcacttttctgttaaagcgctgttaagagtcgcattcagacatgcgcatttgcgcacactcgcttttacacagtggtactttagacaaatagttgaaaattttagttgaaaaatataataatataataaagttatttccagtttttaagtcttcttacatttgatgtgttatttgttgttgatttgacagaaaactggccacagaagccttataatttctcatgtagattgcctacatcacccactgtgccacttctctctttccctctctctttgcttgcttcgcagccgcagcgagctccacagtggaaaacagaagtttattaagcaaaaaatcgccgaacgagtcggacgtgtgcg

SEQ ID NO: 22166 - DNA, 3642 bp, DROSOPHILA
atgcgcaatctgaagctgcgatattgcaaggagctgaatgcagtggctcatccccagcatctacttcttcaacctgaactaaatggcggcgcctcggacatatacttcgtggtggctgataacaagatctacgcggttcaggagtccggagatgtacgactaaaagtcattgccgatttgccggacatagtgggagtggagttcttacagctggacaatgcgatctgcgtggccagtggtgctggtgaagtgatcctggtcgacccccaaacaggagctaccagcgagggaacgttctgtgacgtgggcatagagagcatggcatggtcgcctaatcaggaagtggtggccttcgttacccgcactcacaacgtggtgttgatgaccagcacattcgacgttatagcggagcagccactggacgcggaactagacccagatcagcagtttgtcaatgtgggatggggcaagaaggagacgcagttccacggatcggagggaaagcaggctgcgaagcagaaagaatccgattctacattcatccgcgatgaacaggaattaaatcaggatgtaagcatttcctggcgaggcgatggtgaattttttgttgtgtcttatgtggcagcccaattgggtcgcacctttaaggtgtacgatagcgagggaaaactgaatcacacagccgaaaagagtgcaaatctaaaagattctgttgtctggcggcctacgggtaattggattgccgtaccccagcagtttcccaacaagtctaccatagccctctttgagaaaaatggcttgcgacatcgggagctggtccttcccttcgatctccaggaggagccggtggtgcagctgcgctggagcgaggactccgacatactggccattaggacatgtgccaaagaagagcagagagtgtacctgtatacaataggtaactaccactggtatttgaagcaggtgttgatttttgaacaagcggatcctctggcactgctccattgggacacgcggtgtggagccgaacacacacttcacgttcttaaggaaagtggcaagcatctggtctaccgctgggcatttgccgtagatcgaaataattctatcgtgggagtcattgatggtaaacgcctgttgctcacagatttcgacgaggccatagtaccaccacccatgagcaaagagctacaaaagcccattatgcttatgcccgatgccgagctctctggcttgcatctggccaatctcacccatttctcgccccactatctgctggccactcacagttcagcaggatccacacgcctgctactgttgtcatataaggataatgacaacaagccaggcgagtggttctatcgagtgcacagttccgtgcggatcaacggattggtgaatgctgttgccgtcgcaccttatgccatgaatgagttttacgtgcaaacagtgaataatggtcacacatacgaggtgtcgcttaaagcggacaagacacttaaggtggagcgatcttatgtgcagctgcatgagccggctgaccagatagattgggttatcgtcaaaggatgtatttgggatggttacacaggtgctctcgtcacccttcgcaatcagcatctactacatatcgatggttatcgcattggcgaggacgtcacttccttctgcgtagttactaattatcttgtatacacccagctaaatgcgatgcactttgttcaactggatgatcgccgccaggtggcaagcaggaacattgaacgcggtgcgaagatagtaacggcagtggcccggaaagcacgcgtcgtgctgcagttgccacgcggaaacctggaggccatttgccctcgtgtgcttgtcctcgagttggtcggtgatcttctggaacgtgggaaataccagaaggcaattgagatgtcgcgcaagcaacgtatcaacctgaacatcattttcgatcacgatgtgaagcggttcgtgtcctcagtgggcgcctttctgaacgatatcaatgaacctcagtggctctgcctgttcctcagtgagttacagaacgaggactttaccaaaggaatgtactccagtaattatgatgcgtccaaacagacctatccctcggattatagggtcgatcagaaggtggaatacgtgtgtcggctgctggaacaacaaatgaataggtttgttagccgttttcgtttgcctttgatcaccgcctatgtaaaattaggctgtttggaaatggctctccaggtgatttggaaggagcagcaagaagatgcgtcccttgctgaccagctactgcaacatcttctttatttggtggacgttaacgacctgtacaacgtggcccttggcacctacgatttcgggctcgtcttgtttgtggctcaaaagtcacaaaaggatcctaaggagtttcttccctatctcaacgatttgaaggcattgcctatagactatcgcaagttccggatcgatgatcatcttaaaagatatacttctgcactttcacatcttgctgcctgcggagagcagcattacgaggaagctctggagtatatccgtaagcatggcctgtacactgatggcttggcattctatcgggagcacattgagttccagaaaaacatctacgtggcctacgctgatcatcttagagccattgccaaactggacaacgccagtctcatgtacgaacgtggcggacagttgcagcaggcgctacttagtgcgaaacacactctcgattggcaacgtgttttggtgctggccaaaaagctgagtgaacctctggatcaggtggcccagtcgctggtggggccgttgcaacagcagggtcgccacatggaagcgtatgagttggtaaaggagcactgtcaggatcgaaagcggcagttcgatgtgttgcttgagggtcatctgtacagcagagccatttacgaggcgggtctggaggatgatgatgtctcagaaaaaatagcgcccgctttgttagcatatggtgttcaactagaaagctccctgcaagctgatctgcaactcttcctcgattacaagcagcggcttttggacatccgccggaatcaagcaaaatccggtgaggggtatattgatacggatgtgaatctgaaagaggtggacctactgtcggacaccaccagtctccactcctcgcaatacagtggcacatcacgaaggactggcaagacattccgctcaagcaaaaaccgacgcaagcacgaacgcaagctgttcagcctgaagccgggcaaccccttcgaagacatcgcgctcatcgatgcgctgcacaaccacgtcacgaagatagcccaacagcagcagcctgtgcgtgacacatgcaaagcgctcctacagctcgccaatgccgcggatgcagatcccctggcagccgcactgcagcgtgaattcaagacactgttgcaagcggtggatgcggcgctggacgagatctggacacctgagctacgggggaacggattgatggcggatcaccttacgggacccaatgtggattaccttgcactgcagaaggagcagcgctatgccttgctaagtcccctgaagcgcttcaagccgcagctgattatgatggactggcaacacgagatcctccagtga

SEQ ID NO: 22167 - protein, 1213 aa, DROSOPHILA
MRNLKLRYCKELNAVAHPQHLLLQPELNGGASDIYFVVADNKIYAVQESGDVRLKVIADLPDIVGVEFLQLDNAICVASGAGEVILVDPQTGATSEGTFCDVGIESMAWSPNQEVVAFVTRTHNVVLMTSTFDVIAEQPLDAELDPDQQFVNVGWGKKETQFHGSEGKQAAKQKESDSTFIRDEQELNQDVSISWRGDGEFFVVSYVAAQLGRTFKVYDSEGKLNHTAEKSANLKDSVVWRPTGNWIAVPQQFPNKSTIALFEKNGLRHRELVLPFDLQEEPVVQLRWSEDSDILAIRTCAKEEQRVYLYTIGNYHWYLKQVLIFEQADPLALLHWDTRCGAEHTLHVLKESGKHLVYRWAFAVDRNNSIVGVIDGKRLLLTDFDEAIVPPPMSKELQKPIMLMPDAELSGLHLANLTHFSPHYLLATHSSAGSTRLLLLSYKDNDNKPGEWFYRVHSSVRINGLVNAVAVAPYAMNEFYVQTVNNGHTYEVSLKADKTLKVERSYVQLHEPADQIDWVIVKGCIWDGYTGALVTLRNQHLLHIDGYRIGEDVTSFCVVTNYLVYTQLNAMHFVQLDDRRQVASRNIERGAKIVTAVARKARVVLQLPRGNLEAICPRVLVLELVGDLLERGKYQKAIEMSRKQRINLNIIFDHDVKRFVSSVGAFLNDINEPQWLCLFLSELQNEDFTKGMYSSNYDASKQTYPSDYRVDQKVEYVCRLLEQQMNRFVSRFRLPLITAYVKLGCLEMALQVIWKEQQEDASLADQLLQHLLYLVDVNDLYNVALGTYDFGLVLFVAQKSQKDPKEFLPYLNDLKALPIDYRKFRIDDHLKRYTSALSHLAACGEQHYEEALEYIRKHGLYTDGLAFYREHIEFQKNIYVAYADHLRAIAKLDNASLMYERGGQLQQALLSAKHTLDWQRVLVLAKKLSEPLDQVAQSLVGPLQQQGRHMEAYELVKEHCQDRKRQFDVLLEGHLYSRAIYEAGLEDDDVSEKIAPALLAYGVQLESSLQADLQLFLDYKQRLLDIRRNQAKSGEGYIDTDVNLKEVDLLSDTTSLHSSQYSGTSRRTGKTFRSSKNRRKHERKLFSLKPGNPFEDIALIDALHNHVTKIAQQQQPVRDTCKALLQLANAADADPLAAALQREFKTLLQAVDAALDEIWTPELRGNGLMADHLTGPNVDYLALQKEQRYALLSPLKRFKPQLIMMDWQHEILQ

SEQ ID NO: 22168 - DNA, 4003 bp, DROSOPHILA
attaaaacttaattttacaaaaaaaaaattaaacgaaatgtttgtttggttggcgggggggggggggtgttttctcgatgcgaagctttgggagcttttaagcgccgtcaaccgaaatgggggctcgtcagcggctctcaaactgtgccgaggaagtttgagagcctatgaaggcggtaactaattaataaatttccttttattagcacatgccttttaagtttacacaattttaatagtttctaaatgaaagtgaaatgtaactattatttatttgattagttttttttctttattcagtggtttctatttatgctagtgccctttttacgctgctctttcaaatgccaatcatcgacgtttctttatttttagccatttcccacctgggcacgcaaatggcaattgattagcataattaatggcaaaaactttgcaataaagtaaaaagttcgaagaagggccccgagccaagtcaaatgacggaggcgcaaaagcgaaagtatgttagcataaatcgatcaaggaggagcagccgccggccgaaagggggaatcccaccgaggtgccgtaagacgggaccgcaaggtgcaggagcagccggcggctccttcgccggatttgagcgctgtgtgcccaattggattgactgtcaggtgacacacggcacaagcgcattggacgagcacatgcacacggtcgtatggcattggtacactgagagaaagggagccgaggaattggaaatatttaggataatagcatatcattctacaatttggaaaagaggaacattatgtgcgttctcaataatgaatttatattactactcccatgtttatcatgctaagatgcatcatagtattaggttaaacaccctactttggtgcagtgtatgctaaagggaagggggggggggaggtatgactggggctagtcagcaacataacaataaataccgctaggcaaccgtaaattccctagcatgaatcgatttaacatgaccgcgggagcggagggcaggccactcagttcgccagcgaagctcctccgtccaactccggccgagattccgagccaggcagccagccagccaggtacatacgatttcctgcccggtctccagagaagtgtgccaggtgggtataatcgagtgtagagatttgcagtgacagttccactttttacccagcgctccttgcatacatttcttatatacatacttcttatgcaatcttaatcgcacccaatcccagcgagaaacatgttgcccaacctgaagtcgcgccgcatcagcggcctgcagctggccgggaagcacctgggtccggtggccaagtgcccgcccagatattccgaggaggactgggactataacaacaagatcaagtttcgaatcacctgcgaccaggagaagctggcggagcggatcgtggagtgagtatatcgggcgggtggcggattcattgggagcggattcaagttggtgaccctattctatgcagggagtcgcgtcgcgtggtggacgaaacgaaggacaccacaaagaactggcaacgggaggtggagcaccatatgcgcgaacggacgagcgaaatccgattcctggtggacgagttgaatcgccagaagaagaccgccgccctggaggatgaggccttgaacacctatcgcaatcgcgtgctgaactgcatcgagttcctgaaggacaagtcgctggccatttgcaagcagtgcctgatcctacgcgaaggtcggatcggtgtggatttgtgcgacgacgaggtggatcgctcgctgcgccgtgagctcaaggtgatcaagggctgtcagggattggccgatgccgccctcaaggaagccgaggagcagatccgcaagctgcgcgccgccatctatttgctcgatcaggatctggccgccaaggataagtcactggccatcgacgagaagaacctgaagctcaaggagttccagcacgacctggctaagggacaggatttgtccaaacagcattggtaggtttttgaaaactaggttgcatgtcaatcacacatgttggggtttcctttttaaggaatgatgaagtggattgattattaatcttttttctttcacttttatgcgtaagtcatttcggtgttcatcagtacaaggagtttaaaaggataaacattttactagagtcttatccacaaattccattacaaagtcaagtagttgttccccttttcagttaggaatggaattgaggaaggtcaaacctaacaatgaaaccgcagtttccttggtgatatgggatagagttgtcctgagtctattttagtgcattggaattaagtgatttatttacaaccactcaaatcgacctgatagttgccatgactccaccatgcctttacccccttctcttccttacccagccaattttcgctgaccgagtggcaggcgcagacgtacgagaatctggaggccaacgccaaggcgctggtgtccgccgggcagctgcgggcctacatcgatttgctgctgaagcaggtgtgcgaggatatgcagaaccagacggacaggaccaacgaggcctttgagcgaaggatctcggagacgaagcacgtgaaacagtgtttggagaacaagcacaaggacaccatggatcacatccatcaggtgcagcgcaacatgaccgagctggagaaggagatgatggacaagcagcgggccattacactgtgccagacgcggctcagcaatcgcgcccatcgtcctggcctggagctgacctgcgacatggtccaggatgcgctttacaacgaactgcaggcgctgaaggcatccgtatgcaagctcaatcagaagctgaacgagaacaaggcatccatgcgctacctgatgcacgtccaggtgatgcaggaggaggagatcaacatcaaggcgaacacctgcaagatcgacgaggtcgactgcatgaccctgcgacaggccctgaagtaccaaacattttagtcgggcagcactacatccagtacagcaccagtccagtagtcgccacacagcccagccaccaataatcaaattaaaatctaattattagatgcatgtgcatttcgtgttcgatcccaaattacttaataaattgaaattcactttcgatttccagttaccaaaactatggctttttaatgcatttttaaattgttcattttattcgaaatagttaatcatatatttcttttgcttaattttcgtgaatttaaatttcccgctttgaatctagtatttttagttttacctgcctctattcgatatttaccgctaagcacagacatatagttatcgataacgtgaacgcaaatgcgagggagtattgcaaatagtgttaccgtgctgctgtgaaaattcccaggtgtgaccgcagcccgcattcgatattgatgaagccaggcaaaacgtagaaaagcaaaagaaaaccttaattaatgttaagttaaaagtgtataaacccgagattaaggtaagtggcccaccaccatctagattttgagtacaccgaaggcatggcgatgttggcagtggcgggagcgttacgcctctaccgccaccgcctccgccgcacacgataaaaaatggagtacagccacgaatgggcaaatcaataattttcaacactccaattgtttttacaactgaaatcagtcctaatcttgttttccgcagtgcaaggatgtcgaaacggagcgccgacgacgccaccggcagcagctgcttggtggccgccgcagccgccggccagccgcccatcaagaaggtgcacttcgagccccatctgattgggccggtgtccacgctggaggagatggacatcaaggtgctggaattccagaacaagaagctagcacagcgcatcgaacagcggatgcgaacggaggcggagctgcgacatcgaatcgagcagctggaaaagcggcaaacgcaggacgacgccgttctaaacgtggtcaatcgg

SEQ ID NO: 22169 - DNA, 1413 bp, DROSOPHILA
atgaccgcgggagcggagggcaggccactcagttcgccagcgaagctcctccgtccaactccggccgagattccgagccaggcagccagccagccaggtacatacgatttcctgcccggtctccagagaagtgtgccagcgagaaacatgttgcccaacctgaagtcgcgccgcatcagcggcctgcagctggccgggaagcacctgggtccggtggccaagtgcccgcccagatattccgaggaggactgggactataacaacaagatcaagtttcgaatcacctgcgaccaggagaagctggcggagcggatcgtggaggagtcgcgtcgcgtggtggacgaaacgaaggacaccacaaagaactggcaacgggaggtggagcaccatatgcgcgaacggacgagcgaaatccgattcctggtggacgagttgaatcgccagaagaagaccgccgccctggaggatgaggccttgaacacctatcgcaatcgcgtgctgaactgcatcgagttcctgaaggacaagtcgctggccatttgcaagcagtgcctgatcctacgcgaaggtcggatcggtgtggatttgtgcgacgacgaggtggatcgctcgctgcgccgtgagctcaaggtgatcaagggctgtcagggattggccgatgccgccctcaaggaagccgaggagcagatccgcaagctgcgcgccgccatctatttgctcgatcaggatctggccgccaaggataagtcactggccatcgacgagaagaacctgaagctcaaggagttccagcacgacctggctaagggacaggatttgtccaaacagcattgccaattttcgctgaccgagtggcaggcgcagacgtacgagaatctggaggccaacgccaaggcgctggtgtccgccgggcagctgcgggcctacatcgatttgctgctgaagcaggtgtgcgaggatatgcagaaccagacggacaggaccaacgaggcctttgagcgaaggatctcggagacgaagcacgtgaaacagtgtttggagaacaagcacaaggacaccatggatcacatccatcaggtgcagcgcaacatgaccgagctggagaaggagatgatggacaagcagcgggccattacactgtgccagacgcggctcagcaatcgcgcccatcgtcctggcctggagctgacctgcgacatggtccaggatgcgctttacaacgaactgcaggcgctgaaggcatccgtatgcaagctcaatcagaagctgaacgagaacaaggcatccatgcgctacctgatgcacgtccaggtgatgcaggaggaggagatcaacatcaaggcgaacacctgcaagatcgacgaggtcgactgcatgaccctgcgacaggccctgaagtaccaaacattttag

SEQ ID NO: 22170 - protein, 470 aa, DROSOPHILA
MTAGAEGRPLSSPAKLLRPTPAEIPSQAASQPGTYDFLPGLQRSVPARNMLPNLKSRRISGLQLAGKHLGPVAKCPPRYSEEDWDYNNKIKFRITCDQEKLAERIVEESRRVVDETKDTTKNWQREVEHHMRERTSEIRFLVDELNRQKKTAALEDEALNTYRNRVLNCIEFLKDKSLAICKQCLILREGRIGVDLCDDEVDRSLRRELKVIKGCQGLADAALKEAEEQIRKLRAAIYLLDQDLAAKDKSLAIDEKNLKLKEFQHDLAKGQDLSKQHCQFSLTEWQAQTYENLEANAKALVSAGQLRAYIDLLLKQVCEDMQNQTDRTNEAFERRISETKHVKQCLENKHKDTMDHIHQVQRNMTELEKEMMDKQRAITLCQTRLSNRAHRPGLELTCDMVQDALYNELQALKASVCKLNQKLNENKASMRYLMHVQVMQEEEINIKANTCKIDEVDCMTLRQALKYQTF

SEQ ID NO: 22171 - DNA, 5301 bp, DROSOPHILA
attacactgtgccagacgcggctcagcaatcgcgcccatcgtcctggcctggagctgacctgcgacatggtccaggatgcgctttacaacgaactgcaggcgctgaaggcatccgtatgcaagctcaatcagaagctgaacgagaacaaggcatccatgcgctacctgatgcacgtccaggtgatgcaggaggaggagatcaacatcaaggcgaacacctgcaagatcgacgaggtcgactgcatgaccctgcgacaggccctgaagtaccaaacattttagtcgggcagcactacatccagtacagcaccagtccagtagtcgccacacagcccagccaccaataatcaaattaaaatctaattattagatgcatgtgcatttcgtgttcgatcccaaattacttaataaattgaaattcactttcgatttccagttaccaaaactatggctttttaatgcatttttaaattgttcattttattcgaaatagttaatcatatatttcttttgcttaattttcgtgaatttaaatttcccgctttgaatctagtatttttagttttacctgcctctattcgatatttaccgctaagcacagacatatagttatcgataacgtgaacgcaaatgcgagggagtattgcaaatagtgttaccgtgctgctgtgaaaattcccaggtgtgaccgcagcccgcattcgatattgatgaagccaggcaaaacgtagaaaagcaaaagaaaaccttaattaatgttaagttaaaagtgtataaacccgagattaaggtaagtggcccaccaccatctagattttgagtacaccgaaggcatggcgatgttggcagtggcgggagcgttacgcctctaccgccaccgcctccgccgcacacgataaaaaatggagtacagccacgaatgggcaaatcaataattttcaacactccaattgtttttacaactgaaatcagtcctaatcttgttttccgcagtgcaaggatgtcgaaacggagcgccgacgacgccaccggcagcagctgcttggtggccgccgcagccgccggccagccgcccatcaagaaggtgcacttcgagccccatctgattgggccggtgtccacgctggaggagatggacatcaaggtgctggaattccagaacaagaagctagcacagcgcatcgaacagcggatgcgaacggaggcggagctgcgacatcgaatcgagcagctggaaaagcggcaaacgcaggacgacgccgttctaaacgtggtcaatcggtattggaatcagctgaacgaggacatacgagtcctgctgcagcgcttcgatgccgagacggccgacgaactggagaaccggaatgagaacgaggtgaccacctcgtttctcgcccaactgtccacctgggacaaggaggagctggacgagaagctggccaaccgcgtccaagtgtccaaaagggcggtcgccaagatcgtacaggttattgataggttaatgcaacgcaatgaaaagataactcatgtcttgaaaggtgatagtctggcttcagctggctccggttcaggagcgggagctggcggcgaggaggagcagcagcaggccagcggcgatgcggagaccacaacgtcatcggccggtgtccatgcgctagaggaaaccctgaagcaaacgcacatcgagatcatgagcgaaaatcacaagctgcagaatctgaatacctcgctgcacgagaagttccacaccatgtcgctgaagatgaaggagtaccaggacgctcataccgccaaggagacggagaacgccgaactgaagaaccagatagacgaactgcaatatgacctagagaagatccattgccggaatgataagctggagaaccacttggccgaggctattgaaaagctgaaggcctaccaccagatttacggtgatcccaataagagcactaatagtgccaagacaccaactaccacaggcagcggcggcgccaccaccagcgttaatagccagctattggaggagctgcaaaaggagctggaggagtaccgcgaactggccaacaaccgactgcaggagctggataagcttcacgccacgcatcgcgaaaccctgaaggaggtggagaagcttaaaatggatgtaagttttgaatgaataatgtattagcttatctggagcattgctaattatagttagtcatttcgtttatattttctttgtattatactgattcatccttaaaatccattccagatacgacagttgccggaatcggtaattgtggaaaccacggagtacaagtgcctgcagagccagttttccgtgctctacaacgagtccatgcagataaagaccatgctggacgagacccgaaaccagcttcaaacgagcaagaaccagcatctgcgacaaatcgaagtgatggagagcgaggaacttattgcccagaagaaggtgcgcagcgagatgatccagatggaggacgttttagccctcatccgaaaggagtacgaaacgctacgcattgagttcgagcagaacatggcagccaacgagcagacggcacccatcaatcgcgagatgcgccacctgatcacctctctacaaaaccacaatggccaactgaagggtgaggtgcagcgctacaagcgaaagtacaaggacacgtccacggacaacttgaagctgcgtcaggagctggccgatgcactagctacactcgaaggcaacaagttgcaggcggcgactggtgcggctggcgaagaaatcaagcaggagaactcaacaggtgtgaaggaggagaactccaacaacgtttccgccagtggacaaacaaaccaaacaaattccggcaacgataccaacgtagccatcaaggaggagaaccatatctcggctgaagatgaagctgatgacgaggccagtggtaaggacgtaaaagacggcatcaagcaggagaagctcagttctggagacgcggcggcagctgagaagaaggattcccctggacccggaaactcaacaagttctgcgaccaattctgttcccgtcaaaaacgaaaaggattccaaggatggtgtcaagggcaaggatgtgaaggcagtggaaagtgaaacggtgcgcgatctgaaggcgcaactaaagtaagtttgttcagcaattacgattatctatttaacattgtttgatttacagaaaagcactgaacgaccagaaagaaatgaaactcctgctggatatgtacaaaggcgtatcgaaggatcagcgcgacaaggtccagttgatggccaccgaaaagaaactgcgctccgagatcgaggagctccgccagcagctgaagaagctgcaggaaagcaagcgcgaggaacgcaagaagctggccgacgaggaggcgttacgtaagattaagcaattggaggagcagaagtacgagctgcaaaaacagatggccaaccacaagccaacggataattcttggggcagtggagcccccggcacagcgaactacacgcgaccgtttgttggttcccacgaagaggaggcactgctgaacgagatggaggttaccggccaggcgttcgaggacatgcaggagcagaactcccggctcatacaacagctgcgtgagaaggacgatgcgaactttaagctaatgtcggagcgcatcaaggccaaccagctgcacaaacttctgagagaggaaaagacggtgctggaggatcagatggcaacggcgaccacgcaaatcgaagccatgcacattgtgctgcgaaagctggaggagaaggaacgcagcctgcaggccaccgtcgcgtcgattgagaaagagttgatgctgcggcagcaagcaatggagatgcacaaacgcaaggcgattgaatcggcgcaatcggcagcggacctcaagctgcatctggaaaagtatcacgcgcaaatgaaggaggcgcagcaagtggtggcggagaagaccagttcgctggaggcggaggcctacaagaccaagcggctgcaggaggagctggcgcagtttaaacgcaaggcggagcgcatgaagaagatggaaatgtcgggcaccaccatcgacgaggtgatgattgaggagatccgcgaatacaaagaaacgctcacgtgtccctcgtgcaaggtgaagcggaaggatgctgtcctgtcaaagtgtttccacgtcttctgctacgactgcctgcgcactagatatgaaacgcggcagcggaagtgtcccaaatgcaactgcgccttcggcgccaacgattatcataggctatatctgcagtagataagcgataatttagatacgttccggtcatgtcctattcatacacaaatccacccacgccacacaccactaccgcacacccagcattcatgccggattattattcattatgcatatattacctacgtactaatatttggttaagtagtctccgaataactttcccccaccagatttcccatggcaattatttgaattcgttcattctggcgccaagcaaaagcatctcattatgagtgccgcgagatcgtgacgcggtttttatgtagcttctagtttttgtaaatcaaactatttttaaatgatttcatttgaaaactaaatgtacgaacactaataaatggctaaaacctattgtttagcatgccccgagttatttagataccccatatatacataagtgtaggttctttgtcttgcattcagttagcattatattaagcgtattctaatcttaagttaaatactcctattgtaatgatcaaacgtagcatagatatcaaatgtataaacttggcggagaatccgtttaaaagtcgcgctttgctttgaagggctgctaacttggttataattgataagtaattgtaataatgtatgatcgaaaattgttgttcagctgaacaaaacgagttttgattgcttttttgtttgtgtgtaaatgtgttcgttctttatgtgtactgtttaacgaataaagaaactaatgatcagaaatcgtgactttcaatcaatgttatctctctacatgaaatccacctgttagagctgttagcacccacgcactcatgttaataacatcgatgcttatctgaaacctgtaaccattggcgcgcaacaggttatcggggtttaaaacgctatgctggtattttgttctctacagaaagtaggaaagtggccataactataattttatgtataaacagtttgatcatattctaaatttctattttatggcacaagaacataaaacgaatggttaatttaactcaactgg

SEQ ID NO: 22172 - DNA, 3096 bp, DROSOPHILA
atgtcgaaacggagcgccgacgacgccaccggcagcagctgcttggtggccgccgcagccgccggccagccgcccatcaagaaggtgcacttcgagccccatctgattgggccggtgtccacgctggaggagatggacatcaaggtgctggaattccagaacaagaagctagcacagcgcatcgaacagcggatgcgaacggaggcggagctgcgacatcgaatcgagcagctggaaaagcggcaaacgcaggacgacgccgttctaaacgtggtcaatcggtattggaatcagctgaacgaggacatacgagtcctgctgcagcgcttcgatgccgagacggccgacgaactggagaaccggaatgagaacgaggtgaccacctcgtttctcgcccaactgtccacctgggacaaggaggagctggacgagaagctggccaaccgcgtccaagtgtccaaaagggcggtcgccaagatcgtacaggttattgataggttaatgcaacgcaatgaaaagataactcatgtcttgaaaggtgatagtctggcttcagctggctccggttcaggagcgggagctggcggcgaggaggagcagcagcaggccagcggcgatgcggagaccacaacgtcatcggccggtgtccatgcgctagaggaaaccctgaagcaaacgcacatcgagatcatgagcgaaaatcacaagctgcagaatctgaatacctcgctgcacgagaagttccacaccatgtcgctgaagatgaaggagtaccaggacgctcataccgccaaggagacggagaacgccgaactgaagaaccagatagacgaactgcaatatgacctagagaagatccattgccggaatgataagctggagaaccacttggccgaggctattgaaaagctgaaggcctaccaccagatttacggtgatcccaataagagcactaatagtgccaagacaccaactaccacaggcagcggcggcgccaccaccagcgttaatagccagctattggaggagctgcaaaaggagctggaggagtaccgcgaactggccaacaaccgactgcaggagctggataagcttcacgccacgcatcgcgaaaccctgaaggaggtggagaagcttaaaatggatatacgacagttgccggaatcggtaattgtggaaaccacggagtacaagtgcctgcagagccagttttccgtgctctacaacgagtccatgcagataaagaccatgctggacgagacccgaaaccagcttcaaacgagcaagaaccagcatctgcgacaaatcgaagtgatggagagcgaggaacttattgcccagaagaaggtgcgcagcgagatgatccagatggaggacgttttagccctcatccgaaaggagtacgaaacgctacgcattgagttcgagcagaacatggcagccaacgagcagacggcacccatcaatcgcgagatgcgccacctgatcacctctctacaaaaccacaatggccaactgaagggtgaggtgcagcgctacaagcgaaagtacaaggacacgtccacggacaacttgaagctgcgtcaggagctggccgatgcactagctacactcgaaggcaacaagttgcaggcggcgactggtgtgaaggaggagaactccaacaacgtttccgccagtggacaaacaaaccaaacaaattccggcaacgataccaacgtagccatcaaggaggagaaccatatctcggctgaagatgaagctgatgacgaggccagtggtaaggacgtaaaagacggcatcaagcaggagaagctcagttctggagacgcggcggcagctgagaagaaggattcccctggacccggaaactcaacaagttctgcgaccaattctgttcccgtcaaaaacgaaaaggattccaaggatggtgtcaagggcaaggatgtgaaggcagtggaaagtgaaacggtgcgcgatctgaaggcgcaactaaaaaaagcactgaacgaccagaaagaaatgaaactcctgctggatatgtacaaaggcgtatcgaaggatcagcgcgacaaggtccagttgatggccaccgaaaagaaactgcgctccgagatcgaggagctccgccagcagctgaagaagctgcaggaaagcaagcgcgaggaacgcaagaagctggccgacgaggaggcgttacgtaagattaagcaattggaggagcagaagtacgagctgcaaaaacagatggccaaccacaagccaacggataattcttggggcagtggagcccccggcacagcgaactacacgcgaccgtttgttggttcccacgaagaggaggcactgctgaacgagatggaggttaccggccaggcgttcgaggacatgcaggagcagaactcccggctcatacaacagctgcgtgagaaggacgatgcgaactttaagctaatgtcggagcgcatcaaggccaaccagctgcacaaacttctgagagaggaaaagacggtgctggaggatcagatggcaacggcgaccacgcaaatcgaagccatgcacattgtgctgcgaaagctggaggagaaggaacgcagcctgcaggccaccgtcgcgtcgattgagaaagagttgatgctgcggcagcaagcaatggagatgcacaaacgcaaggcgattgaatcggcgcaatcggcagcggacctcaagctgcatctggaaaagtatcacgcgcaaatgaaggaggcgcagcaagtggtggcggagaagaccagttcgctggaggcggaggcctacaagaccaagcggctgcaggaggagctggcgcagtttaaacgcaaggcggagcgcatgaagaagatggaaatgtcgggcaccaccatcgacgaggtgatgattgaggagatccgcgaatacaaagaaacgctcacgtgtccctcgtgcaaggtgaagcggaaggatgctgtcctgtcaaagtgtttccacgtcttctgctacgactgcctgcgcactagatatgaaacgcggcagcggaagtgtcccaaatgcaactgcgccttcggcgccaacgattatcataggctatatctgcagtag

SEQ ID NO: 22173 - protein, 1031 aa, DROSOPHILA
MSKRSADDATGSSCLVAAAAAGQPPIKKVHFEPHLIGPVSTLEEMDIKVLEFQNKKLAQRIEQRMRTEAELRHRIEQLEKRQTQDDAVLNVVNRYWNQLNEDIRVLLQRFDAETADELENRNENEVTTSFLAQLSTWDKEELDEKLANRVQVSKRAVAKIVQVIDRLMQRNEKITHVLKGDSLASAGSGSGAGAGGEEEQQQASGDAETTTSSAGVHALEETLKQTHIEIMSENHKLQNLNTSLHEKFHTMSLKMKEYQDAHTAKETENAELKNQIDELQYDLEKIHCRNDKLENHLAEAIEKLKAYHQIYGDPNKSTNSAKTPTTTGSGGATTSVNSQLLEELQKELEEYRELANNRLQELDKLHATHRETLKEVEKLKMDIRQLPESVIVETTEYKCLQSQFSVLYNESMQIKTMLDETRNQLQTSKNQHLRQIEVMESEELIAQKKVRSEMIQMEDVLALIRKEYETLRIEFEQNMAANEQTAPINREMRHLITSLQNHNGQLKGEVQRYKRKYKDTSTDNLKLRQELADALATLEGNKLQAATGVKEENSNNVSASGQTNQTNSGNDTNVAIKEENHISAEDEADDEASGKDVKDGIKQEKLSSGDAAAAEKKDSPGPGNSTSSATNSVPVKNEKDSKDGVKGKDVKAVESETVRDLKAQLKKALNDQKEMKLLLDMYKGVSKDQRDKVQLMATEKKLRSEIEELRQQLKKLQESKREERKKLADEEALRKIKQLEEQKYELQKQMANHKPTDNSWGSGAPGTANYTRPFVGSHEEEALLNEMEVTGQAFEDMQEQNSRLIQQLREKDDANFKLMSERIKANQLHKLLREEKTVLEDQMATATTQIEAMHIVLRKLEEKERSLQATVASIEKELMLRQQAMEMHKRKAIESAQSAADLKLHLEKYHAQMKEAQQVVAEKTSSLEAEAYKTKRLQEELAQFKRKAERMKKMEMSGTTIDEVMIEEIREYKETLTCPSCKVKRKDAVLSKCFHVFCYDCLRTRYETRQRKCPKCNCAFGANDYHRLYLQ

SEQ ID NO: 22174 - DNA, 2975 bp, DROSOPHILA
catccgcagctcggatcacaaattgtgtgcaaatattgatataaatccatgtttgcactttgtttatctgcaaaagtcaaacagtggcattgtttcggtcgctttccacatacttttctttgctttccacgctctttattgttatgcaatgaatgatgctcggatgctcaaacagtgaaactctttctggtactggctaattacgaacatacagacatacatacatacatatatttctttttgacccgctttcagtaaacagttttgaacttgaaccaattcgcctggtttctttttcagtctttttgccatccatacatgttttatatgcgaccataatggcatttggtggtcgctttatggttcccctaacaacaaagaagtgaataaattataagtttttttttttatttcgtcgctttcgcagctctgttttaacaaaaacgcgtctcatacgcgagttttaattagcaaatatttgcaaattacaacgatccgtgatccggtggcgttcgccttgagatcactgggaccttgaaccaatttcaatgggaagaccactaataaatctcattgataaatacatatatgcagaattattaaacaataagtttcgtcgtttgcctagtgagtttttttgttttgattaaagcaaaggcttcaaacttgatattcgtcactttttataaagaagttggagcctaacttggttgtagattcagtatattgaagctttctatgtaagtcaagatgaaaagttgttcttatttaatttaattatatattttacaagtatgtaagtaagtaaattcaatctctttaagaacatatacatatatatagtataaatattaatcatacaatgtggatttgagaaaaaacccgactaatccgtggacttcttatcattctttgtagtgaccgcagtccatgccaatcgcgtgaccacagagcagaaccaacgaatcgcagatcttccagcgaagaaggaaagcagaatatggtgcaggatcagggggagacgacaggcctgccagaggcgctgctgaagatcgccaagcgggagctgcgcgaggatcgatgcacgcgggagcagtcgctggagcagctgcgcaactgggtggccaagaacgaggatctgcagaatgtgcgatgcgacgataccttcctgctgcgcttcctgcgcgccaagaagttcagtgtgccgatggccgagcagacgctgctcaagtacctgaacatcaggaggacgttcccgcacatgagcacccagctggactatctggagccgcgtctcggcgacctcatcgatcagggatacatatttgcggtgccacagcgtgacaagcacggtcgccgcgtggtggtcatcaatgccaaggggctaaatccgaagatccacacaagctgcgaccaggccaaggcgcacttcctcacctacgagtgcttgatggaggatcaggaaacacagatcactgggctaacgcatgtgggcgacttcgccggcgtgaccacggcgcatgtgaccaactggaatcccacggagtttgcccgcatcttcaagtggggtgagcaatcgctgcccatgcgtcacaaggagatccacctgatcaatgtaccatccacactcaagtggcttattgatttcgtgaagaaccgcgtcagttccaagatgaagaaccgcctgatcatctacggcagcgagaaggagctgatgaagagcgtggaccagggctgtctgccgctggaaatgggtggcaaggtgcccatgcgcgagatgatcgagctgtggaagcaggagctggcgaccaagcgcgacctgattctcggtctggacaagagcatactgcgctccgatcgcggcatccagcggcgcagcagcttcaatgccggaaaggcctccaccggcggacccaacttcgtttcacaaatcgagtccatcgagggtagctttcggaaactggagttcgactaaccgatcgccagttgtagtttaagtttatagtccttagtcttaggcaacatccaatcaattaacccaatgcgcaacgcttcgccggtcccccgatcctggccagcgcccgatcctggggatccctgattcgcttatcggtggcaaccgctttactcatcctgcgcttctttgtatactgtgtttgtgtttggcgtacaataaacgagaggaataatttggaatcatctctttgttgcttcacttggacgtttggtggctcgcgtagtgcggccagtgcctcagttcccgctgcagtgcgtccgtatagctgcccaacacgaagagttggtaaattggctgcagaatccgacgctttaaagactcaaggatcagagcctgggcggccatcaactggcaatcgatgggtggtctgccgctgaagttacccacaaaggccatcaccaacgagtctattccatttagatcccttggatactggctccgatagtgccatccttgtgcctcgaaaacctgacaatcaccggcgaccagaaagttgtagggcagctcccccacatgcgacctctaaggagatgaatgaatttagctttgattacaatgtactacacatacttatgtccgattaactcacttccagcttatgcaatacatccgggcaatcatcgtggcattcattgcttccagtgtgggtaaaaatcactgtgccgacaccgatcggatcgaaaagagttccccgaccctgaagttccatatccgaccatatgccatgacccacgatactgagtcgatagccaaagtccggcgtttgggctgcaagcagtgcaaagtgattcagtcattaagtggctttgtccacctataaaggcgaatttagaaaaatttaacaatgagtcatatgcatgcatacgaaaaataaaacgaatcttaagttaaacaaaaaaaaaaaatgagggatggctttaaaatgttttactatacaaatttaatgccagatacatta

SEQ ID NO: 22175 - DNA, 975 bp, DROSOPHILA
atggtgcaggatcagggggagacgacaggcctgccagaggcgctgctgaagatcgccaagcgggagctgcgcgaggatcgatgcacgcgggagcagtcgctggagcagctgcgcaactgggtggccaagaacgaggatctgcagaatgtgcgatgcgacgataccttcctgctgcgcttcctgcgcgccaagaagttcagtgtgccgatggccgagcagacgctgctcaagtacctgaacatcaggaggacgttcccgcacatgagcacccagctggactatctggagccgcgtctcggcgacctcatcgatcagggatacatatttgcggtgccacagcgtgacaagcacggtcgccgcgtggtggtcatcaatgccaaggggctaaatccgaagatccacacaagctgcgaccaggccaaggcgcacttcctcacctacgagtgcttgatggaggatcaggaaacacagatcactgggctaacgcatgtgggcgacttcgccggcgtgaccacggcgcatgtgaccaactggaatcccacggagtttgcccgcatcttcaagtggggtgagcaatcgctgcccatgcgtcacaaggagatccacctgatcaatgtaccatccacactcaagtggcttattgatttcgtgaagaaccgcgtcagttccaagatgaagaaccgcctgatcatctacggcagcgagaaggagctgatgaagagcgtggaccagggctgtctgccgctggaaatgggtggcaaggtgcccatgcgcgagatgatcgagctgtggaagcaggagctggcgaccaagcgcgacctgattctcggtctggacaagagcatactgcgctccgatcgcggcatccagcggcgcagcagcttcaatgccggaaaggcctccaccggcggacccaacttcgtttcacaaatcgagtccatcgagggtagctttcggaaactggagttcgactaa

SEQ ID NO: 22176 - protein, 324 aa, DROSOPHILA
MVQDQGETTGLPEALLKIAKRELREDRCTREQSLEQLRNWVAKNEDLQNVRCDDTFLLRFLRAKKFSVPMAEQTLLKYLNIRRTFPHMSTQLDYLEPRLGDLIDQGYIFAVPQRDKHGRRVVVINAKGLNPKIHTSCDQAKAHFLTYECLMEDQETQITGLTHVGDFAGVTTAHVTNWNPTEFARIFKWGEQSLPMRHKEIHLINVPSTLKWLIDFVKNRVSSKMKNRLIIYGSEKELMKSVDQGCLPLEMGGKVPMREMIELWKQELATKRDLILGLDKSILRSDRGIQRRSSFNAGKASTGGPNFVSQIESIEGSFRKLEFD

SEQ ID NO: 22177 - DNA, 7445 bp, DROSOPHILA
gtttattatcttgcaaaaacaacttgtgaagttctgtcaaaagtgtttgtgtaccaactatttgatatatgatatgagacaaataaaaaacaacaaataaacaagggttggccagtcgaagtgcgcatacactgtcattagtgtatagaaaatggtagtgtatagttgtagtaaatggttctattcaaaacgaatttatgaacatatttattgatttattttatattaacgtcgtatactttatagacttttggaattatgtttcgaaataaataaatctgtgtgacggtagggtatttgagggcgtttaaaacttttcagggttgcgtcgtcgtttacttttagtccccttctactccaccccattttgccacccacccacctcggctcctctccactgttgtcctctccctctcgcacagtgggtggaggagagcgggcagagagcagccccacattgtgtttgtaacaactacaaatcgctgcaaatacacaggcataccaacggcgaacatacatacataatagcaacattgtggaatggggaaaagtagcacaaattgtgcgctgttttaatttctctgcttcttcttctgcctccgctgttgctgtttttgtttttccttttcttttctatttttcgccatcttcgctcgctcttgtgtcgctgtgttagtgctaatcgcttgcgcggacagcgcagtcggcgtcgccgtgctgtctacgcgcgctctctcctacttcacttcccgccccttctctatcttccactctaattgcattaaattgtttggaaaataataatcagtaattgcgtttgacgacagttatttccatcagcgctttgcgagagaattttgccgttttattgaaacaaatgaagattctaattgggtctttagcggaactaacaaatctctctcactaaggtggcaaccctgccgcaaaccccgtccctcccaccgaccacattccgtactttgttgttttctccgtggaaatggaaatgggcggcttgaagcggaagttggtaatttattttccactagcgcaataatttaggcaccgtgggcttaaagcggccattcaagacttataaattacaagaacaaagccaaatattctaatgttaaatcaaatattaaatatgcatacccacttttagttcttgattagctaagcgcatttctatgtcacctattactttccaggtggatcaatcactaaatctactggacagcctcaacacggcattgcggtgcgatgctattcaattcttgctgcagacgcttaagtgcaaatacccggagtcctgcgaccaagtcgtcaggaatctgttcagtcacatagctgcggccaatgacaatggcgagtctggaggcagggcgcagcagcacgagctagcgaggacgaagcagctccagctgctgctgaccgccaaaaaggagaagaaagagctgggaatcggttgcgaggcggagatcaagcgagagaacgatgaggaggaggcgggctcgacggatctgaaccaaaatttcgagaagataccctgcaaagaggagttcctgtgcctcgaggaggaagaggaggactttctcgacgatgcggacacgcagaactcgtcttccctgcagttccacaccggtaacaatgtggacgccctggccctgggccctggcgatccgctggagctgatccagtccggagtttcgctgctggtcaagcggaagtatgctgccaccttcgatgacgaactgatcggggatggggatggtgatgaggccaacagtaacagcagtgacggcaagatggtcaagcgaaagcgcaccaacaacatgcacctgaccgtgtcgagtgtgcgacggaaagaggagcacggccagctgggcgatggctatgtcttccacgaggacagccagtatacgatgcgatatcaccacagcaccggcgagttcagtgagcgggcctttaaggcccagttccgggctctgctccgcctggcgctcagtcagcaccacaagccctttctccgccagttctacgagaactttgttgtgaatggacgcttgctggggaccacgccctcgatgcgtgtcctgaaggagctgcgcgaacagcggctggaggagtggcgacgtcagcgtgaacgccgccaactggtcatcctgatggagcagagcgagactcagcgggacgaagagtttcagcagcagcaggagctggtggagaaccaagaggaggtccagcaggagcaagaacagcaacagcagcagctggaggatattcagcagcagcatctggaggagattcagcggcagcagcaattgccggccatctcgtttggcgactccgaattggagtcagaaacggaatcgcagctgtcgtcggctgcccaagagattatgaagtttgaggagttcattgacgagggtgtaggcgctggccgtctgatcgatggtctggagatggaacccgagatcgatgacatgctagctggcgccggcagtatgaacagcgccagtggacacagcagcaacagtagcagcagcggaagtgggagcgccggtaatgggaatggcatcagcggggtgatcctggagaacaatagtcatcatacgcatcacctgtgagtactgttttaatgttatcttaactataaattctaattatcgtttgttttttgcttgcagaagtagcagcagcagcgcaaatcttgtgatcaacggccttacgtcaagcaatagcatcagcaacaataataataacagcaacaatgtcagtttacaccgccctcaattgacgccacaggcgcagaatcagctggcagcgtcgatgaaaccatcagaccatattcccatatcgatgcccatggagaacatggatttgaaagccgggcaggcggctcatgggactgccaacgccatcatgcagggcggtagttcgagcctcgcgagccagctacatcagcagcaaaaaccctacaactcaagcaataatccgctgtctatgatgggtggaatgatgcagcagcagcagcagcagcatgttgctatgccgcaccaccagcgccagatgatgatgatgccagaggatttcccgcaacacggagcctcaatgatgaacagtcgtcagatgcccgctctggccgccttgtcgaatctgggcgacacaccggctatgagtggccagcttaactcctccctagagctggacgacaatgacctgtcggcggatgaggacgacgacgatctggaccatgacctggacgaattagacgcggccaagcaacaactaatagatggcggcagcagtagcagcacatcgcttcaggcgccaccatcgcagcacggcagcggtagtggaggcagcggcggccagacgcccggtagcaaaaaggataagcccagctacaactgcctgctctgccccaagtcgtatcgcaagcgcaagtccttgctagaccactacaaaatgcatccgggctactgccatgactgcggtcagcgcaatgggaacacgctggaggtaactagccatatcataagccaaatatcgcggatgagtactaagaattcactctattaatttctaggaaataatccaccacaaccggacaatgcatgtcaaggagtttccgtttgtgtgcgagacgtgcggagagtcgtactcacgcaaacagcagttccacgcccacgtggagtcgcacaataagaaggaaatcaaaagtgagtcgacgtgaatgtaaatttcaccaagttctcgggtggagttccacggcaacagcatcagcttagccaacaatctagtgattggtgatctaacctcggtttcatttgcagcctttccctgcggcgagtgcggtcttaagtttccgcaaaagaaactgcagcaacacttcgaggagacgggccacaaggcggacggcgctatctgcgaggtgtgcggcgaggagttccagtcgaagaatgccctgtaccagcacattattcgtgtgcacaagcgggacaacttcttcgagtgccacatttgccataaccgcttcacgctgaaagccaacctggagcggcacgtccagctgcacaccgagatcaaacggccctacgtgtgcgatctgtgcggctcgtcctacttcacatatcccgcgctcaaggagcactacagcaacgcccacgtggacgtgtccgagtgcaaatgcacgctttgcggcaagcgcttcggttcggccaagtcgctgcagcgacaccttccgtcgcactcggaggaaaggccgcactgctgcaactattgcgatcaggtatgtctacgcgtagcccttggcttgaccaacacaatttatcgtgatgcctttgcagaccttcaagtggaaaacgcatctggtgcgccacaagcagacaatgcacggaaacgagccgcctccgcctaagaagggaaagcagcgctttcccaaaacaagcgaagaaggtaagaatgtggagaactttgcctaaaatcaaaagccatgcttaacgttatctcctgtccagcagatatgggtagcttaccggacatgccgggtccaccgcctgtgaaggccagcaagaaggcagcaaccagcaaggcgaaagcgcaagcagcggccgccgcagccgcagcagcatcatcccagcaacaacaacagaagggttctgcagcaacaccgacgccgccaccgccggtctccaccacaccgggatgcctgcaacaggatccgttcaatgcggccatggttagcagcaacagctcgcagtcctccacggcgtccacgtcgcaacactcggtgtcgacgagtgaatctcagcagaattccatatacaatcagagctttaatgcggagaaacagcagccaggacagcagcagccccagaataccttgcatcagcaacatccaacgccgccacctccgcagcagcagcaacaacaacagcagcagcagcaggcgctgccacagtcacgagttgggcccggagaactgcatctgcagcggatgaatagtttcggccaggacggacagtttcactttgagtccaatccggcagctggtgcgtatcaacagcatcaactgatcagccagtatcagcaacaacagcagcagcagcagcaacaacagcagcagcagccccagcagcagcaacaacatcatctcgcccaacagcagcagcagcacatgaggagtcacacgccccagagtccacatcctccgcatccttcgcagctgcaacaacagcagccccaacagcactttagctctccgcaccacatgccgccaatgcaccatcaacaccagctgatgatgcaacagcaacatcgccacaaccagcgctcgccgcttcaccatcatcctgcggcgcagcagcttcagcagcagcatcagcaaccatcgcattccccacagcatcagcatgcgagactgcagtcgccacaacctgctccagtacaacaacaacagcagcagcagcagcaacaacagcagcagcagcagcagttcctgcagcaacaggctgccgacacgtggggcaacatgaactttggcaatccaccgaacaatcagcaggttgagctcaaggataacaaattctatattgtggaatcggccgagttcctaggtcttccaatgaatgtgccgccatctccgcagcagcagcaacagcaagcagtaagcaaaccccaacagcagcagcaacaacaacacccacaaccgcaacagccagatccaacccttgctggtgatttgatgagcttccagcatatgtggccggcgcctggttttagccagacttcacagcagcaacagccacagcagcaacaacagcagcaagcggcgcagcagcaacagcaggcgcaaagtcaggcaaactcaagtgatccccacaactacaacaacatcggcagcatactaacgaatctcattgacacaaatcccgcgccaatggagtacaacttcgatctgatgcagcagcaacaaacgccgtcagcccaacagcagcagcagcaacaacaacaacagcaggcggcgcagcagcaacatcacagtgccggtgcatatgggagcggtttgatgcgcagcggaggcggcgtttacggaggcgcctacgagcagcacttgagtgaccagctggtcagcgagcagcagaaacagaacagctttcaaccctaccacccacatggcctgcaggcgcagcaacagcagccactgcatccgcatccgcatttgttacccccgccagcgccgcataataatgtctacgatcgcacgggagttggagtcggtgtcggagtgggcgtaggcgtgggagtgggtgtgggctatccaatgctgggagacgataccaagagcgtcctgccgcccatgatgggcggcatgatgcagcaaatgccaccgcacgggcagcagccggatctaatctactacccagtgaagaacgattgacagtcgaagcaacatcaacaggcccagcagccgaatcaccttcaccaccatcgctggtggacggagccagccaagagaggcgatgtttttcattgaagaaacaaccggaaacaggaaaacaggaaacggaatacggaacaagttcgcttagattgtaagtttaggggggacggtggatgtgtggaacgcgaggagttgtgtagatagggcagtccacacattatttttttgaaattaagagcaataacataaagattagagcggaatgagctcagaatatctaatccgaccggcgctatgatacgtgtataaaaaaaagtaatcatttacaaagtacatcagataaagagaagcatgtatacataaataaattcagacatatacatagtagcacctaagcgaggcgaggcaagagcaagaattaaattaaaccgtataaataataaatatacatatataaattatatgaagcatatatattaggctaagcaactatacaataatggcagacagaccacaaccacaagcaactttcgaacaaatcttatgcttatttaacatttaccatacgagttatgaacgcaacgcagcagcaaccacaaatacaaatacgcgtgcgtttatgtataatcaaaacaatccaacattatgtatatccgtacatacgatatctatgtaaagctcgagagagagacgcccaagttgtagatgagatgattgattttaatcgcaaacaaatcgcatcacaaacggagacgaaagatagatagaaaacaaaagtacacgacgctttgaccacacaaagttgtaaccatatcatgaggcctctttccccgtataattaattgtattttcgatagtgcttgttattttctatttagttaacgaattgattatacttacgaagcctttctgctgattaccgccagccacacttttgttagattagtgcctaagtctagttgatatcccaatgtataccccgacattttgtggcttt

SEQ ID NO: 22178 - DNA, 4783 bp, DROSOPHILA
atggaaatgggcggcttgaagcggaagttggtggatcaatcactaaatctactggacagcctcaacacggcattgcggtgcgatgctattcaattcttgctgcagacgcttaagtgcaaatacccggagtcctgcgaccaagtcgtcaggaatctgttcagtcacatagctgcggccaatgacaatggcgagtctggaggcagggcgcagcagcacgagctagcgaggacgaagcagctccagctgctgctgaccgccaaaaaggagaagaaagagctgggaatcggttgcgaggcggagatcaagcgagagaacgatgaggaggaggcgggctcgacggatctgaaccaaaatttcgagaagataccctgcaaagaggagttcctgtgcctcgaggaggaagaggaggactttctcgacgatgcggacacgcagaactcgtcttccctgcagttccacaccggtaacaatgtggacgccctggccctgggccctggcgatccgctggagctgatccagtccggagtttcgctgctggtcaagcggaagtatgctgccaccttcgatgacgaactgatcggggatggggatggtgatgaggccaacagtaacagcagtgacggcaagatggtcaagcgaaagcgcaccaacaacatgcacctgaccgtgtcgagtgtgcgacggaaagaggagcacggccagctgggcgatggctatgtcttccacgaggacagccagtatacgatgcgatatcaccacagcaccggcgagttcagtgagcgggcctttaaggcccagttccgggctctgctccgcctggcgctcagtcagcaccacaagccctttctccgccagttctacgagaactttgttgtgaatggacgcttgctggggaccacgccctcgatgcgtgtcctgaaggagctgcgcgaacagcggctggaggagtggcgacgtcagcgtgaacgccgccaactggtcatcctgatggagcagagcgagactcagcgggacgaagagtttcagcagcagcaggagctggtggagaaccaagaggaggtccagcaggagcaagaacagcaacagcagcagctggaggatattcagcagcagcatctggaggagattcagcggcagcagcaattgccggccatctcgtttggcgactccgaattggagtcagaaacggaatcgcagctgtcgtcggctgcccaagagattatgaagtttgaggagttcattgacgagggtgtaggcgctggccgtctgatcgatggtctggagatggaacccgagatcgatgacatgctagctggcgccggcagtatgaacagcgccagtggacacagcagcaacagtagcagcagcggaagtgggagcgccggtaatgggaatggcatcagcggggtgatcctggagaacaatagtcatcatacgcatcacctaagtagcagcagcagcgcaaatcttgtgatcaacggccttacgtcaagcaatagcatcagcaacaataataataacagcaacaatgtcagtttacaccgccctcaattgacgccacaggcgcagaatcagctggcagcgtcgatgaaaccatcagaccatattcccatatcgatgcccatggagaacatggatttgaaagccgggcaggcggctcatgggactgccaacgccatcatgcagggcggtagttcgagcctcgcgagccagctacatcagcagcaaaaaccctacaactcaagcaataatccgctgtctatgatgggtggaatgatgcagcagcagcagcagcagcatgttgctatgccgcaccaccagcgccagatgatgatgatgccagaggatttcccgcaacacggagcctcaatgatgaacagtcgtcagatgcccgctctggccgccttgtcgaatctgggcgacacaccggctatgagtggccagcttaactcctccctagagctggacgacaatgacctgtcggcggatgaggacgacgacgatctggaccatgacctggacgaattagacgcggccaagcaacaactaatagatggcggcagcagtagcagcacatcgcttcaggcgccaccatcgcagcacggcagcggtagtggaggcagcggcggccagacgcccggtagcaaaaaggataagcccagctacaactgcctgctctgccccaagtcgtatcgcaagcgcaagtccttgctagaccactacaaaatgcatccgggctactgccatgactgcggtcagcgcaatgggaacacgctggaggaaataatccaccacaaccggacaatgcatgtcaaggagtttccgtttgtgtgcgagacgtgcggagagtcgtactcacgcaaacagcagttccacgcccacgtggagtcgcacaataagaaggaaatcaaaacctttccctgcggcgagtgcggtcttaagtttccgcaaaagaaactgcagcaacacttcgaggagacgggccacaaggcggacggcgctatctgcgaggtgtgcggcgaggagttccagtcgaagaatgccctgtaccagcacattattcgtgtgcacaagcgggacaacttcttcgagtgccacatttgccataaccgcttcacgctgaaagccaacctggagcggcacgtccagctgcacaccgagatcaaacggccctacgtgtgcgatctgtgcggctcgtcctacttcacatatcccgcgctcaaggagcactacagcaacgcccacgtggacgtgtccgagtgcaaatgcacgctttgcggcaagcgcttcggttcggccaagtcgctgcagcgacaccttccgtcgcactcggaggaaaggccgcactgctgcaactattgcgatcagaccttcaagtggaaaacgcatctggtgcgccacaagcagacaatgcacggaaacgagccgcctccgcctaagaagggaaagcagcgctttcccaaaacaagcgaagaagatatgggtagcttaccggacatgccgggtccaccgcctgtgaaggccagcaagaaggcagcaaccagcaaggcgaaagcgcaagcagcggccgccgcagccgcagcagcatcatcccagcaacaacaacagaagggttctgcagcaacaccgacgccgccaccgccggtctccaccacaccgggatgcctgcaacaggatccgttcaatgcggccatggttagcagcaacagctcgcagtcctccacggcgtccacgtcgcaacactcggtgtcgacgagtgaatctcagcagaattccatatacaatcagagctttaatgcggagaaacagcagccaggacagcagcagccccagaataccttgcatcagcaacatccaacgccgccacctccgcagcagcagcaacaacaacagcagcagcagcaggcgctgccacagtcacgagttgggcccggagaactgcatctgcagcggatgaatagtttcggccaggacggacagtttcactttgagtccaatccggcagctggtgcgtatcaacagcatcaactgatcagccagtatcagcaacaacagcagcagcagcagcaacaacagcagcagcagccccagcagcagcaacaacatcatctcgcccaacagcagcagcagcacatgaggactgatgatgcaacagcaacatcgccacaaccagcgctcgccgcttcaccatcatcctgcggcgcagcagcttcagcagcagcatcagcaaccatcgcattccccacagcatcagcatgcgagactgcagtcgccacaacctgctccagtacaacaacaacagcagcagcagcagcaacaacagcagcagcagcagcagttcctgcagcaacaggctgccgacacgtggggcaacatgaactttggcaatccaccgaacaatcagcaggttgagctcaaggataacaaattctatattgtggaatcggccgagttcctaggtcttccaatgaatgtgccgccatctccgcagcagcagcaacagcaagcagtaagcaaaccccaacagcagcagcaacaacaacacccacaaccgcaacagccagatccaacccttgctggtgatttgatgagcttccagcatatgtggccggcgcctggttttagccagacttcacagcagcaacagccacagcagcaacaacagcagcaagcggcgcagcagcaacagcaggcgcaaagtcaggcaaactcaagtgatccccacaactacaacaacatcggcagcatactaacgaatctcattgacacaaatcccgcgccaatggagtacaacttcgatctgatgcagcagcaacaaacgccgtcagcccaacagcagcagcagcaacaacaacaacagcaggcggcgcagcagcaacatcacagtgccggtgcatatgggagcggtttgatgcgcagcggaggcggcgtttacggaggcgcctacgagcagcacttgagtgaccagctggtcagcgagcagcagaaacagaacagctttcaaccctaccacccacatggcctgcaggcgcagcaacagcagccactgcatccgcatccgcatttgttacccccgccagcgccgcataataatgtctacgatcgcacgggagttggagtcggtgtcggagtgggcgtaggcgtgggagtgggtgtgggctatccaatgctgggagacgataccaagagcgtcctgccgcccatgatgggcggcatgatgcagcaaatgccaccgcacgggcagcagccggatctaatctactacccagtgaagaacgattga

SEQ ID NO: 22179 - protein, 1301 aa, DROSOPHILA
MGGLKRKLVDQSLNLLDSLNTALRCDAIQFLLQTLKCKYPESCDQVVRNLFSHIAAANDNGESGGRAQQHELARTKQLQLLLTAKKEKKELGIGCEAEIKRENDEEEAGSTDLNQNFEKIPCKEEFLCLEEEEEDFLDDADTQNSSSLQFHTGNNVDALALGPGDPLELIQSGVSLLVKRKYAATFDDELIGDGDGDEANSNSSDGKMVKRKRTNNMHLTVSSVRRKEEHGQLGDGYVFHEDSQYTMRYHHSTGEFSERAFKAQFRALLRLALSQHHKPFLRQFYENFVVNGRLLGTTPSMRVLKELREQRLEEWRRQRERRQLVILMEQSETQRDEEFQQQQELVENQEEVQQEQEQQQQQLEDIQQQHLEEIQRQQQLPAISFGDSELESETESQLSSAAQEIMKFEEFIDEGVGAGRLIDGLEMEPEIDDMLAGAGSMNSASGHSSNSSSSGSGSAGNGNGISGVILENNSHHTHHLSSSSSANLVINGLTSSNSISNNNNNSNNVSLHRPQLTPQAQNQLAASMKPSDHIPISMPMENMDLKAGQAAHGTANAIMQGGSSSLASQLHQQQKPYNSSNNPLSMMGGMMQQQQQQHVAMPHHQRQMMMMPEDFPQHGASMMNSRQMPALAALSNLGDTPAMSGQLNSSLELDDNDLSADEDDDDLDHDLDELDAAKQQLIDGGSSSSTSLQAPPSQHGSGSGGSGGQTPGSKKDKPSYNCLLCPKSYRKRKSLLDHYKMHPGYCHDCGQRNGNTLEEIIHHNRTMHVKEFPFVCETCGESYSRKQQFHAHVESHNKKEIKTFPCGECGLKFPQKKLQQHFEETGHKADGAICEVCGEEFQSKNALYQHIIRVHKRDNFFECHICHNRFTLKANLERHVQLHTEIKRPYVCDLCGSSYFTYPALKEHYSNAHVDVSECKCTLCGKRFGSAKSLQRHLPSHSEERPHCCNYCDQTFKWKTHLVRHKQTMHGNEPPPPKKGKQRFPKTSEEDMGSLPDMPGPPPVKASKKAATSKAKAQAAAAAAAAASSQQQQQKGSAATPTPPPPVSTTPGCLQQDPFNAAMVSSNSSQSSTASTSQHSVSTSESQQNSIYNQSFNAEKQQPGQQQPQNTLHQQHPTPPPPQQQQQQQQQQQALPQSRVGPGELHLQRMNSFGQDGQFHFESNPAAGAYQQHQLISQYQQQQQQQQQQQQQQPQQQQQHHLAQQQQQHMRTDDATATSPQPALAASPSSCGAAASAAASATIAFPTASACETAVATTCSSTTTTAAAAATTAAAAAVPAATGCRHVGQHELWQSTEQSAG

SEQ ID NO: 22180 - DNA, 3956 bp, DROSOPHILA
gtgtgtttcgcatggtcttacgcctgctattaataaaggcgtaatcgaaaactaacgttaattgagcttgaatctaagttgataatattcgttatcaggccacaaccagcgcgagccaatgacacacttcccgaaatcggacaatcatcaattattccgattcgggatgacggagctggttcaattaaagaattttagctagacaatagaccacaatgcatttgtataagtattgaaacacgagtagcgacaatgaactgaactatttgtgtggaatttaaatgaatttgttggacaacaattaagttctatgtcaacattacttctacagatattatgagagatgtatctacaaaatttcaacaaggggttgtttcatcaattgcagtattcaaacttatcgattgtttagatcagccgttgagtttgggtaattgttttttcctatatagcttcctataattgctagcccatcaatttatgaaatatatcatggtcacaacttattgtaaactcagcaaggaataattccgttgcattctggaaaaacggagtcttaatatgccaaaaattaggactttggttggatatgtatgataatgtgtgacaaaaaaacttcaaagaatatagttcttattgattattttgtggttaccgataatttacagacgtagtgttatcacatatcttagaaatacctaaaacaataccaatacaattgaaaatggatttgtgcaggtcaatgatgatttctttcacgactacagttatccaaaaatatgggaagcctttacttggctttattgtaacctttgttctgcatcatatctagtatatgggtgttatgggtacgcctaaacaaaaacccgtttacgctatcagttcggcccaaacacagatacatatgcacacacactagtgcacttgccatgggcgactattagtataaaagtatgcgaaccggacggagagttcagtatttgcttgtcgttagaaatcgtcggacacaaaagcagcgttttctccgaacgggaatttaaattgaaaagtcggtcagtaataaataacaattgtatcaaatgtgatgagcaattcgcagtcattcatatgaggcggaaacaatctttgccttgctgcattctttgaacaaaaatttacaaaatttacgaaatttacattccggtatttgataagtgcattttcgaacaaaatatcagactaatgtgctaaatacttagccataaaagtactattaaaaaactattactaaaaactgtgcaaactgtgcaaaaattggactttgaacacactaacacgtgatgctttcgctttcgataactgttattaaaatgaatgggaatcacaatgtaacttttttaattgctttgatcttgaacggctgttcatttcctccacgaaagtcaattaattgatctaccgttttcatcatcagcatcaaaatgtcgccaaacaacagcgcggaaaagccagtcaatcccaacgagcacctgcacataccgaagtggataaatgaggaatacttccagccgatcatcgagaaggatgtggaaaactttgacaagatcataaaccttgtgcccattgcggccactgcgcccggcgagaactacacatccattatgatccgcgtcattgtggatatactgctgaagggtcagtagcttaacaaggatgatttttcaagacttatttcaagtttacctccattttcagatggcagcgagcagagggtatcgtacattttgaagacaatgctggaggcggacagtggagcggatgtgatcgatggcatgggactttttcccaaggagcgaaaaatgtacgaggtgcacatcccgcagttcgtaaagctttacaaggaggctggcctggaaatcgaattggcgcccaagtgcctccatgtcgacgccactgacgaattgattaccatggttttcgaggatctgagccggcagaatttcaagaacttcgatcggctaaaagggttcgatctgccgcacatgcgagaagtgctccggaaactggccgaactgcatgctgcatccgtggtggccaaggaaataaatggtccctacgatgccatgtacaacatgtccatctacaacgagcagagtcgggacctctttgagtctctgggtaagcagcgagaggagcaattcctcaaggccatgcgcaactgggacctcgagaatgccgaaagctacatcgcccggatgtgggaccccttggaggtgttcgaggaagcagtgcaagtcaaccaggtggacgaggacgagttcaatgtgctgaaccacggcgactgttggtccaacaacatcatgttcaactacaaggataacggcgagatcgatagaaccatattggtggacctgcaggttggcaagtggggcagcccggctcaagacctttggtacctgatcacaacatcggcatcgctggatatcaagatcaaggaattcgatcactttattcagatctatcaccagcgtctggcggaatgcctcaagctactgaactactcgaagcccattcccacactcagggacctgcacattatgatgctgaagtatggattctggggttagtatattttaggtttttttattttcaataagatggaatgaatatttaaattgataggacctctgaccgccatgggtgtgatggtggccacacttatgcccacggacaaggacgccaatatgaaaatgattctggcccaaggacccgaggccgatgccatacgatacaggaccttcatcaatccctactatgccaaagcaatgaaggtgcttttaccgttcttcgataacaagggacttttgaagtcgaattagctttaatcccggatcccaattgtggtgtagccaatttgctgtgatattatatatcataggcgcaagcaataaatacgaatttgatttaatttacacgtaattcgtttggtttcactattaaatcgtttcgcccagacttagtccagtaataaaaccccaaacaaaacgtagaacacaatcatcatgactggctaaaatggctacgcgtgcgttgagcttgaaatgggtccaaatgacgtcgtcttcaaacttttgtttagtaggaaaaacctttaaatctgtctgcgagcttgtgagcttcagacttgccaactagtgacgtatgtgctaatcgcaaaacaaacaggtgttcatttgcttcttcacttcaatgattatcaatcaattaacaaaaataggcaatggcgataactaattatttcttgataataagttagaccacagacttttctgtaatcgtatttttaatctattggcttcttccagccaaaaaccgcacttccataaaatcggaattctatttaatcagccggaaacattctataaaataattgcacagccagcagttggcattgatggcaaaaactgcgccacaatggggttttaattgacagaggcattctatatatgtaattaggaacacgcaaatagttctcattcattgggcctccagatgagcagccatagagagatgtaaattagcgattcaaatgaggcaaacatttaaattgtttgcttctctaatttcagcttgggtagacatgtgttgttagaaaaacgtgcttagcatattgaagaaaatgtagtatgattatgaatctgacgagtaagaaagttggaagatggtgaaagtgctgggcttaactaaggattgatttattaaactactatttctcatataattttggaaaatgtttaggcatggagtaatcccaattgatccagtcgagccagcaatatggtgacttccttaatgtagcctttagaaaaagagcattttcttcgcttttcttcattctgaagcagatcgccaaagtcaacggacttatccctcaatgcccacatcagcggtagaaaggtgctaatgagaaagaactc

SEQ ID NO: 22181 - DNA, 1836 bp, DROSOPHILA
tcggacacaaaagcagcgttttctccgaacgggaatttaaattgaaaagtcggtcagtaataaataacaattgtatcaaatgtgatgagcaattcgcagtcattcatatgaggcggaaacaatctttgccttgctgcattctttgaacaaaaatttacaaaatttacgaaatttacattccggtatttgataagtgcattttcgaacaaaatatcagactaatgtgctaaatacttagccataaaagtactattaaaaaactattactaaaaactgtgcaaactgtgcaaaaattggactttgaacacactaacacgtgatgctttcgctttcgataactgttattaaaatgaatgggaatcacaatgtaacttttttaattgctttgatcttgaacggctgttcatttcctccacgaaagtcaattaattgatctaccgttttcatcatcagcatcaaaatgtcgccaaacaacagcgcggaaaagccagtcaatcccaacgagcacctgcacataccgaagtggataaatgaggaatacttccagccgatcatcgagaaggatgtggaaaactttgacaagatcataaaccttgtgcccattgcggccactgcgcccggcgagaactacacatccattatgatccgcgtcattgtggatatactgctgaaggatggcagcgagcagagggtatcgtacattttgaagacaatgctggaggcggacagtggagcggatgtgatcgatggcatgggactttttcccaaggagcgaaaaatgtacgaggtgcacatcccgcagttcgtaaagctttacaaggaggctggcctggaaatcgaattggcgcccaagtgcctccatgtcgacgccactgacgaattgattaccatggttttcgaggatctgagccggcagaatttcaagaacttcgatcggctaaaagggttcgatctgccgcacatgcgagaagtgctccggaaactggccgaactgcatgctgcatccgtggtggccaaggaaataaatggtccctacgatgccatgtacaacatgtccatctacaacgagcagagtcgggacctctttgagtctctgggtaagcagcgagaggagcaattcctcaaggccatgcgcaactgggacctcgagaatgccgaaagctacatcgcccggatgtgggaccccttggaggtgttcgaggaagcagtgcaagtcaaccaggtggacgaggacgagttcaatgtgctgaaccacggcgactgttggtccaacaacatcatgttcaactacaaggataacggcgagatcgatagaaccatattggtggacctgcaggttggcaagtggggcagcccggctcaagacctttggtacctgatcacaacatcggcatcgctggatatcaagatcaaggaattcgatcactttattcagatctatcaccagcgtctggcggaatgcctcaagctactgaactactcgaagcccattcccacactcagggacctgcacattatgatgctgaagtatggattctggggacctctgaccgccatgggtgtgatggtggccacacttatgcccacggacaaggacgccaatatgaaaatgattctggcccaaggacccgaggccgatgccatacgatacaggaccttcatcaatccctactatgccaaagcaatgaaggtgcttttaccgttcttcgataacaagggacttttgaagtcgaattagctttaatcccggatcccaattgtggtgtagccaatttgctgtgatattatatatcataggcgcaagcaataaatacgaatttgatttaatttacacgt

SEQ ID NO: 22182 - protein, 425 aa, DROSOPHILA
MSPNNSAEKPVNPNEHLHIPKWINEEYFQPIIEKDVENFDKIINLVPIAATAPGENYTSIMIRVIVDILLKDGSEQRVSYILKTMLEADSGADVIDGMGLFPKERKMYEVHIPQFVKLYKEAGLEIELAPKCLHVDATDELITMVFEDLSRQNFKNFDRLKGFDLPHMREVLRKLAELHAASVVAKEINGPYDAMYNMSIYNEQSRDLFESLGKQREEQFLKAMRNWDLENAESYIARMWDPLEVFEEAVQVNQVDEDEFNVLNHGDCWSNNIMFNYKDNGEIDRTILVDLQVGKWGSPAQDLWYLITTSASLDIKIKEFDHFIQIYHQRLAECLKLLNYSKPIPTLRDLHIMMLKYGFWGPLTAMGVMVATLMPTDKDANMKMILAQGPEADAIRYRTFINPYYAKAMKVLLPFFDNKGLLKSN

SEQ ID NO: 22183 - DNA, 3964 bp, DROSOPHILA
attatttcgtgtgtttcgcatggtcttacgcctgctattaataaaggcgtaatcgaaaactaacgttaattgagcttgaatctaagttgataatattcgttatcaggccacaaccagcgcgagccaatgacacacttcccgaaatcggacaatcatcaattattccgattcgggatgacggagctggttcaattaaagaattttagctagacaatagaccacaatgcatttgtataagtattgaaacacgagtagcgacaatgaactgaactatttgtgtggaatttaaatgaatttgttggacaacaattaagttctatgtcaacattacttctacagatattatgagagatgtatctacaaaatttcaacaaggggttgtttcatcaattgcagtattcaaacttatcgattgtttagatcagccgttgagtttgggtaattgttttttcctatatagcttcctataattgctagcccatcaatttatgaaatatatcatggtcacaacttattgtaaactcagcaaggaataattccgttgcattctggaaaaacggagtcttaatatgccaaaaattaggactttggttggatatgtatgataatgtgtgacaaaaaaacttcaaagaatatagttcttattgattattttgtggttaccgataatttacagacgtagtgttatcacatatcttagaaatacctaaaacaataccaatacaattgaaaatggatttgtgcaggtcaatgatgatttctttcacgactacagttatccaaaaatatgggaagcctttacttggctttattgtaacctttgttctgcatcatatctagtatatgggtgttatgggtacgcctaaacaaaaacccgtttacgctatcagttcggcccaaacacagatacatatgcacacacactagtgcacttgccatgggcgactattagtataaaagtatgcgaaccggacggagagttcagtatttgcttgtcgttagaaatcgtcggacacaaaagcagcgttttctccgaacgggaatttaaattgaaaagtcggtcagtaataaataacaattgtatcaaatgtgatgagcaattcgcagtcattcatatgaggcggaaacaatctttgccttgctgcattctttgaacaaaaatttacaaaatttacgaaatttacattccggtatttgataagtgcattttcgaacaaaatatcagactaatgtgctaaatacttagccataaaagtactattaaaaaactattactaaaaactgtgcaaactgtgcaaaaattggactttgaacacactaacacgtgatgctttcgctttcgataactgttattaaaatgaatgggaatcacaatgtaacttttttaattgctttgatcttgaacggctgttcatttcctccacgaaagtcaattaattgatctaccgttttcatcatcagcatcaaaatgtcgccaaacaacagcgcggaaaagccagtcaatcccaacgagcacctgcacataccgaagtggataaatgaggaatacttccagccgatcatcgagaaggatgtggaaaactttgacaagatcataaaccttgtgcccattgcggccactgcgcccggcgagaactacacatccattatgatccgcgtcattgtggatatactgctgaagggtcagtagcttaacaaggatgatttttcaagacttatttcaagtttacctccattttcagatggcagcgagcagagggtatcgtacattttgaagacaatgctggaggcggacagtggagcggatgtgatcgatggcatgggactttttcccaaggagcgaaaaatgtacgaggtgcacatcccgcagttcgtaaagctttacaaggaggctggcctggaaatcgaattggcgcccaagtgcctccatgtcgacgccactgacgaattgattaccatggttttcgaggatctgagccggcagaatttcaagaacttcgatcggctaaaagggttcgatctgccgcacatgcgagaagtgctccggaaactggccgaactgcatgctgcatccgtggtggccaaggaaataaatggtccctacgatgccatgtacaacatgtccatctacaacgagcagagtcgggacctctttgagtctctgggtaagcagcgagaggagcaattcctcaaggccatgcgcaactgggacctcgagaatgccgaaagctacatcgcccggatgtgggaccccttggaggtgttcgaggaagcagtgcaagtcaaccaggtggacgaggacgagttcaatgtgctgaaccacggcgactgttggtccaacaacatcatgttcaactacaaggataacggcgagatcgatagaaccatattggtggacctgcaggttggcaagtggggcagcccggctcaagacctttggtacctgatcacaacatcggcatcgctggatatcaagatcaaggaattcgatcactttattcagatctatcaccagcgtctggcggaatgcctcaagctactgaactactcgaagcccattcccacactcagggacctgcacattatgatgctgaagtatggattctggggttagtatattttaggtttttttattttcaataagatggaatgaatatttaaattgataggacctctgaccgccatgggtgtgatggtggccacacttatgcccacggacaaggacgccaatatgaaaatgattctggcccaaggacccgaggccgatgccatacgatacaggaccttcatcaatccctactatgccaaagcaatgaaggtgcttttaccgttcttcgataacaagggacttttgaagtcgaattagctttaatcccggatcccaattgtggtgtagccaatttgctgtgatattatatatcataggcgcaagcaataaatacgaatttgatttaatttacacgtaattcgtttggtttcactattaaatcgtttcgcccagacttagtccagtaataaaaccccaaacaaaacgtagaacacaatcatcatgactggctaaaatggctacgcgtgcgttgagcttgaaatgggtccaaatgacgtcgtcttcaaacttttgtttagtaggaaaaacctttaaatctgtctgcgagcttgtgagcttcagacttgccaactagtgacgtatgtgctaatcgcaaaacaaacaggtgttcatttgcttcttcacttcaatgattatcaatcaattaacaaaaataggcaatggcgataactaattatttcttgataataagttagaccacagacttttctgtaatcgtatttttaatctattggcttcttccagccaaaaaccgcacttccataaaatcggaattctatttaatcagccggaaacattctataaaataattgcacagccagcagttggcattgatggcaaaaactgcgccacaatggggttttaattgacagaggcattctatatatgtaattaggaacacgcaaatagttctcattcattgggcctccagatgagcagccatagagagatgtaaattagcgattcaaatgaggcaaacatttaaattgtttgcttctctaatttcagcttgggtagacatgtgttgttagaaaaacgtgcttagcatattgaagaaaatgtagtatgattatgaatctgacgagtaagaaagttggaagatggtgaaagtgctgggcttaactaaggattgatttattaaactactatttctcatataattttggaaaatgtttaggcatggagtaatcccaattgatccagtcgagccagcaatatggtgacttccttaatgtagcctttagaaaaagagcattttcttcgcttttcttcattctgaagcagatcgccaaagtcaacggacttatccctcaatgcccacatcagcggtagaaaggtgctaatgagaaagaactc

SEQ ID NO: 22184 - DNA, 1443 bp, DROSOPHILA
agaaatcgtcggacacaaaagcagcgttttctccgaacgggaatttaaattgaaaagtcgcatcaaaatgtcgccaaacaacagcgcggaaaagccagtcaatcccaacgagcacctgcacataccgaagtggataaatgaggaatacttccagccgatcatcgagaaggatgtggaaaactttgacaagatcataaaccttgtgcccattgcggccactgcgcccggcgagaactacacatccattatgatccgcgtcattgtggatatactgctgaaggatggcagcgagcagagggtatcgtacattttgaagacaatgctggaggcggacagtggagcggatgtgatcgatggcatgggactttttcccaaggagcgaaaaatgtacgaggtgcacatcccgcagttcgtaaagctttacaaggaggctggcctggaaatcgaattggcgcccaagtgcctccatgtcgacgccactgacgaattgattaccatggttttcgaggatctgagccggcagaatttcaagaacttcgatcggctaaaagggttcgatctgccgcacatgcgagaagtgctccggaaactggccgaactgcatgctgcatccgtggtggccaaggaaataaatggtccctacgatgccatgtacaacatgtccatctacaacgagcagagtcgggacctctttgagtctctgggtaagcagcgagaggagcaattcctcaaggccatgcgcaactgggacctcgagaatgccgaaagctacatcgcccggatgtgggaccccttggaggtgttcgaggaagcagtgcaagtcaaccaggtggacgaggacgagttcaatgtgctgaaccacggcgactgttggtccaacaacatcatgttcaactacaaggataacggcgagatcgatagaaccatattggtggacctgcaggttggcaagtggggcagcccggctcaagacctttggtacctgatcacaacatcggcatcgctggatatcaagatcaaggaattcgatcactttattcagatctatcaccagcgtctggcggaatgcctcaagctactgaactactcgaagcccattcccacactcagggacctgcacattatgatgctgaagtatggattctggggacctctgaccgccatgggtgtgatggtggccacacttatgcccacggacaaggacgccaatatgaaaatgattctggcccaaggacccgaggccgatgccatacgatacaggaccttcatcaatccctactatgccaaagcaatgaaggtgcttttaccgttcttcgataacaagggacttttgaagtcgaattagctttaatcccggatcccaattgtggtgtagccaatttgctgtgatattatatatcataggcgcaagcaataaatacgaatttgatttaatttacacgt

SEQ ID NO: 22185 - protein, 425 aa, DROSOPHILA; identical to SEQ ID NO: 22182

SEQ ID NO: 22186 - DNA, 14723 bp, DROSOPHILA
ccgcactggagtgttaggtgtcaacgtcgcgttccgatgcttagttgattgcaatgccggccgccacagggatcttttgaaatatacactagtcggcataagtattttgacaaaaaaaagctgcacacttgtcagtgaaacttttaaatggcttgatatggtagtattgactattttttattttttgtgtgtaattaatataaacttaaaaatgaacaaacgaaattgtttttatttaaatttaaaaagttataagaaacttaatgaaatatgatgattttttgtttcggcataagtaatttgacaggccttcaattcaaggtaaataagtctaaatgaagctggattagctccttattgaaaaaatgaatttggtttatccgtttctttcgtcatctatgacgatatgacccaccattgaatattgaatattgaatattgaaatattggcactcctttatttattataccattgaagtaataatccgagcatttcgaccgactatattaaagaacataataaaaaatctagttataccgaattattactacatccacaaataaacggagctaaatgttcttgtgattaaatccatcactaacaatacacattatttagtattttgtatgttgatttccctacacgtaaatatttatagaataacacagttattgaaataaaatagcaataaaaaacatttaaatttaacttaaagatagacaagcctgtatcctgcagtaaacatgcaaataagatggaattaattccgtgccaatttttaacactgaaggttgtgaaaggtttaatatagatgcatctctgtgggagctctatattatataaaaaattgaagcatttctaaaatatttttgcgttcctgtttcaaaatttcttatatgctatcttgacaaacaattaaatcgaatatatcggtcatacaatttccgactattcctttttgtttacagcggtcaagttgttgaacgagttaaaaggcacaatgtcggttattgaaaatgtaccggtgaatacatttcggaattatttaaatattttaaatgattcctcttctaaagacgaacttaagctgaaagctactcaagagctaagtgaacactttgaaatgataatgcaaagtccggcatatccgtcgttcttagataattctttaaaaatatttatgcggatacttcaggatggcgaacctcagttcattcaagaaaatacaatgcaacacgtaagttttaaaattcaccattgcatgggccttaaatgaagaaaccatgtttggttgaaataactgtcaatgaatttcggcttaaatatatgtagttatcttttaaaatgcaaagttgaaaatattttgtgtttacatttgtaactcccaataatcggaacttttatgtttgtacaatacaattattttattaatatattttatatacttatttatgtaaagctatctatatagtactatagggaaacctttcggtgccctagtaacaatcttttaaaactgaaaaccactgtttctgatatttaaaacgaccgtgcattgtgtttgtgctacgcaactttaagttttgcgcagatattatgcatacattgccagaagaagtattatttaaagcataactttgattgcaaaaaaagagtatatttttattatcgatgtcgacttcattaattttaaaatttgaaacacatttattatttattacgtccgtaggttttcttaggtagtattatgtttggcaaaccaataaaaatttgaaagtcacataaaataaaaaattcaacagatttctcaaatatgtgggcgtggggtgttttgaacagcttgccggcggggtaacatgcgactaagtctctgtagactcggctagtgatcctgatcagcggaagtttcttaacccatgttgtctggggcctgcttacatattcagcactgttctcagataaaagaataagcagagagggagactccacctaatgcaaacaagcagtatccaaagcggagttaccgaataatgtaaactaaaggttttttttttgcttttactctacgagcaacgggtataatcatatataataaaatatgtcatcaaagttaggctttaagtgtttacgctgatacggatgatactgttccataatgactccattttgcatcagttggcggtggctatatctggcacggattagaagatttttaatgtgccttcttatattcacccgcctcacatctcaaatctaagaaataaattttactagagttttgtccaatgatgtccgaaacgtgcgatcaaaaaagggaaaaaatatcattgttttaagacattgcatggatatacttttttgcgggataaggaaaataatggtttatacgagattatgctgcaatctacaatgtcgccgtagaacctgtttgcgtagtaccgcctcaaattgaaaaggagcagatttttgcaaactcgcattgactttttgggacatgccattgaaggtgggcaaatgtggcaggccaaaaaatattaaagctgtacaatcatttctggggctaacaggatttttcagaaaatttgttccaggatatgctttaatcgcgcgtccgctgaaaattttttttgaaaaaagatgcacttttctacattggtgaacattaagccatacagcaattaaaagacgactcagacattcccgtacggcaaatttacacaagagatgcagagacagaactacacagtggctctttaaaggatgaatttggagctgtgttgcggcagatggtggacggcagttttcatccggtttattattggagcaggaagacttccgaagccgaatgaaagcgacatagctattactaagaagacaaagcagcgtacataggtatgaagaagtttcgtcactacctgctaggaatatagttcaagctcattacagattgtgtcgctttttagcagactacaaccaaacaagacgtaccgagagatgtaggaccatggattatgtaaattcaagacttcacttttacagtagaacaccgtgccgcagaaaaaattaagcatgttgactgccttagtcgctttccatagagtatgagggttactacagagattacgtattaaaaaagcccagcaggacgacgattacacgactggtcaagtatttttggctttccaacatgtattgtaatcgatacaggctcagcatttacctcgattgcgtaaaaggagttcacagaaaggcataatgtaaagcatgtatgtataacgaaaggagaggcaatggccaaatattgtagaaaatgtaaatcaattttggcaatcatatccaagctgtcggcagcggaaccatccaagtgggtcaaatatgtaatggaagtacaacaaataacggaagctgctgtccgtgaggttggagataatcgatgagcttcagaaacagaaaaatctcaacgagctcgaagaactggctttttacgaaattggaaataatttgatgtattctcgtgactcttaaatcctctgttcgggggagtttttaaactggaaatatcgaacaaatcgctgaattgcaatatcgcccaagtaatagctggacacgccgagtcagcccaaataggaggagcatttggaagacttgaagcagcaggactctggagactggatttcgcattggcaagctatgcgccataggtagaatgtaatacaacatctgagttccgtagttccgcccttcttgccccaagtctcagcccttcaacatgtgccttctgtaatgctcctgggagcgccctaaaaacctgaccccgtctgatcaattaaaattagcaaaaaggttcgaacttttttctgattcacatctgcactctgcgtaacgtctgctactcttcttgctcagaatcttagtaaggatgttatgctcgtagccactgccaccgtattagcgatgaaccgattaggaacatttgtttcttgtcgcgctcttctcgactctggatctcaactgcaccttatccatccatatttgcatatcagctttaacttaagaagacgaaaccggagtaccggagtaggcgatttcagttttgatacacatggttcgtcattaaatatttcaatgtgaactcaaacgtctaaatgctcgaccgacatcacttatgttattgtctccaatattacctcatgtcagcgcaaacaaaacattcgaaatcgctatacaaataaatcgactttttatttctcgaaaaaatcgaataaaaagctatttagctgatttgatatatgaaaacacgtggcagatgtagcggctaattcttgatctgatgatttcttagtacaggtagtttaccttgcgaaaacaatggattcgtttggtggatttctctgatttttcttttattacgatacatgtgtcgattgtcacatcaaaagtagtatgatatggatcttcaggttgagtaagatgtgctacactgggcaaaaacacactttcagggttgttgcaagacatgcaccattttatcacgtagccaatacgtcatttttggctttataaccctttggcatttattctgaaagcgcacaacttttgtatccatattttttcaattcggaccactttacaaaaacacagaatcaaaacattcaagcaggctgttgtaccgcaaatgagcagtctgtccgcgtagaactttagattttgtgtgggagaccgagaaaatgggtgcacagtgcactttatgtgcctaccaaaaataacgccaaacagcactgcggacaacgcatgaaaaccaagagaggatgctatagtcgagtttcccgactaccaaatacccgatactcagctagtggaaatgcaaactcgaaatttcataatttctgggatctcgatagattttggtgaataaaatgagaagaaatttaaaaattgttcaaaagtgtgggcgtggcagttctgggcgttctagtggacgtggcaacatgggtcagccaacttgcgctgcgccattgtctttagaatctaaatacttaatcccaacctcctagcttttatagttcctgagattccgacgttcatacgaacggacggacaggatcaaatcggttcggctactgatcctgatcaaaaatatatatattttatatggtcggaaacaattctgtcacataattttcaacgaatgtagcttacccttttacactacgatttacgggtataccaagtgagtgtgctatagtcgagtttcccggctatctgatagtggaagtaagaatgtgaaaagttaaaaaaaaggttcaaaattgtggttatggcgggtttgacactcccactctaacgccaacaaatcactcaacactgccacgccaagacttttaaacaattttaaattttttctcattgaaaaaggtcaccttttttatttgttgaaattttctaattatattatcaaaaccggacgcagaaaaaatatttcgattttacctaatccagcttctttgagcttttggcttcggtctttgattgctcttgctcttctgtgcttggggtgtacacacctaaaatgttaagaatattgactagaatagtacggtttaggttgactctgatctgttgatgcatgattataaggccgcagaatcattttcaatgtatcctgttgtacactgtttttatttttattttttttaatacaattattaaataaatagagtttaagccgcacagccacgttctaaaaataggttgcttcacatcgaaaaataatctaaattaaaaataacacaaaagtcttcttataaaattttccattttaatttcagatacgtaaactgattttagagatgattcatcgattgcctataacagaaagcttaaggcaacatgtaaagacaataataacaatgatgcttaaaatacttaaaactgacaacgaagaaaatgttcttgtatgtcttcgcattataattgaactgcataagcattttcgtccatcatttaattctgaagtaagtaaacatttttcataatactagttgttcaaacatacatatacagcttatattcgcatcggaatcaaaactaaaacaatatattttaaggtattatatgggagttttattgctaaggttaatttttatcgggaaacaaaaaaagtgttaatatataacagtagatgtatagtctaattctactactactctcagctagtggaaataaaaactcaaaatttgggcatttcgatagaaataaagaagattagaagaggcgtgacagacggtatggctagatcgactcgactattgattctgattaagaatatatactttatatagtcggaaacgctttctactgtctttcacacaatttttaacgaatcagtatacccttttactctacgggtaatgggtataataaacacacgtaaactggctaacgttctgaaacaagaggaggaatgcgctcagcgttttgttgacaaggaattcctcaacttgctgggcccgtagtgatgcagagccaccacattacatttgtcgctcacctacaacatgtatttacaccaaacggttctactagcatattagcgccaacgactttacccgtaaactgccacccacaacacagctcaatgttttgtccaaaagaaatagctaaaattattaaagacaatcttagcctgaaaaaatcaaccggctgcgaacttataacaccggaaataattatcgagctgccacattctccagttggctacatgacccagctcttgaatgccatcacctggttactttccacgatggaagtgatcgctcatcataatgttttcaaatcctgttaaggaccagacagttggttcattttacagaccaataagtctactcccatgtattttgaaactattggaaacatgtctactaattcgagagagagagaacaaaatcccaccccatcgatttggctttcgcgatggtttctcgaaccagctaataaacttttaaaagttttgttcttaggcaaattttacgatatggtacatcatgattaacatgattactacgtaagtaatacacaataaactcctcaattgaacaatttcttccataacgtttaagggaactatttctaatcatagtattgacaaaagcattcccagtccaaaattcggaacctgtcgaaggaatggaaggtttcccaaagtgctctaatatgatacatttagatgtaatcttttgaatatgttaggaaaaataaaaccccgacgttcgccgattgctcaaatttttacaatcgtgaacattcgggtacaacccgaaccctgtgttggttacacacagtctctgcagaattactagcatcatattcagttttcttttaattttacaatgtccttattttaaaattatatgaagatacatatacattacaaattaaaacattttcttacactgccagtcgatatatttttgatcactatgcttatgctgatggaagaagggcaagcagaatttaaagaaactgtacttacgaaacccaaacgaccaaaaggataaaagcagatagagaagggcgaatttttgttgaaaggtaataaaccaaacttttctttctgttcagtggcattttctgttttgagccgtcaagatcgtcagtgttttgaaaaacgtcaatgccgtcaatataatatacgcattgtcaattataaacataaatgtaaatatgtgaacggtatttaattatttacacacttatttaaaagaatattattgagggcaatcattttttaaataatattgtagaaaatcatattacatcgaaattgaccaaaactctaaatatgtaacttcgtttcgcagattaaaattgttttcggcccgcaaatcgccttctagcacaagtacgcacagtacccacgatcgcgattattgttttagcccacaagcaagagagtgcattcaatttttacaatttactcgtacagtacaagggtatactagattcgttgaaaagtatgtaacaggcagaaggaagcgtttccgaccatataaaccatttacattcttgatcaggaccaatagccgagtcgatatggccattaccgagagatcttagaacctataatgttatatagttagtatagctagaaagttgagatacatatacattcagattctagagacatagacgcagcgcaagtttgttgacccatgttgccacgccctaaaaccgccaaaaactgcccacacttttgaaaaatattttgatatcacgctcatgagcgtgacctacatacatgtcctcgcgctctgctcaggatagttcgatctcaatattggcctattggccaatgccctgtgcacagggcatggtggaaataccaaaggagcgtctcgatgaatctcatgcgttagaagtcattgtcaccgacttatgtggaccatttttctacaagcctgaagcgtgcaataaggctcctgtaaaatgctacgtaagtttctatttgctttgcaatcaaggcattttggccacgacaaatttggtccgacaaagcaacttactttgttggagcaaaaaacaagttgctggaactaagacgcttgttcctcaacgttgaccacacttaagcagtgttggatttttgcctggcaaaaatcctcacaaagatctcgatgttttaactccagccgattttttgaatggcccgccttcatcgcttatcgagcccgatgtgacaaacttaaacatcaatcgcttggagagcgaagaaggaagaaagattatttaaccttactgcttttttttttactgattttttatgtatgcagattagctgggtgagcatctggccaggttgccagttgctgtggccgtcgtgatcgtagttgcgggaacaccacagatatctggggctccgccgtgacgaatgcttagtaggcatcgtctcgcagaatgcgaataaaaaaagaagaagaacatccaagaaaaaaacttcctcttcgacaacaaacagagtagatggagatgcgttgtattgtgtagaatataaattgattgaatttaacccaacatacaatcgataccttacgtaccgcagtttcttttccctctcaatgtgatagctcaaattgctattaattctatccgccaaaaatggctttgcttctacagatttagtgtaccgggattacagaagcatcgaaatcctgtcacgattagcggttctaaattaaaacttgtcgatagcccaaagccgttccgcgtcaccaccatttaccataaaccttttataattatgatttggttagactgaaacttcggcttgctaaagcttgtattctgtcttgtagtcataattttaaaccttcttatttatattttagattcaactatttttgggatttgttaaggaaatctatacaaatcttcctaaccatcttacatctatatttgaaacatcgaatgatgtttgggttaccgatttaaaggacttaaatttggaagtacttttatccgaatcatattctgttagaactatccatgtcgaaaaggcacttgattcaaattctcaacaacaaattgtaagtattcttagctacttcttagtaagagtttattttgtagagtaaaacaagagaatttgctatattcgagttccccgactatcagatacaggtaccccttactcagctagtgtgaatgcgaacgcgaaattctataatttgtccattttatttcccaatttttttcaatatcatagaaaaactacacaagtttgtgttcgcattcccactagctgtgaataggtagctgatagccgactatagcattctctattttttgtagtataagaaaagtcttattttgtaacaatatttactaattatctgttttttatttcagtataatctccttcctcgtggaatattatctttgaaagttttacaagagctcccaataatagtagtactaatgtaccaaatatataaaaacgcagtacatcaagaagtttctgaattcattcctcttatattgactactattaatttgcaaccaacagtaacacgaaggtaattattaataacattttcacttaaataagatgtaaaatatgtagtgcgtactcgtaaaacgtgtactaggtttcgttgaaaagttgtaagaggtatcgtttccagccctacaaattatgtatattactggtcataataactagtcgagtcgatctggcaatgtctgtctgtcgaaccggaacttcttcacatcatggagacgaaccggttcgcgaacggaagtttactcttcgttaaggttcgaaccgcgattcacatatgcaattcttctcacgaccgttctaaacgtaattaccacaatttagttcttaacttacgacatcgtcggtgtgctaaaattatatgcttagaataatctatgccatattcaacgcagcatcaacaatggtcaatggtctctcaatgtttttgtgccgtttataccaacatgtttgagttatttcacaccatcggcgcttggaaccgtatggtcgaagataatgcaccctcactttgttaagttgatgacttactttttttctctgctaaaaacgctgcccatggctcgaacgagatcttctgattcttaaataaacttccaactgatatagggaaacttttcaaactctctaacctaaagctaccaaaaactatcttcaaaatgatctcgcaaagtccatgattggattggtaaaatttgatcacaccattgcgggttgtttaggtaagcgcgaaatcattctctgagtcaaggcttttgaaaattatcgaactagagtttatgatgtcgttgaaaagggtgttagggtaaatgcatttgacgacagatttggtagtgggaagggttagctgtcctctatatttcacagaaccttctgacaattttatcgaataccaactcgcatcgccaattcagtggcttttaaaatagtgctattatgtcacacatgtggtgatacttaatattttcttaggaaaataataattaaaaacgtatttatgttctattccacggttttgtgagcgatgttatgacatttattgttatagttttcgttcttcatctttatctttatatcaaattgtatataagtctttattcggtcgctgacgtgcgaagacgggcatttattgagctctgtattaaatcggctgattttgtgaagtgaatggaaattaataaaaaatggtaataaagaaatcccagcgccgtttctaactattaaaaatatttttaaattgtaacaaataataagatttgaataattgttgttggtcttacaataagagaagatccaataaaaaacggtatacgtttaaaaagagtatgtataaaaagtgtatagtaattatttattagtttctgtatttcacgaaatagaatagatagaaatagataagaatgcacagaattataaagtttctgtaaagcaaaaaattatatcaaatcgccaagtagtgaaaacaacagcaacgctccaaacatgaatgctaatgtcgatgtcattgggagttaataagcgagtaaatatttcgtcaacgtcaattaaaattgctccaattggaaaacgatattttgacattggaatgtgctcgaaatcaaaacaatgctgccacatcggatcgaaacaatgctccccattagatcgaaacactgctaccaaaaaaaattaatacaatagtgacacacaagatcgagttttcgctgccggagatgccagatcggaggaagcagttgcaaataacaaacgttgctagcaatgggggcattatgcctgtttttttttttttacaataatgtgtttttcacaagtatgcaaatttgcagtattttagtattaatgcattggaaatactttaaactgttatgttacagcccgcaaaagttaatttaacagtgcaccgttataatgacagctgttaaaatcagctgttgcgaccacataccaggtggctgcattgcgcgcagaatttagcttaactttcaaagtgttaaaatttaaaaagaagatcgcaaaagagtattatttgaaatggataatcaatcttcaggtttgtattaggtgtttctcttaatatattgtttattgtgtgcgtctatttctaacaatttgtacatttagcaagtggtgtcaacatgtagctgtatgaaaaaaatttcaactttgaaaagagctacaaaaatttgttcagtaagtgttgtagtgtgttcaattcctaactcatatcatgcgtttttctgagaaatttcattttttaggaaggaaggaaggaatatctcgattaccaatgctgccctgctggatgtgtggcgctatttagcaaactagactttaatgaacgatacctgaaggaaaaggtgagaatgatttcagtcaatcttttgcgaatttggagaaaatgcaatcgaaaaataaataaattttcgaaagtttattcaaagaggttagaagaaatgtaaaagagaaaaataaaaaggaaaggaaattagctggacgcccgaaaacgtcatattattataaacggccgaagacagcaagcagatgaactcgtaagggcgcagaatcacaacgaacgtcttttgcttccagctgctctgctagctgcacggtagcgcggcctgctggatattgcaaccatacttaaaattcttttgttgaaccaatccaaggcaaaacccattagaaaattaatagtataatagtacagccggttgaattgcctgtgcgctcttcatgacagcgacagtccacaaaatattggttcaatccaaagatatcttggaacaaacagttcttccagtcggctattttggagaagtggcagcagaatcaagaaataaaatttacagagcaatggatacttcggatcccataatatcaccaataaatttaaagaggcgcgttcgaaaacataagcgactatctcttccaccagaaatcattcaaatgtaagcttgcgaatttgaaccttataaagattcctcagactctgctgattgtgaagaggaagacgactatgaatttttatacaatattaaaattgaaaatgaactttggacataaaatataaaaaaaaaaaattgggtggagttgggggcacgcccacttttcgaaacattttcaaaatatccctgggggcctgtgtaacccattaaaaaaaatcatccaaatatctcccgtaaattaggagttattcatttaaaaaaaaacaaatcaggtcaattgccccatagtgcaatggcttggaaaggaaatggttccgatattcgacggtgcttttatcaacaaacttaatgtcaacacatggatagcacagctcaacgcggtcacaacgatgtttaagctaagtgacgagtaattcggatgctgttgttgtccaagttaaaaaaccatgcccaataaataatatctcgatgcaagtttcaagagcggaaaccgtcagaagatttttccacatactataaagaaaaaccggtgctggctacatagattcgggtggacgatgaggagctaatcgacgacatcattcgggattcccgatgttttaactcgtctgcgaagctgttacatgcatttgccaaggtgtcgcctattaaatcgctattttcttcgtcgggacgcgccaaagtttctatcgagaaaggacctagttcggtgcctacaaaaaggtgtttcaatttcaacggtattgggcatttcgcagctggttgccgcaaacccaagccggagtacggagcatgctacgcatgtggcggtaaggaccacctggtgtataactgcactgagaggaagtttgtatccaataatgaatttgtaagaccgtttgagatttttttcggttcagaacctaatcaatagttgcttttagaatgcctaatcgattctgggagtgcaataagcttaataaagatgtcacactttaaaaacatattaaacaagaagacattaagttaaatgaaaagattcccacaaattacgttggcttaaacggtagccctttaaatataattggaaaattatcatggtttatcattgttatatcatttgagttattaattgtgacaaacaggtctatggcatgtgtaacagttttgggacgagattttttaaacatttgtaactttcagatagaaaaagaaactaatttttcaaatgatagaaattgtgaaaattatgtagcaatgatgaaaattgtgaaaaagatgatgaccgattttcagaaaaagatcgttcaaatgatagagattcggaaaattattgctcaaatgaaaggagatcggaaaattaatcttcacatgatataaatgtgtcatgttttgtgtaattatcatgatcaattaggacacgttggaatagacaaaatggtaaaagaagagctactggtttaccaaaataagaggaaatgcaaggtaattctggattccttcacaatattcgtaaataataatagtagtacacatagaccattgtggtcctgttgataaaagcaggtcaaacaaacacatattagtgattatcaactaatatccccacaggctaatagtcaggtcaaaagggtgaacagaagtgtaggccctattatagctcagttgactgtaccagacaaagaacagcatttagaaacggtcgaatgaatacgcgctaacaatacaatgcaaagatcaatta

SEQ ID NO: 22187 - DNA, 1107 bp, DROSOPHILA
aatgtcggttattgaaaatgtaccggtgaatacatttcggaattatttaaatattttaaatgattcctcttctaaagacgaacttaagctgaaagctactcaagagctaagtgaacactttgaaatgataatgcaaagtccggcatatccgtcgttcttagataattctttaaaaatatttatgcggatacttcaggatggcgaacctcagttcattcaagaaaatacaatgcaacacaatcttagtaaggatgttatgctcgtagccactgccaccgtattagcgatgaaccgattaggaacatttgtttcttgtcgcgctcttctcgactctggatctcaactgcaccttatccatccatatttgcatatcagctttaacttaagaagacgaaaccggagtaccggagtaggcgatttcagttttgatacacatgagatgattcatcgattgcctataacagaaagcttaaggcaacatgtaaagacaataataacaatgatgcttaaaatacttaaaactgacaacgaagaaaatgttcttgtatgtcttcgcattataattgaactgcataagcattttcgtccatcatttaattctgaaggcatggtggaaataccaaaggagcgtctcgatgaatctcatgcgttagaagtcattgtcaccgacttatgtggaccatttttctacaagcctgaagcgtgcaataaggctcctgtaaaatgctacattcaactatttttgggatttgttaaggaaatctatacaaatcttcctaaccatcttacatctatatttgaaacatcgaatgatgtttgggttaccgatttaaaggacttaaatttggaagtacttttatccgaatcatattctgttagaactatccatgtcgaaaaggcacttgattcaaattctcaacaacaaattattcgggtggacgatgaggagctaatcgacgacatcattcgggattcccgatgttttaactcgtctgcgaagctgttacatgcatttgccaaggtgtcgcctattaaatcgctattttcttcgtcgggacgcgccaaagtttctatcgagaaaggacctagttcggtgcctacaaaaag

SEQ ID NO: 22188 - protein, 368 aa, DROSOPHILA
MSVIENVPVNTFRNYLNILNDSSSKDELKLKATQELSEHFEMIMQSPAYPSFLDNSLKIFMRILQDGEPQFIQENTMQHNLSKDVMLVATATVLAMNRLGTFVSCRALLDSGSQLHLIHPYLHISFNLRRRNRSTGVGDFSFDTHEMIHRLPITESLRQHVKTIITMMLKILKTDNEENVLVCLRIIIELHKHFRPSFNSEGMVEIPKERLDESHALEVIVTDLCGPFFYKPEACNKAPVKCYIQLFLGFVKEIYTNLPNHLTSIFETSNDVWVTDLKDLNLEVLLSESYSVRTIHVEKALDSNSQQQIIRVDDEELIDDIIRDSRCFNSSAKLLHAFAKVSPIKSLFSSSGRAKVSIEKGPSSVPTK

SEQ ID NO: 22189 - DNA, 5118 bp, DROSOPHILA
atgggactaacatctagtattcaaacttttcttgtggtggaaagagcgactaagagtgaaattagcttataagctaagaaagtgcattgaaaattgttcaaaaatcaaaactatcatttcagttcgattaggtaggattccccgaattgtgtttcgtaatgtactccaaacttataacaagtgtttcattcggtggcatgtgacctgatttacgatttttgctcattaatttgcgataattctgataattgcctaatcaataaaagccccaccaaagttcggtaattacccgtaatggaatgaccacaaatcgtcaaatcacgtttctccaactatgtacttcgataaagttttatcttcacaatgatgcatttcccacggaattattagtattacaagttttctagtcttatacacttaaaaaaaatataaaaatatcaggtagtgcagcaactcttctcaagtatcgaagaaaacacttgagagtggcattagcacttctaagtattagcttgagtcatatgcttactgacttttccaagtgtggaataaaagaagtgccacatattggggtaataatgacttttgcagagataacttcatgggaaatcattcaaaagttattgcacttaaggttatttcatttttttattttactgtaccaattagtgtccgttatgataattttccgccgacgcattagactcaatttcaagatactcaatttgtcggcacatttgatataattctctaaaaatacacaaatcttgagacgttccttattgaatgggctgggccaaaagcagaacggattttattattcaaatattccgcgcctttggcaaaaacggaagagtggcgccacctatgcttgatgttgtcgaacaatcatttcgtatacgacctgttagccatgctaacagtgaagttaaagaattttattcgttgttatcagcacgacactaatgctattttaaattaattttatggcagattcatcatgtctgaggccaccaccaatggacacaatgaggtgccagccaataatcttccatcttggctgtcgaaaatctctctggagaaggctgttcaggcccagatcggagactttgagaaaatcatctcggtaatcccacaaaagggcagcagtgatggcgataattattctacacagttccttcgtttgctggtggaagtggaactgattggtgagtgcggatctatacttatagatgcatataggatgcaaataattatatcgcataaatattgtttgcagaccacagcaccaaggatctttccttcgttctgaaggcacagcacagcaacgaaatgatggccgccatattggccaagttgaagctcttccaaaaggaggaacagatgtaccatagcattctgcccaaattcgagaagctttacgcggatgccggcaaacccattcagttcgcgcccaaagccttcaagttcgatcgtgacctcggagtggactacattctgcttgaggacctacatcgcaagaacttcaaaaacgccaatcgcctggccggtctggatctcgatcacatgcataaggttctcgagaaactggccgccttccatgcggcatccgcctgctacgtggagcaccacggtctctttggcgaggagttcaccgttggcgttttcagcgagtccaatcgccagcttcttcaggagttcaatgcatctggtgcatttctggctcagctcaagaagtggaagaatgcgcagaaaatttatgaaaagctggtgggtaactggtgtgccaatgagttgaaagatgatccggctataaatctgtttcatttaggctgacagcgatgactacttggtggatcgtctgctgcaggatcagcaatacaataccagagaattcaacgtgctcaaccatggagactgctgggccaataatgtgatgtaccaacatgatgcatttggaactattaaggagacccttttcgttgactttcaagtgggaaaatacggaagtccggtaggtcttctggatatagattatatctgaatatttcaatctgatcaatactctaacttcttatctgcaggccaatgatctgtactacttaatattgtcatcggctgctccagagctgaagactgccaagtttgactacttggtgcgctactattttgataatcttattgagaatctaaagcttctgcaataccaccgaccactgcccaagttgaagaacctgcatgcttccctttttcgcaacggtttggctggtgagtaatccaatccactatcgacattatgattgcacattcataatgctttatcgacagcttatatggtggtctccaaggtgttgcccgtcgtcatgctggacaagacagccgatgctaatctggaaagctatataagtgacgagtccaaaatgaagaacgctatgttcaccaacccgaagtatgtccaggtgatgacggaggtgctgccatggttggacaaccgcggcctgctcgacttgaagtgattaccgtcccaaagttgtggagtaatgatggattcacactttaataatgactatttaattgtgtgatctacaaatggcgcataaagtcaaataaaaagataattatattctaatggactgtttactgatgtttaaaaatataattggtacatcatgctactttaaaaacattattttaaatttcgacaatattgcaacaatgaattgatcttttaggcccttgcatagaaatttcaatcaatagttacatttccaaacaaaattgtattgtatattaaaatagccatgaaagttccgaaaattcccgattgggtttcctctctatccttgaaccaggccgtccattccgtcctggaagatggggtgcagattacgtccgtcatcccaagcgttcatcttatccagtttcgcaactgcactgtgcttctgccaatccaggtgaaagtccaactgcgggacttcacgatgaagaaattgttctttctactgaaggcacaacatggcaccgacattcaggccatggtgatgaaccagttgaagatgttccaacgggaacaccaggtttaccacaatgtcctgcccaagctcgaggaaatctacagagaggtgggcaagaaggtgtcctttggtccaagggcctttaggctggactacagcatcggtgttcagtatgtcctgttggaggatctcaaggccaagtcctacaaaaacgttgaacggcaggctggcttcaacaaattgtgcctgaagcaggtgctcaagaaactggcccagttccatgccgcctccgccgtgtgtgtggaaaagcatggcgcgtttagcaatcttctggtcaacggagtctacacaaaggcaaacgaatctgtgctccaggagctgaacgatccggagatcttcctttctcagttgcgacgctggcgtttgggtgatcatttccacaaacggttggtggaaaaggagaaggacctcgtcgatgggctgttaaagcttcattctcccgactccaatgaatttaacgtcctgaatcacagcgactgctgggtgaacaacgttatgttcaagttcgacgactccggccatgtggaggacaccgcactgctcgattaccagttggtcaaatatggatctcctgtaggttttgtggtttctaagcctccgcgtaaatccatgtttactcattaacattttccaggccattgatttgtactacaccattttgtcgtccgctgaaaaggacataaaactagcccagtttgacaatatggttcagtattacttctaccatttgctggataacctcaaagctcttaatttcggaggcagtctaccgcagttgcagcatattcgcgatgccctaaacaaaaacggactggctggtattaataattgatattaactaaattaaatctaatcggtgaatggttttcagcctatgtggtggtcactcgggccctgcccataacgatgatgaatcagttcgaggacgaggtaaacgaacgatatgcctccaaaatgaagtgcgccatgttcaccagccggaaatacatccaggcgattaaggatatcctgccctggatggaggagcgctcccttcttaattagtcatgaattaagggttctcgaccatttaatgaatgaaagagatattcatagactgataattgattcaagtacaatgctcaataaacttgattagccgccttatcaattttgtttgggttgatttttgtcttaaatgccagtcatgttggtatgactttttaacacattatttcgtgtgtttcgcatggtcttacgcctgctattaataaaggcgtaatcgaaaactaacgttaattgagcttgaatctaagttgataatattcgttatcaggccacaaccagcgcgagccaatgacacacttcccgaaatcggacaatcatcaattattccgattcgggatgacggagctggttcaattaaagaattttagctagacaatagaccacaatgcatttgtataagtattgaaacacgagtagcgacaatgaactgaactatttgtgtggaatttaaatgaatttgttggacaacaattaagttctatgtcaacattacttctacagatattatgagagatgtatctacaaaatttcaacaaggggttgtttcatcaattgcagtattcaaacttatcgattgtttagatcagccgttgagtttgggtaattgttttttcctatatagcttcctataattgctagcccatcaatttatgaaatatatcatggtcacaacttattgtaaactcagcaaggaataattccgttgcattctggaaaaacggagtcttaatatgccaaaaattaggactttggttggatatgtatgataatgtgtgacaaaaaaacttcaaagaatatagttcttattgattattttgtggttaccgataatttacagacgtagtgttatcacatatcttagaaatacctaaaacaataccaatacaattgaaaatggatttgtgcaggtcaatgatgatttctttcacgactacagttatccaaaaatatgggaagcctttacttggctttattgtaacctttgttctgcatcata

SEQ ID NO: 22190 - DNA, 2361 bp, DROSOPHILA
atgtctgaggccaccaccaatggacacaatgaggtgccagccaataatcttccatcttggctgtcgaaaatctctctggagaaggctgttcaggcccagatcggagactttgagaaaatcatctcggtaatcccacaaaagggcagcagtgatggcgataattattctacacagttccttcgtttgctggtggaagtggaactgattgaccacagcaccaaggatctttccttcgttctgaaggcacagcacagcaacgaaatgatggccgccatattggccaagttgaagctcttccaaaaggaggaacagatgtaccatagcattctgcccaaattcgagaagctttacgcggatgccggcaaacccattcagttcgcgcccaaagccttcaagttcgatcgtgacctcggagtggactacattctgcttgaggacctacatcgcaagaacttcaaaaacgccaatcgcctggccggtctggatctcgatcacatgcataaggttctcgagaaactggccgccttccatgcggcatccgcctgctacgtggagcaccacggtctctttggcgaggagttcaccgttggcgttttcagcgagtccaatcgccagcttcttcaggagttcaatgcatctggtgcatttctggctcagctcaagaagtggaagaatgcgcagaaaatttatgaaaagctggctgacagcgatgactacttggtggatcgtctgctgcaggatcagcaatacaataccagagaattcaacgtgctcaaccatggagactgctgggccaataatgtgatgtaccaacatgatgcatttggaactattaaggagacccttttcgttgactttcaagtgggaaaatacggaagtccggccaatgatctgtactacttaatattgtcatcggctgctccagagctgaagactgccaagtttgactacttggtgcgctactattttgataatcttattgagaatctaaagcttctgcaataccaccgaccactgcccaagttgaagaacctgcatgcttccctttttcgcaacggtttggctgcttatatggtggtctccaaggtgttgcccgtcgtcatgctggacaagacagccgatgctaatctggaaagctatataagtgacgagtccaaaatgaagaacgctatgttcaccaacccgaagtatgtccaggtgatgacggaggccgtccattccgtcctggaagatggggtgcagattacgtccgtcatcccaagcgttcatcttatccagtttcgcaactgcactgtgcttctgccaatccaggtgaaagtccaactgcgggacttcacgatgaagaaattgttctttctactgaaggcacaacatggcaccgacattcaggccatggtgatgaaccagttgaagatgttccaacgggaacaccaggtttaccacaatgtcctgcccaagctcgaggaaatctacagagaggtgggcaagaaggtgtcctttggtccaagggcctttaggctggactacagcatcggtgttcagtatgtcctgttggaggatctcaaggccaagtcctacaaaaacgttgaacggcaggctggcttcaacaaattgtgcctgaagcaggtgctcaagaaactggcccagttccatgccgcctccgccgtgtgtgtggaaaagcatggcgcgtttagcaatcttctggtcaacggagtctacacaaaggcaaacgaatctgtgctccaggagctgaacgatccggagatcttcctttctcagttgcgacgctggcgtttgggtgatcatttccacaaacggttggtggaaaaggagaaggacctcgtcgatgggctgttaaagcttcattctcccgactccaatgaatttaacgtcctgaatcacagcgactgctgggtgaacaacgttatgttcaagttcgacgactccggccatgtggaggacaccgcactgctcgattaccagttggtcaaatatggatctcctgccattgatttgtactacaccattttgtcgtccgctgaaaaggacataaaactagcccagtttgacaatatggttcagtattacttctaccatttgctggataacctcaaagctcttaatttcggaggcagtctaccgcagttgcagcatattcgcgatgccctaaacaaaaacggactggctgcctatgtggtggtcactcgggccctgcccataacgatgatgaatcagttcgaggacgaggtaaacgaacgatatgcctccaaaatgaagtgcgccatgttcaccagccggaaatacatccaggcgattaaggatatcctgccctggatggaggagcgctcccttcttaattag

SEQ ID NO: 22191 - protein, 786 aa, DROSOPHILA
MSEATTNGHNEVPANNLPSWLSKISLEKAVQAQIGDFEKIISVIPQKGSSDGDNYSTQFLRLLVEVELIDHSTKDLSFVLKAQHSNEMMAAILAKLKLFQKEEQMYHSILPKFEKLYADAGKPIQFAPKAFKFDRDLGVDYILLEDLHRKNFKNANRLAGLDLDHMHKVLEKLAAFHAASACYVEHHGLFGEEFTVGVFSESNRQLLQEFNASGAFLAQLKKWKNAQKIYEKLADSDDYLVDRLLQDQQYNTREFNVLNHGDCWANNVMYQHDAFGTIKETLFVDFQVGKYGSPANDLYYLILSSAAPELKTAKFDYLVRYYFDNLIENLKLLQYHRPLPKLKNLHASLFRNGLAAYMVVSKVLPVVMLDKTADANLESYISDESKMKNAMFTNPKYVQVMTEAVHSVLEDGVQITSVIPSVHLIQFRNCTVLLPIQVKVQLRDFTMKKLFFLLKAQHGTDIQAMVMNQLKMFQREHQVYHNVLPKLEEIYREVGKKVSFGPRAFRLDYSIGVQYVLLEDLKAKSYKNVERQAGFNKLCLKQVLKKLAQFHAASAVCVEKHGAFSNLLVNGVYTKANESVLQELNDPEIFLSQLRRWRLGDHFHKRLVEKEKDLVDGLLKLHSPDSNEFNVLNHSDCWVNNVMFKFDDSGHVEDTALLDYQLVKYGSPAIDLYYTILSSAEKDIKLAQFDNMVQYYFYHLLDNLKALNFGGSLPQLQHIRDALNKNGLAAYVVVTRALPITMMNQFEDEVNERYASKMKCAMFTSRKYIQAIKDILPWMEERSLLN

SEQ ID NO: 22192 - DNA, 13255 bp, DROSOPHILA
aagttaagtgcggtgactttaaagattatcctttcggtatttaccacgtttaatggcaaagcctgcaattactctcggtaattcttgggtagtttcacccttctagagcaaaatgtattcaaaacgaaatcgaaaagttgattgtctgtgggttattatgaaattaaaatgccataattcgattatttcgcgagcgaacggtcctttatgctccttgcttgttttccaaagtgaattgtccgtggccacgtggcgtatgtgcaatttcccaggcacttgaatgtagtaaaataatgtttgatctgtccacattttctggcatttttctcacactcatttggagtcgtttaaaggcttttccccttgaacaagtctattgagctaagaacttgagttctctcaacagcatctttgtcaggcgtcgtctgttgccataaagcataattgaaatttgagattgacattgaataccagtggcattgttgctattgtcgccttttgtcccggcctttcatcggctacaattccagtccacagcaaatgcgacacattgctcgattattattgtaaatagaaggggagcgaaattggcgcctccgtgggatccattatcggtccataaactagatacagtcgaacttcttaaggctaaactttcaactgcaaagcactttgaaatttgaacaagatatttgaaagtattcaaatatgtatgctttttttaacgcaacttgtgtaaaacatatcttacatagcttttatctaaacttttggataacttttctgagaaaacttttcttattatttgacgaaggattagttcgattcaatttttttgggcttatgttcttctgttacctttcaattacttattttgttggtacactcttctgtggcaagtgaatgcaaatcgtgccttcaatgggatcggcatcgagaccactaacaaccctaaagccccaacattgtgccacactcctggccaaactgtcaacacttacctgaggcaaatgcgctcctcctcctcttcgagttccacgtccattgtggcggaggattctgtctattgctatgcttgcttttcttctttattgccgctcaacgaagctgctgctctcgtcaagtgagagttttaactgccaacggcagcggcactacggaatccttgaggttgacagcaggttcctttgccggtgccgtagggtataaagccaactcgaagtgatttaagctgtcgtcaatttgcctaatgctgccatagatggggaggaacgagccaggaggaaatgtccgttgatgactaacgtgtgctccatggtgccgaagaattcacaggcgaatctgcgcccgatttcgattccaatatctgtaagcagatagcggaaaatcacatttagcattcttaataaattcgagaatctcttaaaatatttcgccgaaaagcagaaacaacaccctcttcgccaccatactcgacaccctccacgagtcattcacatttaacaatggcagtatataatttaataaatagttgcagttgacagatttcaagtgggcgtgggtgcgacggagtggcgaacactacacgtcatcggatctataaagtaacacatacgtagtacatagtacgtctatatggggaatggcgacaagtgcaaaagtgtgcacaataagtggcataaaaaagaagccaaaggaaacaaaggaagttcacgaaactgaattcgtatggaagtttgtatactctttttctaagaaagtaaagattcatattaaaaggaacagaaatttaggtgattgtttaaaaggatatctttaagttacacatttactgcgcaacttattccctaagtttcttttgccttctgatataagctaaaaatcaaaattctaccccattataaatgagttgtgatattcctgggcaaacgaagcccacagcaccagtgccggaatctcaacagagaaaataagccagggaatggccaaatcgctgtatattggtttgtgtgtgtttttcattcctactttgccatttaaacggtcgccttttggtgtgagtgtccgcttttggtgctcctccacataaggcaaacactagatatgtcaaatgttttgccttaacatgtgtgccatgcccagaaggagcaggatgcgaagtaggacgatcaggcggaaagcggcaggacggcacgggaacggacaggagtagcagtcagggacatttgtcgtgctgttggctgttttttatgtcctgcccatttccatagcaattggaacacagcgaaaaattaacgattatcaatcgagtatcaatcgttcaaggaatatagtatagaatattaaattatggaaatcaataaaccaacgaccgcttaaaaacaatatgcagagccattgtaggtgggataaaaacttaatttaaaatatataagtattaacactagctgaaatcgcgattgttttcagaagtgtcagtggtgtagaaataatgttagaatattattaaagaaggacgggtttttttgctgtgcaccaccattgaaactgaaagccacttgaagcatgcaacacccagtcaaattcaatcagtgcgtgcaacttgcggccacttggaaatgctgtctgtggtttgcctgttccgcaattggatgcaagatgtggacagaatgggctggcgggtccttgggcacagcttttattattgagtcataaaacccaatttaatgcggttaaggaatatgcatttaaccgctatctcgtacagggtgtctttttgtctgtagagaagcgctagggtgacaattcgtcatccttaaaatatggcagatatccgcatgatccccatatgcagagtatgctttattgccctccttgaatatttatcggactgcgaatatatactatatacgagtatatgtacatgtgttataggtcttgttatgagttatgtgcatcctgttgcgtgaggatatcccagcaatttcctctcctttcatttcgtttctcgttgtctgccttttttgcccgcgcctgacaatgtaaccagtttatgacgctgctagccaagtttccggtctgtctaacacgagttccccctgttcgaattgccctcactgacaggaatgctatgtaaccccatacgaggaaccaaatttaaggcgaatgtttctgaatcctgcttaaaattgttttttaaaaatattctctcaaaggaggcgattctgtgtgcgacagtcatcagcaggtgaatgtccaaaccccattccagcaagagtccttccaaaatacgtatatccgttgtgggaacgtagcccccaaaaacgccactcaaatgtatgtgtggggcgattatttcggtggccggagaagggacttatcaccagtggcagtaaattgagtgtaaatattcctacgattgctttgttgctgctgctgctgaagttgagttgtaaaaaaaagtttgcgacctgggtcaaaatgtcaggcacgtcgatttatgtggcaccctgcaaacaatttctattgcacaaaaacaaaaccttaaacgggtagacatttattgtagttttgaaatgaatggaagattttaaataataaccaaatgaaaaaaatattagggggaaaattaatgctaagcgactgttgttacaggtacatacaattttcctggctgaagtttcttgactgaaatcatatatatgttttttttttggtgcaattttcatgaaggtgtcctgtttgttttgggagaaacagtttgcgccatcacgcggctgaaaagaattaagtttctgattcatgtcgacaccagcgactcaactactcatcttgctgaaagggcagcggagaggttctgctgccaaggacctgcagcctgcactgttgctccccgagccctttgcttgccacactctccgtcgcattaagccaccgatttatgttgcacgaagggagcgacgagcaaacaaacggagcacagatcctgcaatccgagtggtccttgcctttgtttatcctgctgccaggatgcacctcgcacatccttgcaccctgacacttgcgcttatgaataagcgcctactgtcctgcagttccagttactggcccagttaccgggcaattatgcgcttcttaaaaataaattaatgaccaaccggcaatacggagcaaccggagaggaagcagaaacatcggacactcccgcaagtgaactttaccggacctttttaattaattacacggcacgagtcgccagcaaaagagtctttgataagtaagtcccagctaacatggacaaactttttacgatcgccgtgagactgattgctaatatatttgttgttgccctaattagtgcgattagaagccattagtcttgacttttctctttttcccgtttacgcgaataaggacagacacacaaacttttatttatgtattaatagaagatatttctttatcatattataataataaatttgggtgaaagcaattagtttaaaaataataccattatttagctaaactgttttcagttctattttgacaaatcaaacttcatttccaattcgaaaataaaatctcattaaaattctatgtttaaccagccagaaaaagctaatacctttacctcgatgtgttctttttccattcatgaataattggaaactcaaaaatacattttgtagtttcaggcaatattcgtgttctctctgctctgcattttgatttattttaatagcatgcaaacgagccaactcccaaaattggtcataagcggcgtatgagcaatttaactggacgatcgtccaaaatcgttgcctactttcaggcggtgcctgcttttagcgtcaactttaatgacctttccaattattgatgaattaagatggaatgaggcatacatataatttattattattataaatgcgtttcaattttaattgcatgtgtccgagcgatgaacttaattgaattgaaaacgagcataaattgaatcagagcacaggagttgagtaagtttttgcgtgaaaaacgttagtgcttgtggacaggtggcaaccaaaatggtgagtgagtgcgtgtgtgtgtatgtgtttatgctttagccaaatacatttttacatttaccacggagcaatttattttaatttccccacaaaatgtctgctaatcatgacatttgctcgtttacattatgtggtcggttttcagtttttgcagcttgcgcatgtaatttttgatgcatgcattagctgcagctgcatattgcatggctctctcttagaattgctttcaccgctgcacttttgggatttaacattttgtgcttgtcattgccaatgaatcctaaagattcccgataaaatggcaacattagtgaatgaaccctaatcacggcgcgctaataaatcatcttttttagaaccatccattatttttaggaacatcgttatttttatattcgcatgtaaaacgattgtataagcgttcgtatttactgtaactcgaatgccgaacgacacaatagacatggcggaaataaaattcgtacccggccaaactgtttacacaaaaaagaaaagccactctttttacgagacaccggttcaaaaggagtaacacctgctggggtgggtaatattaaagtttaattccacaacaaagccgtaaaaacgaaacaggaaacatatacccacaggccacatcaaacgagttgcactaagccggccagctcactttgtctcctgttcgtgcaccagaaaacaactgaaatctacatgggtttttaaatatttttccggcatggaaaatttattaggtatactagtaatggcataaatattaaaatatttctatcaaatgcattttaaaactctgtgcaacgatgaagaaataagaatacgttgatttaaatattttgaaaatagtttttttttatatttttgggtatacctattcacaagataatttctatattttttattaactgaatcataatccctctctgtgtaggatccccctttccatcatgaaacacacatataaactgataacccctttgtgtttcgaaaatgccgctgtgcaatgtgaaatatttgaaaataaaatatgctctccgttttggccgggctaaaagcaaatgcgaggcgcagagaatgggccaacgacaaactgggaaaattgtagcataaattaagcagagaacaaacgatggcacattggcagagagtgggttatcctctggaccatcagcagctgactttgagtgacgttgaagcgtgtcttaaattgtgattaaaaaacagggaattaaatggtttgtgtttagccttaatgtctacattgccattacggcccctcctcgtgaaagccccttccccagctggaaaattaatgaaaaccgttgtgagtttcaattatgttttcgtactttctcgcaccttccccacctcacctcctgttttccgcattttcgctctgtttggacaatgacaaactacttgcatgtgtgtgctcgtgtttacttttctttcggctatgaaaattattatcttcccattaatttcgctctctcggtagcgcgagatttaatcaaaaaattaactcattgtgtgtttttaattattcaattattatgactttacggctgtttgccttggcagccgtttccccatttttcggcccacatttataggtccgactcattcggggcgtgttttatcatagccgcagcaaaaacatttatcggccaagtgagcaaacaagtggcaaaagggaagatctttcaaatgcgataaacgacaactatttttgcttctagtccgtacactgtttaccgagaaactcgagaatgcgtgtgatgagtttaaacaattgttacgaggggggtaaaccattatcgaatggcaaccataacttgttggaggactccaggaacttggattgcaacaaggttggacagcgaagttaccaaacttctaaaacatttgaactgacagaaagtaagggaaaacatagggcatgttcaaaagcatgttgtatacaaagttgtttccaggaaatggcttaagcttatgttagggttttaggttttttttttttgagcggaaaaaaagtttctccaaagggtgtttttgcataattataatgaatttgggcaaggtacattaataataaaatcataaaaaatatgattgttgtaaaataaattaaataaatataaatatttaattggaatttatttgtttccaagcatatttataacaccagttcaactctctgagtgttgcatttgaatcctgcaactatgtagattacaatagtacactttgacagggagccctccgcataatttcccctgattttccacacatgtcccagagccctggaaagtgcagttagggctccgtatttgtctgctagtttgcgttttattgtttgccacttcagcaaactagccccccttttttagcacacttttttaacccccctttaacccgattgcagactgcgatgtcgccactttgtgccaaagcaaataaatagcaaagtgaataaagtgaatttttatcagcttcacaagtaaatagacaacaagatattcttggcaaacgcccccgaacgatttactgcagatttttttctttttctcaacgtctgtactcgtttactgtgtttggaaattgtacattttaatgtttcacatatgaatagatttcgctcttgttgttgcccatttatactgaaaaagagtgggatacagggggtaaacaaatccgagaagaaagcaaagtcaaccaactaaaaatgtatgcgtttaattatgtatcagtacgagtatctgcatcgttgtactttgaaaaattcgccagcgagaatttcattttatcactttttttgtagttttctgcttggctggcgagcagtagtgagtcattccgaggttttatattatgacactccgcttaaatggattttgtgttcggtgccttataaggcagccaaagccattgaaatccgccagatcaggccaagtccatatccacaattcgcattagccagcggggcatgcaatttaaagccactaaatcttggtatcaacttggtttagcaaattatttgttttgaaatcaatatttctgacacctcgtgtgatggactagccagcaaatatttcctaaaatctatacattcatttttacaatttgtttatgttgtgttcatgggtttttggaattttatctattcccaggcagcttaagtgacttctggggcagacttttttctgatttatttgtccaacgactaaacgctcacattttgggcaggggcaagaaaaattgcgtctgccaaaaccgccagccaaattgttgtgagaaagttttccctcggttgttgcaatctttccgggtgttttgctttggcttccctcctcctcgttttcgattgcaccacagccttggcagcaatttgacagacataaacaaaagggaactacgaacacggtggtacaatcgtagatggaatcgtcctaagaggaattccaaatgctctattgtggcaatttaaagtgatcttaaaataaggtaatataaaaactgtaatatcatacgctgtttttcagttttgactcatatatggtagagtaatgattacacatacaagtttggccccagtttctttgcctgtatcggaactaaagtcaacattttgaccggttaccctaccaaattggtgtatacttttcactttggcagcatcctccagccgggattaaaagcaattgttggctttgtgcccgatgcagccacaagttttgagcctggccaaatccgggctataatatctgtgccgctgccaagaggcaagtaaaaagtggcagcaaccaggacaattagcacagccaaaactgctgggccataagtttccgttggcaagacaacgcacaaaacagtgaaccgagttccgtcgtctgaggagcggtgtgtcaagtagctctttctgttccaaatccccatcttttgcgttgtttcgaaaaacttgaaaagagtctagtcaagatgaaactaaattaaatgcggttgaggggacaattattctgccatttatctctcatatggcataaagttacagaaagttatctttttgaactcgctttgagctgcttagcgacacgtggcctcctcctctgctgaggtgaactttttagcctaggatgcggtgtaaagtacaacaaggattcgccatgaagctcctccccggcggatactttacttttatttacttgtcgtggggcatattaaatttccatcgccactccatcgccggaaagttgaatgaatgttattttcaaggccctcttccattgaattgccttcgtagaggcccggcgcgaattgaattaaattgtgtgactgaagcataaataaattcattaaatactttgtcgagatgccataaaagctgccaagtgctgtttttccagtccaatgtttaaggcattcgatcggaccttccctcaagcgttcaacaggtcgtcgagggaaaccttcagtagaaagaaggaccagaacttgaccttcccaatgcgccttattgattcaataataaaaataaccgcaggacgattgtaattcgcttgtgggcctgtgtatctgtatttgtatttgcttgagtatctacccatggctttggtcactttctcattgcaccttgtatcgcctatcgcctatcaagtatcttgtatctcaatgtcaaggctgtctagcagatgcctcattatggatgtatttcaattggactggcggattgacaatgaagccaactgcattagctggtagctcaatgaatgctagttaggtgtttatgtaaatgtgtaggacaaagatcgtgcctctatacgcagagaaatggtatgagaaattaataaattaaataatgatcatttaaatgatgtgtactttataaaaaatgcaactgaaagctggcaccttccctacaaaataaataaatattcttaaaatcaaatagcatcatgcaaaaaaaatatggtaattatattttatattttaaggatccaatgtgtaagctcatgacttaactacctacagaaccgaaatacaattagaatcttatttgattggttccaaattgtctttttatttttatcaaatttaatatagctcttgtgtttttattaagctcttatctaaagagtccccgcttacactggtacttagataagctgcatattagcctctgtctgacctttcgccctccaggcaggtgtatcttttttaagccacctgttttttctacttggaactagccgcttattatgcatcattctcatcaaccgggagcccagttaatttcacctctcaggtcctaatcctgcagacggtttggacttaatgcccgcacatgccaacaagctcggcggcataatgcgtcaaattgctaattaagaactgcagcagtggcaacttttgccccgattagtggccatgtcattagggtcctgatgaaaaggggcagaagcctggtcgaaagaggcgaaagggtctgagcttgcgtgttaagatatttgattatgacaaacaagcgcacatactgtcgctcacacacacacacccaccaattaggggagggcgtggccctttttcgtggaccgagaagtagactacgctactggtcattcaactattagtgccgaaaacaaaatttgtgtcacgtaacactgaccccaaacaaaacaaaaataattaagagcttaaagatagtgacagtcagcgagcgggcgattaaaaatagtcggaatggatgctgcccactcctatttttagggtcaccccggggtcaatcactccacgcggctagacaccagcgtggtggcaaagggtggccataggtggcccgatgtggcttaaggtggccaaagggtctaatcatcccccgattcgagtgggtccttaaaaccaccaatttatttgcgttttgcccgctgcgcacaaagttttttgggcagctcactgaggctgcagtaatgcgaattgatttccgccgactgcaaacaacatggttatccatttccgtcgcatccgtatccgtatccttacagcatatcacacaacaacaagccacaacagtgcactgaaagaaaggactcaatcctatgttatattacagacctattgaacaaattaaaatgagttacaaatgtagaaacgtttgaacaaaaaattattatttttaatactatatgactcagttaataattatgtgcgataagggcaaattttgagcgttgaaaattgaaaaatactcccaaaagttactcataaaatattatgactaaatttttagaacgaactaaaattttaattaaatataattgtagcagtgcagtgcccatttcccaccgccaataacattgttaaaaacttccacttcgaatttcaagccaaaatacttgggaaatattgttgatttgattttggcggcgtagaaacttttcaattaattggccccgacttggcagttgctctatctgtcagcgattttatggcaatgcacatctggatctggtaaatgggtcttgggccatttgaattcgttcagccagcgaacgtgacccaaaagttggggcccgtgttttggccacctcactcggaattccggaaacggacgtgacagtaataggtcacgctcgattcccttcgattttcgggctcggtaccagtaaaaagtttattttatttgattttgatttgatatttttgagaagcacataaattaccttcacttttcgtgttgaaagttgtgtccgtttttatggtttttggttaacaaagagggctaaatttttctgattcgattcggaattccaagattgattttttcttaatttattttccattttaaatacatttttaaggactccttgattgactatcatcttaaagtcataaaatgattgagctgatacttttgattactttttttacgcacaattttcggcggtgattgcccacgaaaattcactttgcacattttggcttaccagcctccatttcgtcgacgtaactcaatttaagattcttttgaattgattgaatttcgactaattacgcgcacttagcaccttgacgggcattttcgaaagggaaattgatatcgaggagcgctcgcccatataaaggacttccgatccacgtcgctagccgagtgacaatgcgtcgtatacgcaacttcctgccgcacagtgtcgcgttccatcggcaactgaattgaaaggccgttcgttgccgacaaaacgacttggaagcaacaagcgcgcacgacagaattccaggagcggattcgcgaacctcgggttataaatctcggttatttacagaagctcgcaccatccaaatatgtagtatgacatcactgtacaaattcgtcagtgttagatgcgtaattaaaacgtctgcataattaaacacgggagatttctgtttatctgcggctacttgacatatttatcgcatggaccgaagtcgaagtacgcgacgtggttcataggaaaccacctgttggcgcggcgccatgttagttaacagcgggctgtatttcggggagcttttcggtaacattctgttaatgcagatagtaaacagatgttactgagctttctttaatgccgctaaaataataataatattaattttacggcaatttattcaatgaattaatgtatttttgctattgatgctattaaaactatttgtatattctcattccaaacgaattttttaaggaactgataaaaaaccggtctgttctccgaattcacacttttcttaaccctggcatgaagccaacattaaatcgagaaacaactcactttgatatatgctactctgcagatacactatcaataatttaataaacggcatctaatcttatttatttgttaatactaatttttaaaactctttccaaaagaaatcatattgggagatgtataattaagcacatggaagattacaaaatatttttgttaattaatttctgagcagtctaaccaccccaaaagtagagtaaattggatgacgaaatcgttgataaagaaaaatcagctgtgagtttcagtttcagagcgcgtttagagagtaaaaatgcacatagctaaacctaaaatgtttaccgtctattcgttatcaagttttaagctgctgacagctgttctccttccgataagatt

SEQ ID NO: 22193 - DNA, 553 bp, DROSOPHILA
gttgcgtatacgacgcattgtcactcggctagcgacgtggatcggaagtcctttatatgggcgagcgctcctcgatatcaatttccctttcgaaaatgcccgtcaaggtgctaagtgcgcgtaattagtcgaaattcaatcaattcaaaagaatcttaaattgagttacgtcgacgaaatggaggctggtaagccaaaatgtgcaaagtgaattttcgtgggcaatcaccgccgaaaattatattggaatcgaaatcgggcgcagattcgcctgtgaattcttcggcaccatggagcacaccattaggcaaattgacgacagcttaaatcacttcgagttggctttataccctacggcaccggcaaaggaacctgctgtcaacctcaaggattccgtagtgccgctgccgttggcagttaaaactctcacttgacgagagcagcagcttcgttgagcggcaataaagaagaaaagcaagcatagcaatagacagaatcctccgccacaatggacgtggaactcgaagaggaggaggagcgcatttgcctcagg

SEQ ID NO: 22194 - protein, 47 aa, DROSOPHILA
MEHTIRQIDDSLNHFELALYPTAPAKEPAVNLKDSVVPLPLAVKTLT

SEQ ID NO: 22195 - DNA, 5595 bp, DROSOPHILA
atatatgtatatgtataaatcgtttagaataatcgttttcaaaggggagcggaacctacttaaaagagagaattaataatatataaatatatatatgtataataggatggatcgattgctatggattgattggatattcccagaaatgggcggcgtaatccataagcaattacaagcaaaaaaaactggggtaattctttgaagacccatcatgtatttgatatagctatagaatccatatagactacaccagcccattgcccatgcaagtgattcgtcactaagctcaaaacttgagcaatcccgagtaatcgatccatccattttgttttgcattttttgggcctaggacacgatttcttgttcgcttgcgcatcttaatcagcttacttagttctagatcgcttcttcactacgtgtttgctttccattcttttgttctagttctacgctttccggttcattttctcgcctgctacttgcttctgctatttatcaccgaatttaaaaaaaaactgcctgcaactttcgtacagttcagttcgaaattcgaggaattcgctgcttgaatgtgggaatcctgaatttccatctcgtcttcatttctcattcgtcgttcttttcgcctactttaagtcttatgcttactcgtccgtcttctatccgtaatcctactacttataatccatcttcatctaccgcgtcttccacacacttagctctaatcgtagtcctctcctccgccttcatgctcatgctcctccatgctgctgtgccgatacaattcttaatcatatgcctagtgtaacgcaatctgcttcgtctgctcctttgttgtcgtccagttatgctattactcgcgctgcatcacctccttctccatcgatgatcggcctgtagatcccaatctcctctccaccttcaaccagcgaatctcagtcgagaattacttgttgtggagacagccaggtggcagcggcggtaataggctgtcccttcctcattggggcggctgttggctataatatccgtatgcgccggttggtggtggaccctgtggtgctcctggcggcggcatctgtgcgccggcgggcctatagccctgatagccctgcgtcggcggatactgtgcatagccaccggcctgaggtggctgatggtaagcgtggccaggatacgcgctacccggcggcggtggtccatacgcctgtggtggtggcggtccaccgtatggtccttgtggtgcgcccggtgccggctggtattgattcggtggcatcggcggtgtggctccattcggaggcggttgctgattgccctgtccctgggcatttggtgctcctccgccgccggcggatccgccagccgatggcggtgtctgttgttgttgttgctgctgctgctgctgttgttgctgttgctgattgggcggcggcggagctcctggctgctgattgtaattgccaggcgtcgagtaagtgggctggacttgcgtgggcagcggcgcaacgccggaaaccactacacccggtggctgttgctgctgcggttgttgttgcggtggtcccgcatactgctgaccagctccgccaggtccgctgggccccgctccgccaccagctccgccctgcggcggcggcgtcgattgctgtgcattgggtccgtttggattgttgttgccaccgcctgctccgccgcctccctgtggcggtggcgtctgactgggcgccgtggtgctgtacgctccgcccggcggtggtggtggcgctgccccgctagtcggcggtccacccggatagctactgcccggcggtgcacctgctccgccaccagcggccgcttgctgctgctgctgctgttgatacgcctgatagggactctgggcgctgctcgtgggtggtggtggcggccagtagccactgggcggtggtccaccgccagcaccagcctggccatactgtcccggattcggcggatagcccgcatagcccatcggaggcggtccaccggcggagttctgcggcggcggcggaccgtattgactttgcggcggtccaggtggcggttgctgctggccaccagtcggcggctgtccgggtggcggtggtcccggcggcggttgctgttgtcccggcaccggtggaacttgctggctaccgggcggcggtggatatgcacccggcggtggtccttgtccggctccggcattcggctgatagccatgcccactggctcccgtcgccgcaccggccggaccatgatggtagccaccttgagcggcatttggtggtcccggcggcggtggcccatagccctgtgttggcggtccatagggataggcgccctgcggctggtactgcgtctgcggctgtggcggatagcctggatagtggctgtgctgctgctgttgctgttgatagctgacgcgatacggactctgtggcggcggtacacctggtccgccggcacctggctgcggtcctggtccgccgggaccggtctgctgctgctgttgctgttggttgggcggctgttgaccgcctggttgcggctgctgttgctgttgctggggattctgcggtccggagaggggtccgttgttaggacgctgttgatctgcaaggcgaaagatgtttggatggagatgagtaaaatcacagcctacaacataccactgactaaacgttttttttttttttttggggttatacccaaattaaattaaattcttaaacaatatgttaggatttcgaattatattcaacaaatcaacagttttttaatatcacagaaattggtcaaaactaaaggcatcgatatcgaattcttttaaaatgaagtccaaccacatccgatcatcgtcatcgtcttgagcggctacactacacttactgggcgcggcattcggattgatgacggactgaaccggcccctggccctggccaggtacctgcccagctcccggctgtccttgaccctgggcattccgatagacgggatgctgctgctgctgctgttgctgcgggcccgcttggctgacctgcggtccctgctgttggccggctgctacggcagctgccgctgctgctgctgccgccgctgctgctgcctgctgttgttgttgttgctgctgctgctgctgctgctgctgttgttgctgctgctgctgttgctgagattgctgttgagcgcccggcggcaggccaggatgtggctgcggctgctgttgggcgccgtagggcggcatctgaacgggcggtccctgcggatcgccgccatgctgttgcatgcccatctgcggcggaccctgaccaggttgtcccggcactggaccctgtcccggctgctgctgctgttgcggcggaccacccagcatgccgtgcggtccggttggcggcgtctgctggccaccctgctgcatcgcttgcgtttggaggatgtgcggcggctgcggggggatagatggtatacattattggcgatcagaaagagatgttgagccaagtcaagttcaatgaaatagcaaatcttatgatcgtgcactttgttctttttacccaccggcagtatttgtgagatgttcatggcgggatcggccaactgggcgaggtagaccagattgcgatgcagcgcaacgtgataggacatgcactcctgcgccttgcccatgctctggaagtcctgaatcgtctggatgaggccgcaattctcgtcgagcatcttttggatttgcgccgaattcacttgctgcggcacaccaccacctccgccgccctgcatattggctccgccgcgtggtgttgacgttggtgtgaccatcattccgccaccgggcataccaccgccaccaatcacaccgccgccaccgccgccgccagagatgatgctgcccggtgatcctgggacgcccatgggcggacgttgctgctgctgctgcatgcccatggacaggatgccaccgccgcctggtatgccacctcctcctccgccgggacctactccggatccaggcggttgttgattgggcgcggagttaggtggaggttgctgcaattgttgttgctgctgctgctgttgttgtggcgggggaggctgctgctgctgctgctgcagttgctgctgctgttgcggctgctgctgcggcggttgcggcgaataaactgcagacattttactggctgcagtcttcttcttccgcttgggggttttctcctgtttttccacaattttagcggttatattcgaccgttggggaaaggaaaggaaaattttcgcagtgtgcggctttttcttcacatacacactcgcacacacacacacacacaaacaaccgcgagtgctagcacaaacacacacacaattaaagacacgcaaacacacgcacacgtacacgggccaagaagtggctatcttttttctcttttgcttgtttttcgctgcacggaaaaacgccggctatgcggaaaattcgttgctaattcggctagcaattgttcgcgtgcgacgaccctcacaggttggcaatggaaaatggcatatttttcattaattttccgacactttttcgcaaattgcatggaacgcaacgacgcttaaaacgataacacaggcggctcaggccgattaatcggtcgaatgcatgatcaagccgggctgttagttaacagccgaggaacagactgtgttagggttgatttcgaattcaaagtgtggttttatatgcttcattaagcacatttaaatataaaggtggtcaaaaaaaattaattaaatgactcggcatgtaaccaaatctcttaacaagtctttaagctatgtatagttaatttgaaatgacaacataatatggcttgcatgacgattaggactgaacgtgctaggtcgcctcaacatggcgttcgattgtgttgtaatcagtgttgtaacgcagcgatttgcagcactggttaaaatggataccggtttcttgttgttgctattttaaatgtaattttatttttaattgaaaagtgcaatattactttctaatttgtttacgattgtcctgcttgacttaattttacttagtaatttacttaagccatatatatatatatacataaatatattagtgaatttttgaaaacgtgtttattttaacgtctttttttttaattttacaatttgaataagactcatgacttagctattagttaatgcacatttactttttagctactcaacccaggtactttttaacgttagcagcactggctaatgcggttgaacagggtgattaatgcaatatcgatgtaaacaaaatcatttgttgatttgcttttggaatatgttgtaatattatattaaaatgtaagtgcatatgaactagaatctattgaaatatatatttaaatgtctgaattaaaggacaaagtcgagaatttgccgcacttgcttggaaagtccggaagtcatggtcaattcatttgatgttccacaaaatttgggatataatataatattaccatataatatatatcttatcccagtgcatacaatatccattttataaaggggatttcctacccgaaaccatttgtctgccgcgcctaaagg

SEQ ID NO: 22196 - DNA, 3206 bp, DROSOPHILA
taagcgtcgttgcgttccatgcaatttgcgaaaaagtgtcggaaaattaatgaaaaatatgccattttccattgccaacctgtgagggtcgtcgcacgcgaacaattgctagccgaattagcaacgaattttccgcatagccggcgtttttccgtgcagcgaaaaacaagcaaaagagaaaaaagatagccacttcttggcccgtgtacgtgtgcgtgtgtttgcgtgtctttaattgtgtgtgtgtttgtgctagcactcgcggttgtttgtgtgtgtgtgtgtgtgcgagtgtgtatgtgaagaaaaagccgcacactgcgaaaattttcctttcctttccccaacggtcgaatataaccgctaaaattgtggaaaaacaggagaaaacccccaagcggaagaagaagactgcagccagtaaaatgtctgcagtttattcgccgcaaccgccgcagcagcagccgcaacagcagcagcaactgcagcagcagcagcagcagcctcccccgccacaacaacagcagcagcagcaacaacaattgcagcaacctccacctaactccgcgcccaatcaacaaccgcctggatccggagtaggtcccggcggaggaggaggtggcataccaggcggcggtggcatcctgtccatgggcatgcagcagcagcagcaacgtccgcccatgggcgtcccaggatcaccgggcagcatcatctctggcggcggcggtggcggcggtgtgattggtggcggtggtatgcccggtggcggaatgatggtcacaccaacgtcaacaccacgcggcggagccaatatgcagggcggcggaggtggtggtgtgccgcagcaagtgaattcggcgcaaatccaaaagatgctcgacgagaattgcggcctcatccagacgattcaggacttccagagcatgggcaaggcgcaggagtgcatgtcctatcacgttgcgctgcatcgcaatctggtctacctcgcccagttggccgatcccgccatgaacatctcacaaatactgccgccgccgcacatcctccaaacgcaagcgatgcagcagggtggccagcagacgccgccaaccggaccgcacggcatgctgggtggtccgccgcaacagcagcagcagccgggacagggtccagtgccgggacaacctggtcagggtccgccgcagatgggcatgcaacagcatggcggcgatccgcagggaccgcccgttcagatgccgccctacggcgcccaacagcagccgcagccacatcctggcctgccgccgggcgctcaacagcaatctcagcaacagcagcagcagcaacaacagcagcagcagcagcagcagcagcaacaacaacaacagcaggcagcagcagcggcggcagcagcagcagcggcagctgccgtagcagccggccaacagcagggaccgcaggtcagccaagcgggcccgcagcaacagcagcagcagcagcatcccgtctatcggaatgcccagggtcaaggacagccgggagctgggcaggtacctggccagggccaggggccggttcagtccgtcatcaatccgaatgccgcgcccaatcaacagcgtcctaacaacggacccctctccggaccgcagaatccccagcaacagcaacagcagccgcaaccaggcggtcaacagccgcccaaccaacagcaacagcagcagcagaccggtcccggcggaccaggaccgcagccaggtgccggcggaccaggtgtaccgccgccacagagtccgtatcgcgtcagctatcaacagcaacagcagcagcacagccactatccaggctatccgccacagccgcagacgcagtaccagccgcagggcgcctatccctatggaccgccaacacagggctatgggccaccgccgccgggaccaccaaatgccgctcaaggtggctaccatcatggtccggccggtgcggcgacgggagccagtgggcatggctatcagccgaatgccggagccggacaaggaccaccgccgggtgcatatccaccgccgcccggtagccagcaagttccaccggtgccgggacaacagcaaccgccgccgggaccaccgccacccggacagccgccgactggtggccagcagcaaccgccacctggaccgccgcaaagtcaatacggtccgccgccgccgcagaactccgccggtggaccgcctccgatgggctatgcgggctatccgccgaatccgggacagtatggccaggctggtgctggcggtggaccaccgcccagtggctactggccgccaccaccacccacgagcagcgcccagagtccctatcaggcgtatcaacagcagcagcagcagcaagcggccgctggtggcggagcaggtgcaccgccgggcagtagctatccgggtggaccgccgactagcggggcagcgccaccaccaccgccgggcggagcgtacagcaccacggcgcccagtcagacgccaccgccacagggaggcggcggagcaggcggtggcaacaacaatccaaacggacccaatgcacagcaatcgacgccgccgccgcagggcggagctggtggcggagcggggcccagcggacctggcggagctggtcagcagtatgcgggaccaccgcaacaacaaccgcagcagcaacagccaccgggtgtagtggtttccggcgttgcgccgctgcccacgcaagtccagcccacttactcgacgcctggcaattacaatcagcagccaggagctccgccgccgcccaatcagcaacagcaacaacagcagcagcagcagcaacaacaacaacagacaccgccatcggctggcggatccgccggcggcggaggagcaccaaatgcccagggacagggcaatcagcaaccgcctccgaatggagccacaccgccgatgccaccgaatcaataccagccggcaccgggcgcaccacaaggaccatacggtggaccgccaccaccacaggcgtatggaccaccgccgccgggtagcgcgtatcctggccacgcttaccatcagccacctcaggccggtggctatgcacagtatccgccgacgcagggctatcagggctataggcccgccggcgcacagatgccgccgccaggagcaccacagggtccaccaccaaccggcgcatacggatattatagccaacagccgccccaatga

SEQ ID NO: 22197 - protein, 926 aa, DROSOPHILA
MSAVYSPQPPQQQPQQQQQLQQQQQQPPPPQQQQQQQQQLQQPPPNSAPNQQPPGSGVGPGGGGGGIPGGGGILSMGMQQQQQRPPMGVPGSPGSIISGGGGGGGVIGGGGMPGGGMMVTPTSTPRGGANMQGGGGGGVPQQVNSAQIQKMLDENCGLIQTIQDFQSMGKAQECMSYHVALHRNLVYLAQLADPAMNISQILPPPHILQTQAMQQGGQQTPPTGPHGMLGGPPQQQQQPGQGPVPGQPGQGPPQMGMQQHGGDPQGPPVQMPPYGAQQQPQPHPGLPPGAQQQSQQQQQQQQQQQQQQQQQQQQQQAAAAAAAAAAAAAVAAGQQQGPQVSQAGPQQQQQQQHPVYRNAQGQGQPGAGQVPGQGQGPVQSVINPNAAPNQQRPNNGPLSGPQNPQQQQQQPQPGGQQPPNQQQQQQQTGPGGPGPQPGAGGPGVPPPQSPYRVSYQQQQQQHSHYPGYPPQPQTQYQPQGAYPYGPPTQGYGPPPPGPPNAAQGGYHHGPAGAATGASGHGYQPNAGAGQGPPPGAYPPPPGSQQVPPVPGQQQPPPGPPPPGQPPTGGQQQPPPGPPQSQYGPPPPQNSAGGPPPMGYAGYPPNPGQYGQAGAGGGPPPSGYWPPPPPTSSAQSPYQAYQQQQQQQAAAGGGAGAPPGSSYPGGPPTSGAAPPPPPGGAYSTTAPSQTPPPQGGGGAGGGNNNPNGPNAQQSTPPPQGGAGGGAGPSGPGGAGQQYAGPPQQQPQQQQPPGVVVSGVAPLPTQVQPTYSTPGNYNQQPGAPPPPNQQQQQQQQQQQQQQQTPPSAGGSAGGGGAPNAQGQGNQQPPPNGATPPMPPNQYQPAPGAPQGPYGGPPPPQAYGPPPPGSAYPGHAYHQPPQAGGYAQYPPTQGYQGYRPAGAQMPPPGAPQGPPPTGAYGYYSQQPPQ

SEQ ID NO: 22198 - DNA, 3465 bp, DROSOPHILA
cttcaactgccgaagtggggatcagttgcgcaggatttgtattatttcttgctttcatcgaccagcctggacattaaaacggagaaattcgactatttcgtctggttctaccactcagagttggtgaaacacctcaaacttctgaactactctaagaaactgccaactttaagaagcattcgcaatgctcttaacaagtacagtggatggggtaagttagttataatagttaagaccattataatatcttcttatacgtattatcttattgtagccttcatttgctctatatccgtcatgggagtcgttctgctggaccccacagatgatgctgatttcgataagatcatttcgaacgagcattcaaactttacgaattccatctacaccaatcccagataccgcaggcatatgaaagttgtcttaccttggctgcagcatcgtggtgccttggagtaaaatatcaaatgatctcttaaaattagtctatttgcagatatcatttttacttagaaataaattaaacgatacaaaatattgatgttgaatatcggattgtaattataaggtgatatgagaaaagggccaccctaattttcagaatggaaaggcgaaagattttttcctgtccatacgtttgttttccaaatagaataatagaaaattgtatgctggaaatgcgcctgttatcttcccaaatacatcatctaaacactttagagttactttggattaagatatattatattgagccaatatcgcagaaactgcgatgtcactatgataatctactctgtggggtgagggattgttttaaaatttccggacgcacctttcgagcacagtcacttctcacaaactaaattaatataaaacagttgactgattgttaggtaagaggtaatgcttatcgctcacatgtagatttatttctccctagagtatttaagacattcgctgagtgctctaagcttgcagtaagtgcgctgaactgaaacagcttattacaagatgcatccccagacaaaggatgaggatgttagccaaaaacaggtcaccattccggattgggttaagccaacagtctttgaggagctgcttaaaaggattgtcaaggattacaaagcaacgaaatccatgagggcaaatgcaggagtcgctgctggcgaaaactatgccaccgtaatgcttagaattgaactggatgttgagaaagaaggttcgttaaattcattctataggactaatgaattagggtatcagcgtatttgaactgaaattatctttcaattattgtaaaccttgcagataacactcaaacaaccaaggcatttatgcttaaaactccccatcagtcagagcagtatcgtaaagtaatcgagaagacagatatcttcgatgtggagcgaggaatgtatgtggaagtagtgcccgagctggagcaactgtatcgcgatgtgggattggaggtcaaatttggagctgaactctacgacatagaggccagcgactactacgtcctgctggaggatcttcggccacgtggattcgggaacatagatcgcctcgaaggcatggaccaggctcacaccgaatgtgttctcaagaaatttgcccaatggcatgcggcctctgccgttcgcgtagaaacaaagggtccttatcaggagaagtacacaaagggttttttaaggaacgaggaaatcgtagatgcctttattaatcggagcataaaagtttttctggataacgtccatctgtgcaagggttacgaaacttatctaaatgatctggtgggtaatttatcttttgatattcgtatcttcaagtcttctatcttatcattaattacagcgcattgtctccggcaagacattcgaaattgtggagagcctcaacaatccgagtcctgatgaatttattgcgttaaaccatggcgatggttgggccaacaacattatgtcccagtacaatacgaaaggcgagatacaggatacctactttgtcgatctgcaagtccctaagtggggatcagtgacccaggatctatactactttcttttgtcctctacaagcttggacataaaaacatcaaagtttgattacttcatatggttttaccactccgaattggtaaagcatctgaaattgcttggatattcgaaaactcttcccactttaagaagaattaacgacgctctcaacaaatacagtggatggtgtaagttttcaatcgttacttaatcattagttcagatcttataaaaaaaaacatttcagcgttcatctgcaccgcaactatattggcatatgtcctcctggatcccgtggacggagccgattttgataaggttcttggtgatgacgactgtagctttaagaactcgctatacattaatcccagatttcgcaaacatatggaggttctattgccatggcttcagcatcgcggagctatggaatagatacttagaatgcacaatattaaatcgtatggcgtataacgaaaaaattacactcaaggtttatatatacagtatagtagaagtagcatattgtgtaatatctaataaagacctaactagtgtttaacaaacattgtggttaataaaaaacttgttccggagtttacatataggtaaatataactataagtatagttataagcatttttttttatggtcatacaattatttttattgtctttaaatacttacacttatatgacagacaagcttctatatgggtataaatgcatccccccacgtttgttttggtctatatgtatgtatcactcgagactttgaaaacaagttgttttgagaactctccatatccagcactctctttgttttccgacaagcttttggagctttcgtattggcatttgttttggtagcaaacaaagatacagagaaaaaaagttttgctcacatgtttgtacgggaccagccggcaaataaactcttagtttgcttagaatgacggctgagacaggaacagcgcctatgcccacctggctgagagcaaatctattcgaagaattgctaagtaaacgttacggcggcaattatgccggaatcaaaagtttcaagccggaagccgggctcaagccgggagaaaactactccacaattatgctgcgcctcaagcttgaagtcgaactgcagggtgagtgtgagtcacaggtgaacaatggaaagtcaagcagaaatttccatcatcagatcacacaatcgaaaatgtgagctatatgctgaagactccctatgatttcgagatgtatcgcgagattctgaggaagaacaacatgtttgctgtggagagggatgtgttcattcaggtgattcccgagctggaacagatgtacaaggatgtgggcgtggaggtcaagtttggggccaaggcttatgaaatcgacgcgcccgatgattacgtacttctgcaggatctgggtcctttggg

SEQ ID NO: 22199 - DNA, 1256 bp, DROSOPHILA
cttattacaagatgcatccccagacaaaggatgaggatgttagccaaaaacaggtcaccattccggattgggttaagccaacagtctttgaggagctgcttaaaaggattgtcaaggattacaaagcaacgaaatccatgagggcaaatgcaggagtcgctgctggcgaaaactatgccaccgtaatgcttagaattgaactggatgttgagaaagaagataacactcaaacaaccaaggcatttatgcttaaaactccccatcagtcagagcagtatcgtaaagtaatcgagaagacagatatcttcgatgtggagcgaggaatgtatgtggaagtagtgcccgagctggagcaactgtatcgcgatgtgggattggaggtcaaatttggagctgaactctacgacatagaggccagcgactactacgtcctgctggaggatcttcggccacgtggattcgggaacatagatcgcctcgaaggcatggaccaggctcacaccgaatgtgttctcaagaaatttgcccaatggcatgcggcctctgccgttcgcgtagaaacaaagggtccttatcaggagaagtacacaaagggttttttaaggaacgaggaaatcgtagatgcctttattaatcggagcataaaagtttttctggataacgtccatctgtgcaagggttacgaaacttatctaaatgatctgcgcattgtctccggcaagacattcgaaattgtggagagcctcaacaatccgagtcctgatgaatttattgcgttaaaccatggcgatggttgggccaacaacattatgtcccagtacaatacgaaaggcgagatacaggatacctactttgtcgatctgcaagtccctaagtggggatcagtgacccaggatctatactactttcttttgtcctctacaagcttggacataaaaacatcaaagtttgattacttcatatggttttaccactccgaattggtaaagcatctgaaattgcttggatattcgaaaactcttcccactttaagaagaattaacgacgctctcaacaaatacagtggatggtcgttcatctgcaccgcaactatattggcatatgtcctcctggatcccgtggacggagccgattttgataaggttcttggtgatgacgactgtagctttaagaactcgctatacattaatcccagatttcgcaaacatatggaggttctattgccatggcttcagcatcgcggagctatggaatag

SEQ ID NO: 22200 - protein, 414 aa, DROSOPHILA
MHPQTKDEDVSQKQVTIPDWVKPTVFEELLKRIVKDYKATKSMRANAGVAAGENYATVMLRIELDVEKEDNTQTTKAFMLKTPHQSEQYRKVIEKTDIFDVERGMYVEVVPELEQLYRDVGLEVKFGAELYDIEASDYYVLLEDLRPRGFGNIDRLEGMDQAHTECVLKKFAQWHAASAVRVETKGPYQEKYTKGFLRNEEIVDAFINRSIKVFLDNVHLCKGYETYLNDLRIVSGKTFEIVESLNNPSPDEFIALNHGDGWANNIMSQYNTKGEIQDTYFVDLQVPKWGSVTQDLYYFLLSSTSLDIKTSKFDYFIWFYHSELVKHLKLLGYSKTLPTLRRINDALNKYSGWSFICTATILAYVLLDPVDGADFDKVLGDDDCSFKNSLYINPRFRKHMEVLLPWLQHRGAME

SEQ ID NO: 22201 - DNA, 3436 bp, DROSOPHILA
gcgagatacaggatacctactttgtcgatctgcaagtccctaagtggggatcagtgacccaggatctatactactttcttttgtcctctacaagcttggacataaaaacatcaaagtttgattacttcatatggttttaccactccgaattggtaaagcatctgaaattgcttggatattcgaaaactcttcccactttaagaagaattaacgacgctctcaacaaatacagtggatggtgtaagttttcaatcgttacttaatcattagttcagatcttataaaaaaaaacatttcagcgttcatctgcaccgcaactatattggcatatgtcctcctggatcccgtggacggagccgattttgataaggttcttggtgatgacgactgtagctttaagaactcgctatacattaatcccagatttcgcaaacatatggaggttctattgccatggcttcagcatcgcggagctatggaatagatacttagaatgcacaatattaaatcgtatggcgtataacgaaaaaattacactcaaggtttatatatacagtatagtagaagtagcatattgtgtaatatctaataaagacctaactagtgtttaacaaacattgtggttaataaaaaacttgttccggagtttacatataggtaaatataactataagtatagttataagcatttttttttatggtcatacaattatttttattgtctttaaatacttacacttatatgacagacaagcttctatatgggtataaatgcatccccccacgtttgttttggtctatatgtatgtatcactcgagactttgaaaacaagttgttttgagaactctccatatccagcactctctttgttttccgacaagcttttggagctttcgtattggcatttgttttggtagcaaacaaagatacagagaaaaaaagttttgctcacatgtttgtacgggaccagccggcaaataaactcttagtttgcttagaatgacggctgagacaggaacagcgcctatgcccacctggctgagagcaaatctattcgaagaattgctaagtaaacgttacggcggcaattatgccggaatcaaaagtttcaagccggaagccgggctcaagccgggagaaaactactccacaattatgctgcgcctcaagcttgaagtcgaactgcagggtgagtgtgagtcacaggtgaacaatggaaagtcaagcagaaatttccatcatcagatcacacaatcgaaaatgtgagctatatgctgaagactccctatgatttcgagatgtatcgcgagattctgaggaagaacaacatgtttgctgtggagagggatgtgttcattcaggtgattcccgagctggaacagatgtacaaggatgtgggcgtggaggtcaagtttggggccaaggcttatgaaatcgacgcgcccgatgattacgtacttctgcaggatctgggtcctttgggtttcaggaacgtcgatcgcctggagggcctagacatggttcacaccaagtgtgttctaaagaagatggcccagtggcatgcggtatcggccaccaggatccatctcaagggtccgtacccccagaactacttgcaacccacgtacgccgataccatgaaggagagcatcgaacaggtggctgaaaccttgggcaagtatttcctcaagtgcctgccactctacgagggttacgaggagtacagtgcggcggttgtatgtttctttagctatatgcaccaattggttgcacggttcatcacaaaataatctatttgtacagcacaagatgcaacctaaaatcgtcgaccttatgtatgctatgaacacgcccgatccgcaggacttcaatgctctgaatcatggagattgctggaccagcaacatcatgtttaagtacgaggacgagtcgcccgaaccgatcgagacatatttcgtggatctccaactgcccaaggtcacgagcgtggcatatgatctgatctatttcctcctgggctcgacgaaattcgaaatccaattgagtcagttcgattacttcatcaagtactaccacgatcacctggtcgagcacttgagaatgctgaactaccccgaagcaaaaacccccacgttggggttcctccatactcagctattgaaatatggacgagttggtaagtggaaacctcgctctgcaaagctgtagataaccaagttctgatttcttttccaatcgtagggtatcacattgcttttattctctgcccaccagtgctgctcgatcggactgaagatgcaaatctgaccgatttcgtcaccgagacggataatggcgatggtctaaagttggctatgtactccaatgcccgatataagaagcacgttagcgccattctcaaatggttgaacaatcgaggggccttccagtgctagttcgctatacattatatatatataaagaatactattgctaaagtgattcctaacgttctctgggaaagaaaatttgtaataccatgacatataaaatgtactgctttcaataaaatactaatgcacgaattttaagaataaaatatgcttgtaactgagcaatgattattcagtgaagtatagaagtttctcattagacggatggtaaacataatctcataagcacacttttgtttttaaatgatgagtatgtgaaaatatatttaacttctagccgctttgtactagccaggcctaataataaaacaaaacataactgccccattaaagcacaatcaaagataatcaaaatgccgtttggtacccatatagaccagcattttgtaggattaataatattcaaataattgtttattgagtgcgtggtgctcgtgcggaaaccgatggtgaactgtctatctacccatcacatgtcacgcccaaaaacaccaattaatgaggaatcacgaaataattagagcgaatggcgagcgcaaagaggaactcgggtgcccgatcccgatatggaagtcgaatcaggagcgggaacaagaaactgttttcgttatcaatcaaacaattgacggtgtttgcgtctctatatcatatatcacacacctctcgctcgggcacgctatcgcgcacccactctcgccaacgccaattgccactcttttgccggttttggcgaactgaattacaaaaaaaaaaacttcaatcgaatgcatgcgataaggaatttcttggcccatacccaaatcggggcaataccgctgttcccgagcacaaccactcgtatttcccactcgacagttggccggattgcagtcgatctatcagtgcgctccgtttaccaattaaggaaaaaggtttgccaccgctgtatgtgttttcgcattgggccattcaccgaatctagggatccgacccgccagttttgaccaacccccaatagtgctat

SEQ ID NO: 22202 - DNA, 1215 bp, DROSOPHILA
atgacggctgagacaggaacagcgcctatgcccacctggctgagagcaaatctattcgaagaattgctaagtaaacgttacggcggcaattatgccggaatcaaaagtttcaagccggaagccgggctcaagccgggagaaaactactccacaattatgctgcgcctcaagcttgaagtcgaactgcaggatcacacaatcgaaaatgtgagctatatgctgaagactccctatgatttcgagatgtatcgcgagattctgaggaagaacaacatgtttgctgtggagagggatgtgttcattcaggtgattcccgagctggaacagatgtacaaggatgtgggcgtggaggtcaagtttggggccaaggcttatgaaatcgacgcgcccgatgattacgtacttctgcaggatctgggtcctttgggtttcaggaacgtcgatcgcctggagggcctagacatggttcacaccaagtgtgttctaaagaagatggcccagtggcatgcggtatcggccaccaggatccatctcaagggtccgtacccccagaactacttgcaacccacgtacgccgataccatgaaggagagcatcgaacaggtggctgaaaccttgggcaagtatttcctcaagtgcctgccactctacgagggttacgaggagtacagtgcggcggttcacaagatgcaacctaaaatcgtcgaccttatgtatgctatgaacacgcccgatccgcaggacttcaatgctctgaatcatggagattgctggaccagcaacatcatgtttaagtacgaggacgagtcgcccgaaccgatcgagacatatttcgtggatctccaactgcccaaggtcacgagcgtggcatatgatctgatctatttcctcctgggctcgacgaaattcgaaatccaattgagtcagttcgattacttcatcaagtactaccacgatcacctggtcgagcacttgagaatgctgaactaccccgaagcaaaaacccccacgttggggttcctccatactcagctattgaaatatggacgagttgtgctgctcgatcggactgaagatgcaaatctgaccgatttcgtcaccgagacggataatggcgatggtctaaagttggctatgtactccaatgcccgatataagaagcacgttagcgccattctcaaatggttgaacaatcgaggggccttccagtgctag

SEQ ID NO: 22203 - protein, 404 aa, DROSOPHILA
MTAETGTAPMPTWLRANLFEELLSKRYGGNYAGIKSFKPEAGLKPGENYSTIMLRLKLEVELQDHTIENVSYMLKTPYDFEMYREILRKNNMFAVERDVFIQVIPELEQMYKDVGVEVKFGAKAYEIDAPDDYVLLQDLGPLGFRNVDRLEGLDMVHTKCVLKKMAQWHAVSATRIHLKGPYPQNYLQPTYADTMKESIEQVAETLGKYFLKCLPLYEGYEEYSAAVHKMQPKIVDLMYAMNTPDPQDFNALNHGDCWTSNIMFKYEDESPEPIETYFVDLQLPKVTSVAYDLIYFLLGSTKFEIQLSQFDYFIKYYHDHLVEHLRMLNYPEAKTPTLGFLHTQLLKYGRVVLLDRTEDANLTDFVTETDNGDGLKLAMYSNARYKKHVSAILKWLNNRGAFQC

SEQ ID NO: 22204 - DNA, 3453 bp, DROSOPHILA
atgggaaccaatgtttaaagttaacttaatggctaagtcattcaagtcaatgtagctatattgataacagcttaattatcattagatctacaggtacttcacaaaatatgagaaccagatttcgattaaaaagttcattgccattcagttagaaaataagtatactgggtagtacaatataccatatatggtcacaacaaaccagcgtagcaaaacataacttaaagaacaggctttataagcttttgtggctataacttcttagtactaagagaacacctttttgggcatcaacaaataagcgaatcaaaacaaaacgaatgaagataaccccctcattataacagaagagctatctgcaaaattcggaagagcaaactacacaaccgtataccttataaggcatgtgaacagggtagcaaaacaaaacataaataaaagctatagagcttacctctattaaattgttttatctacttacacacatacgtatgtatgtatatataccttgattttatggcgtactacacagagttataagcttgcaggtggtagtttttatacagcaagcttaattttatttaactattatgaaattgcccaagtaagacacgcaattcgtactacttgtcgttgattatcgcatcggtacacagatgaacggaatacggaccaaaaagattgttaaactttctcgctcagtaacgggttacagatagtctacgaaatcgactaatgcgttatctcttgtcctatatataatcttcaatttcgagaatttttggattattttttaatttgtaatgtcacgcttaaaacgactttatgggctggtttacgccaacttatatgtacgtggataaacttgcaatgtcatattctaattaaagctgtctgtggcgattgagataatatatgtatatctctcccatctcatatcaaaaccaaacctatttaatgaagtgacttgcatagcaagtgctcagtaagtacgatcaagtctagtagaacaactaattaaaaatgccaccccagacaaacgatgaaaatgtttgcgagcgagaggttccaattccgggctgggtgaaaccagaagtctttgaggacctgctcaaggataatgtcaaggattataagaagaccaaggccctaagggccaaagcaggagtcgctgctggcgaaaactatgccaccataatgctgagactggaactagatgtggaaacgaagggtacattaaattttgcttaaaaagaatcaaaaaattaagccaaaggatctatattttagacaaatcggaagtaaccaaagcattcatgctaaaaactccccacgacactgacgcatatcgcaagcttcttcaagaaacgaatatcttcgatgtggagcgcggaatgtatttggtagtggttcccgagctggagcaaatgtaccgggatgtgggcttggaggtaaagtttggggctgaggcctacgaaataaaggtgagcgagaactatgttctactggaggatctcaggcctcgaggattcaagaatgtagaccgcctgcagggcttggaccaagctcacaccgaaagtgtcctgagaaagttcgcccaatggcatgcggcttctgcagttcgcgtggacctcaagggcccttacgaagaaaagtataccaatggttttttcaaatcgaaagaaatcatgaactttttctgcgatcgcagcgctaaaattttgctaaataatatcgatcagtacgatggacatgcagcttacataaaggatttggtaagttaacttgtgtttgtatatataggtgcatttctaatccaaacatttctctgactacagcaaagtgtttcagaaaagttattcgatatatataatgatattaaggaaccaaaatccgacgagttcaatgccctcaaccatggcgatggttggtctaacaacattatgttccagtacaacgacaaaaacgagatatcaaatacctactttgtggatcttcaactgccgaagtggggatcagttgcgcaggatttgtattatttcttgctttcatcgaccagcctggacattaaaacggagaaattcgactatttcgtctggttctaccactcagagttggtgaaacacctcaaacttctgaactactctaagaaactgccaactttaagaagcattcgcaatgctcttaacaagtacagtggatggggtaagttagttataatagttaagaccattataatatcttcttatacgtattatcttattgtagccttcatttgctctatatccgtcatgggagtcgttctgctggaccccacagatgatgctgatttcgataagatcatttcgaacgagcattcaaactttacgaattccatctacaccaatcccagataccgcaggcatatgaaagttgtcttaccttggctgcagcatcgtggtgccttggagtaaaatatcaaatgatctcttaaaattagtctatttgcagatatcatttttacttagaaataaattaaacgatacaaaatattgatgttgaatatcggattgtaattataaggtgatatgagaaaagggccaccctaattttcagaatggaaaggcgaaagattttttcctgtccatacgtttgttttccaaatagaataatagaaaattgtatgctggaaatgcgcctgttatcttcccaaatacatcatctaaacactttagagttactttggattaagatatattatattgagccaatatcgcagaaactgcgatgtcactatgataatctactctgtggggtgagggattgttttaaaatttccggacgcacctttcgagcacagtcacttctcacaaactaaattaatataaaacagttgactgattgttaggtaagaggtaatgcttatcgctcacatgtagatttatttctccctagagtatttaagacattcgctgagtgctctaagcttgcagtaagtgcgctgaactgaaacagcttattacaagatgcatccccagacaaaggatgaggatgttagccaaaaacaggtcaccattccggattgggttaagccaacagtctttgaggagctgcttaaaaggattgtcaaggattacaaagcaacgaaatccatgagggcaaatgcaggagtcgctgctggcgaaaactatgccaccgtaatgcttagaattgaactggatgttgagaaagaaggttcgttaaattcattctataggactaatgaattagggtatcagcgtatttgaactgaaattatctttcaattattgtaaaccttgcagataacactcaaacaaccaaggcatttatgcttaaaactccccatcagtcagagcagtatcgtaaagtaatcgagaagacagatatcttcgatgtggagcgaggaatgtatgtggaagtagtgcccgagctggagcaactgtatcgcgatgt

SEQ ID NO: 22205 - DNA, 1223 bp, DROSOPHILA
tctagtagaacaactaattaaaaatgccaccccagacaaacgatgaaaatgtttgcgagcgagaggttccaattccgggctgggtgaaaccagaagtctttgaggacctgctcaaggataatgtcaaggattataagaagaccaaggccctaagggccaaagcaggagtcgctgctggcgaaaactatgccaccataatgctgagactggaactagatgtggaaacgaaggacaaatcggaagtaaccaaagcattcatgctaaaaactccccacgacactgacgcatatcgcaagcttcttcaagaaacgaatatcttcgatgtggagcgcggaatgtatttggtagtggttcccgagctggagcaaatgtaccgggatgtgggcttggaggtaaagtttggggctgaggcctacgaaataaaggtgagcgagaactatgttctactggaggatctcaggcctcgaggattcaagaatgtagaccgcctgcagggcttggaccaagctcacaccgaaagtgtcctgagaaagttcgcccaatggcatgcggcttctgcagttcgcgtggacctcaagggcccttacgaagaaaagtataccaatggttttttcaaatcgaaagaaatcatgaactttttctgcgatcgcagcgctaaaattttgctaaataatatcgatcagtacgatggacatgcagcttacataaaggatttggaaccaaaatccgacgagttcaatgccctcaaccatggcgatggttggtctaacaacattatgttccagtacaacgacaaaaacgagatatcaaatacctactttgtggatcttcaactgccgaagtggggatcagttgcgcaggatttgtattatttcttgctttcatcgaccagcctggacattaaaacggagaaattcgactatttcgtctggttctaccactcagagttggtgaaacacctcaaacttctgaactactctaagaaactgccaactttaagaagcattcgcaatgctcttaacaagtacagtggatgggccttcatttgctctatatccgtcatgggagtcgttctgctggaccccacagatgatgctgatttcgataagatcatttcgaacgagcattcaaactttacgaattccatctacaccaatcccagataccgcaggcatatgaaagttgtcttaccttggctgcagcatcgtggtgccttggagtaa

SEQ ID NO: 22206 - protein, 399 aa, DROSOPHILA
MPPQTNDENVCEREVPIPGWVKPEVFEDLLKDNVKDYKKTKALRAKAGVAAGENYATIMLRLELDVETKDKSEVTKAFMLKTPHDTDAYRKLLQETNIFDVERGMYLVVVPELEQMYRDVGLEVKFGAEAYEIKVSENYVLLEDLRPRGFKNVDRLQGLDQAHTESVLRKFAQWHAASAVRVDLKGPYEEKYTNGFFKSKEIMNFFCDRSAKILLNNIDQYDGHAAYIKDLEPKSDEFNALNHGDGWSNNIMFQYNDKNEISNTYFVDLQLPKWGSVAQDLYYFLLSSTSLDIKTEKFDYFVWFYHSELVKHLKLLNYSKKLPTLRSIRNALNKYSGWAFICSISVMGVVLLDPTDDADFDKIISNEHSNFTNSIYTNPRYRRHMKVVLPWLQHRGALE

SEQ ID NO: 22207 - DNA, 2795 bp, DROSOPHILA
aagttaagtgcggtgactttaaagattatcctttcggtatttaccacgtttaatggcaaagcctgcaattactctcggtaattcttgggtagtttcacccttctagagcaaaatgtattcaaaacgaaatcgaaaagttgattgtctgtgggttattatgaaattaaaatgccataattcgattatttcgcgagcgaacggtcctttatgctccttgcttgttttccaaagtgaattgtccgtggccacgtggcgtatgtgcaatttcccaggcacttgaatgtagtaaaataatgtttgatctgtccacattttctggcatttttctcacactcatttggagtcgtttaaaggcttttccccttgaacaagtctattgagctaagaacttgagttctctcaacagcatctttgtcaggcgtcgtctgttgccataaagcataattgaaatttgagattgacattgaataccagtggcattgttgctattgtcgccttttgtcccggcctttcatcggctacaattccagtccacagcaaatgcgacacattgctcgattattattgtaaatagaaggggagcgaaattggcgcctccgtgggatccattatcggtccataaactagatacagtcgaacttcttaaggctaaactttcaactgcaaagcactttgaaatttgaacaagatatttgaaagtattcaaatatgtatgctttttttaacgcaacttgtgtaaaacatatcttacatagcttttatctaaacttttggataacttttctgagaaaacttttcttattatttgacgaaggattagttcgattcaatttttttgggcttatgttcttctgttacctttcaattacttattttgttggtacactcttctgtggcaagtgaatgcaaatcgtgccttcaatgggatcggcatcgagaccactaacaaccctaaagccccaacattgtgccacactcctggccaaactgtcaacacttacctgaggcaaatgcgctcctcctcctcttcgagttccacgtccattgtggcggaggattctgtctattgctatgcttgcttttcttctttattgccgctcaacgaagctgctgctctcgtcaagtgagagttttaactgccaacggcagcggcactacggaatccttgaggttgacagcaggttcctttgccggtgccgtagggtataaagccaactcgaagtgatttaagctgtcgtcaatttgcctaatgctgccatagatggggaggaacgagccaggaggaaatgtccgttgatgactaacgtgtgctccatggtgccgaagaattcacaggcgaatctgcgcccgatttcgattccaatatctcggaggacgcggcatcggctgccactgaggatgtggccgctgctccagttccgttgaccgtaatctgctcatcatccgtggtctgcgcagcgggattacttagacccagcccatcaacttcctcgccattcaccaccgcctcatcgtcatcatccccctctagttttaggtcgtcgatttgcgccaaggcgatggctcccttgtccactgcccggcgcagcaccaccctctcatcgggttctccctcctctcgcggagcagctgacttcccacccatggtgccgccttctggaggcgcctcctctttcgtgtcgcttccccgactgtgttgcagcgaaaaggccgacgagggcgtcgcactcaactggcgcaggtgcacctcgtctgaaaccagcttgtcgtcatccatgttggccaactgtccctcctccgcggtcctggaaggaaaaggaacttaaattatttaaacaattcattctggaaaaatataattgaaatactgttgcaacgtttgttgttgactaatttcaacttttaaatatagtaataataaagacaggcagaaataataggtcggtgtgggacagtacttcatataaaccattttatttaattaaaatcaacttaatgtttccagtgcacatcaattttctaaatatactttcaatttcaaactttcctttgaagttgaggtacagctagatgaatgtaagtatttgcgaacataaagtcaaaaagtaagtctagtccggcaagacgaaacttatatacagtgaacttattattgaaaaaaggtgtatatagaaacaactaaccacgatttctttctttacatattgtcaaaaatgattaaatattattagattataatataattataatgtaatataataattagacttaaaactcagtaagatccgaagaagaacgtatatacttttaatagtggcaaatgactcgttcatttgcagaaagtaaaaaaacattttcttttaagatttttaaatttaaatgtaaaatctgtattcccaaaaaattttatgctaaaattattgattgacgtaatgaaaggctgttatatgcttgattctttaagctgaaaagaatgaataggacattattgggaatttgaattaatttgtgcctctatgggtggtccttcaaattgcttaaaaccaagaatagctaacaatactcaacactcattcgtttttgagtccttaaatcggaaaatttacgttggctttagtgtgaaataggctgtcagtatttaaattcataaaattatattaccgtacattgcggcatttaaacaatttgaactttttgtttaaaagaaacacaattacaattctggttagggctatgagaacttttactcggaattgtattgtgtgtgtagaaatttctaacttaagccacaattg

SEQ ID NO: 22208 - DNA, 6363 bp, DROSOPHILA
gttgcgtatacgacgcattgtcactcggctagcgacgtggatcggaagtcctttatatgggcgagcgctcctcgatatcaatttccctttcgaaaatgcccgtcaaggtgctaagtgcgcgtaattagtcgaaattcaatcaattcaaaagaatcttaaattgagttacgtcgacgaaatggaggctggtaagccaaaatgtgcaaagtgaattttcgtgggcaatcaccgccgaaaattatattggaatcgaaatcgggcgcagattcgcctgtgaattcttcggcaccatggagcacacgttagtcatcaacggacatttcctcctggctcgttcctccccatctatggcagcattaggcaaattgacgacagcttaaatcacttcgagttggctttataccctacggcaccggcaaaggaacctgctgtcaacctcaaggattccgtagtgccgctgccgttggcagttaaaactctcacttgacgagagcagcagcttcgttgagcggcaataaagaagaaaagcaagcatagcaatagacagaatcctccgccacaatggacgtggaactcgaagaggaggaggagcgcatttgcctcagggagggacagttggccaacatggatgacgacaagctggtttcagacgaggtgcacctgcgccagttgagtgcgacgccctcgtcggccttttcgctgcaacacagtcggggaagcgacacgaaagaggaggcgcctccagaaggcggcaccatgggtgggaagtcagctgctccgcgagaggagggagaacccgatgagagggtggtgctgcgccgggcagtggacaagggagccatcgccttggcgcaaatcgacgacctaaaactagagggggatgatgacgatgaggcggtggtgaatggcgaggaagttgatgggctgggtctaagtaatcccgctgcgcagaccacggatgatgagcagattacggtcaacggaactggagcagcggccacatcctcagtggcagccgatgccgcgtcctccgagcaggatgcagccagcacagcaatggccactccggacatgtctaaaataccccgacttcccggcgacggtgcccaaatggaggacaatggctctggcgacctgccgccatcgctgcgtgcctccaccacatcaattttgtccaatttgcgcaagaaacagcagggcggccccctgcgcgggggcgtggccaagcagacgcctctgcgggtgcagtccgtccggattgtggaggccaagcgggcctacggacccaaacgccggacggagagttgcagcatctttggcaacagcaatttcgaacacgatttggaatctggaaactcactagccagcattcctggtcaatcgcagcgccctttaaacaacgagatgtattcggctttcaagagcggcaacgtggtgaaaggaatcctgtgtccttcgctgaccaactccttcaagcagagctctctggaacgatcctacctgacctatacgcaccgacagcgccaaaaatccctaatcattgtgaacgtagttgactttgttctaaaaattgttttggcctttgtctggataatgcggcgaagtgaactgggacccattgaaagcgacgatggaacgagcatggcgacggccatcacttggtcggtgtgctgcgggattgccaacatggccatctgctttttgggctactggcgctgctttgccaacaactatttgcactgggcggcggtctgcacatgggtgctcttcaacatccagggattcgttggacaaggcgtgggattcgcggatcgcgagtacctggtctggtacatcctgttcgtcatcttcgtgccatatgcgatgctgccactgcccctgaagtggtgcgttgtgggcggaaccatcacggccagctgtcacctggccgtaattaccatcatcaaactgcagcacggcgaggccaccataaatcccgagtgcgtgctcttccagatctttgccaacttcattctgtatacggccatcaacgtggccggaatgtacacaaagtatctcacggatcgcggacaacgactggcattcatagaaacgcacaaggccatggagcacaaaaaagagtcggaaaaggagctccagcgcactcaaaaactactggattcaattctgcccaacatcgtgaacaatcaaattcgcagcgaaatgtacaagggcacggaccccacggtggagacgcagttcaacaaattgtacgtttatcccatggacaatgtgagcattttgttcgccgacattaagggttttaccgagttggccagcaaaacttcggcccagcagctggtgaaaatcttaaatgacctgttcgcccgattcgatcgcattgcggaggacaaccactgcctgcgtgtgaagctgctgggcgattgttactattgtgtgtcccagttcgagagcgacaactggaagacgcggccggatcacgcggtgtgcagcgtggaaactggcctgcacatgataaaggccattaaggatgtgcgcctgcacacgcatgtggacctcaacatgcgaatcggcatacacagcggttcggtgatgtgcggtgtcctgggcaacaagaaatggcattttgacgtctggtctaatgatgttatcattgcgaatcacatggaatccggcggaattcccggaagagtccatatttcggaggcgacgctcaagtgcctgaacgacgcttacgaggtggagccgggaaacggcggctgtcgagacaatcacctcaaaatgctgaacgttaagacttacctcatcaagcgcactgagccattgagacccaagcggcgctttggcacgcgcagcagcgcccatttggcgggaagtgtggccactgctgctcccccctgcgccacgcccaccgccctgcccaaatcaatctcggccagcggaagcggaagcatcggcggggtcaccgcgacaggcaacgatggcgccagcatcgacggacggagtctggagtacgcggccaccattgctgtgcccgcccagcagcccacgcaacttcttcagcagcaacagaagaagaacatatccctgaactccctgcccaatgtggtcgagggcgtggccatggacagccgcaggattaggaacggctgtggcgtaatgggaggagcaggtggcaccggaggtgggggaacgggcccatgcggcatgtccaccgtgtcctctcccaccgccatgatgtcggctcctctggaagtccagctgcgacccaggaacggagcctgcagcattcaaaacctggcggaggccatcgacggcaagggtctgatcattgaggatgagtccaccaccgactggatacccgagattccgttcaagaaccttaacagtcccgaagatggattaaatcgtgccgactccatactggttgatacgaaggaggatcatagagtctcggtggcggttttggatgaggagatcgacgagttcatcgagcagaacattcaaatcaattcgaataaggaaatccgacgcgagtaccttaatccctggaccctcaagttcaaggacaagagccaggagcagaagttctgtcagttgcgggaggatatgttccgatccaatatgctgtgtgtgtttgtcatctggatatttatggtgctgtgccaggtcatcatcattccacgctgcacgcgtctcattatttgtctctccgtgggcacggtaattctaactttttgttgcgtcctggtcatggccgaggagtttccaggtttaccccgctgcctgaagacgaactctgcgaaattggtacaccaacggcagcgtcgcactctattcatttgcggcgtcatcgtgtccatgtgcatgctgagtgccataggactggtcctgtgcccttcttccacctacataggcaccgccgacgagcactcacgattcctgcgaatggtttcgccatacagcaacatctccatgacggagaaggagttcaagctgaatgtctatctgtctgccaccatccatcacaatatcacaattagcactccggccagtggagggcccactcccctggtggatattacaagtagtggtccctccgacgagttcgtgaggagcacgctcaacgccctcactttgaatttgactcctccactaccgcagtcccatcggccctatacactgaccacaaatggacacagtgtttctctcagtaacctcagctattcagatgcttcggtgatgcaaagttcctcggatgttgaggggcagtgcgcccatccggagtacttggtgttcacctgggtgctctgcctggtgtccttggccaccgcattgaagctgtactacctggtcaaggccctgatggccttggccatggtggcattctacaccacgctgatcatgatgaagttcgggtccggcgatagcttcagtttggtggagctctccagactgggcatgccgcttggagtccaaatgctgatactgctaatatccttcctggtgatggtctgctaccatgctagattggtggaggtaacctcgcgtctggacttcatatggaaggaacaagccgagcgtgaactgaccaacatgaaatccaatcgcgcgcttaatgacacattaattaagaacattctgccggaccatgtagccacctattacctatccgacgagcacacggacgagctctactccaagatgcacaatctctgcggcgtgatgttcgcctccattccgaacttccaggacttttactccgaggacatcgacaatggcaaggcctgtatacgtattctcaatgagattatctgtgactttgatgaattgctggaggagccacgattcgcatcggtggagaaaatcaaaacagtgggtgccacgtatatggcggcagcgggattaaatcacgagcatctcagacttcgcggcgagacctccgaggatagtgtctgcgacctggtggagttcgcatttgccatgaagcaaaagctggaggagatcaatggggatgccttcaataacttccagctgcgtgtgggcatctgcagtggtcctttggtaagtggagtgattggagccaggaaaccggtctacgatatctggggcaatacggtcaatgtggcatcacgaatggactccacgggcgagaactggcgagttcaggttccggagaatacggcggaattgctttgctccaggggttacacgtgtgtgaaacgtggtgaaatcgctgtgaagggcaagggcatgatgaccaccttttatgtgcatcccaagggaatatcggagagccagctgatctcaccggttcgcatgccagccgggattcccctggcccaaaccccgaatcttcagcggcagacctcccatcatggatccttcagtgccgtggttttcggaatgcttcaggctagcaaacgcagcacagccattgccggaacacccacgggcactccttcgccgcaaatccgtcgaggacatcggggaagcacgttcagctcggtccggttatcccaaaagtccaccacggtcaatcctgtgcgccggaatacaacccgtgttcggggacgttcatatcgacagaaaaagagttcctccaacaactcgatcgtcacgcaggccagctctagctatatgccctcgttccgacggatcgaccagatcgagacgacgatatcgaagagccacaacgatgcgttatagccgagtacgcgcactcactgggtctaagtcgatctcaaggcgatagagtgtctgatgaatttatttttggaacgattttatacaaatggagttacgccggcatatgtttcaaagtttggcttaacactgaaatgaaatggtggagaacgacactgaagctacttagtagaatttttaaatcaccatacttgaagttgcaagaattacatttatctcagcacaattctagtcgttaaacttaagaactgtcgtttatatgtgtgcgtttcaaatctgtttagagtaagatatttggatcttcccacaaaagccaaccatacgaaatgccaatgaacctactagcttcgttcaattcaaccataatgtgtaccaactagttttctagtactaatagtcaatttaacagccagtaatcaattagaaaaccaaatattagttgtacaaaccgtttcttttgatcaaagagcggaaatgtaaataaagtaagcatacttatgtataaaatattttacgaccatctaaatgtaatgaggtcaagtgttactgaaatgtgaaatggattttggcaaataaaaggtgtattactatacagccagcacttatttagcactttaattgtaattatacaattcgttataaataaatgtgataagc

SEQ ID NO: 22209 - protein, 1715 aa, DROSOPHILA
MDVELEEEEERICLREGQLANMDDDKLVSDEVHLRQLSATPSSAFSLQHSRGSDTKEEAPPEGGTMGGKSAAPREEGEPDERVVLRRAVDKGAIALAQIDDLKLEGDDDDEAVVNGEEVDGLGLSNPAAQTTDDEQITVNGTGAAATSSVAADAASSEQDAASTAMATPDMSKIPRLPGDGAQMEDNGSGDLPPSLRASTTSILSNLRKKQQGGPLRGGVAKQTPLRVQSVRIVEAKRAYGPKRRTESCSIFGNSNFEHDLESGNSLASIPGQSQRPLNNEMYSAFKSGNVVKGILCPSLTNSFKQSSLERSYLTYTHRQRQKSLIIVNVVDFVLKIVLAFVWIMRRSELGPIESDDGTSMATAITWSVCCGIANMAICFLGYWRCFANNYLHWAAVCTWVLFNIQGFVGQGVGFADREYLVWYILFVIFVPYAMLPLPLKWCVVGGTITASCHLAVITIIKLQHGEATINPECVLFQIFANFILYTAINVAGMYTKYLTDRGQRLAFIETHKAMEHKKESEKELQRTQKLLDSILPNIVNNQIRSEMYKGTDPTVETQFNKLYVYPMDNVSILFADIKGFTELASKTSAQQLVKILNDLFARFDRIAEDNHCLRVKLLGDCYYCVSQFESDNWKTRPDHAVCSVETGLHMIKAIKDVRLHTHVDLNMRIGIHSGSVMCGVLGNKKWHFDVWSNDVIIANHMESGGIPGRVHISEATLKCLNDAYEVEPGNGGCRDNHLKMLNVKTYLIKRTEPLRPKRRFGTRSSAHLAGSVATAAPPCATPTALPKSISASGSGSIGGVTATGNDGASIDGRSLEYAATIAVPAQQPTQLLQQQQKKNISLNSLPNVVEGVAMDSRRIRNGCGVMGGAGGTGGGGTGPCGMSTVSSPTAMMSAPLEVQLRPRNGACSIQNLAEAIDGKGLIIEDESTTDWIPEIPFKNLNSPEDGLNRADSILVDTKEDHRVSVAVLDEEIDEFIEQNIQINSNKEIRREYLNPWTLKFKDKSQEQKFCQLREDMFRSNMLCVFVIWIFMVLCQVIIIPRCTRLIICLSVGTVILTFCCVLVMAEEFPGLPRCLKTNSAKLVHQRQRRTLFICGVIVSMCMLSAIGLVLCPSSTYIGTADEHSRFLRMVSPYSNISMTEKEFKLNVYLSATIHHNITISTPASGGPTPLVDITSSGPSDEFVRSTLNALTLNLTPPLPQSHRPYTLTTNGHSVSLSNLSYSDASVMQSSSDVEGQCAHPEYLVFTWVLCLVSLATALKLYYLVKALMALAMVAFYTTLIMMKFGSGDSFSLVELSRLGMPLGVQMLILLISFLVMVCYHARLVEVTSRLDFIWKEQAERELTNMKSNRALNDTLIKNILPDHVATYYLSDEHTDELYSKMHNLCGVMFASIPNFQDFYSEDIDNGKACIRILNEIICDFDELLEEPRFASVEKIKTVGATYMAAAGLNHEHLRLRGETSEDSVCDLVEFAFAMKQKLEEINGDAFNNFQLRVGICSGPLVSGVIGARKPVYDIWGNTVNVASRMDSTGENWRVQVPENTAELLCSRGYTCVKRGEIAVKGKGMMTTFYVHPKGISESQLISPVRMPAGIPLAQTPNLQRQTSHHGSFSAVVFGMLQASKRSTAIAGTPTGTPSPQIRRGHRGSTFSSVRLSQKSTTVNPVRRNTTRVRGRSYRQKKSSSNNSIVTQASSSYMPSFRRIDQIETTISKSHNDAL

SEQ ID NO: 22210 - DNA, 4791 bp, DROSOPHILA
gatgaagtccgccagccaggaactggatcccgatacgggcaagggtctggacaagtttcgcacggcacaggcccacgtgcgggtggccaagcataatttcgatggttactcaatggattccattcagaaggtgaacgcgacgctgaaggacctgttcaatccaatattatacaatataattattattaatcctttccagattgatttactagcagctgcccgatgcaacatgtactcccatgctctggtggcctacgttaccgagttgaagaactttgcccagaaggccgcctccacattccagaccatatctaaggccttgattataaagcccaagtacgacttctgtgtgctaaaggaactgtctcaaaatgaaggatccacagaggaagtgccgccaatcgaagccgtggataaggaccagtcgttattctttgctgtaacttcatatcccagagctctaattcaagaacttattctaaaaatgcatttccttacagaacgagtaccaggacaagctggaaacccagccggaaatcaaggagtccgaagaggacaaaccaagtgcacctcccaatgcctgcggcgacaatgaatccttgcttattgagctttccaagcagctggaggacagtcctctaatagatgcgccgctggatgaagatatacctgcccaaaatagcactaacaagctatggtcccgcttgtttagccagcagaatcagcaacccataccgagccaagtagccacggactcgaaggcaagtgcaggtggcgccaccccggttcccagcaaatcgcagaccaccaacaatccctggctggatcttttcgccgacttggatcccttagccaatccgcaagccttcgatttaaaactgagcggcggacgcagtgtggccgagcagacctgagcagattaccctcccgcacagattatatttgttgatctgcatataccgttggaaactagctagtcaaaatggagaatctttggatgtaacttttcgctaaacgttcaaaaactttttatgttttatttaaataaaatttatatgggacacagcagctagaagtggatgaggcggacgagaggcaggtaaagtggagcaggagccgcactcatttgaccgccgcctgtgcctccttcttggagttaaccagctcgaccagctctttgacgcgacgtaagcagtcctttttactgcgattcggtatgcaggcggcgatgcaatcccagcgatcgggtgtcgtcgttggataggttttaatggcctgttcgagcagggcttgctcctccttggtccaggttttggaggcagcaccgccgcccgtagacccatttgtggccggaactggggctggtgcagccgtggggtttgctggagctggagccgtgccattctgcttggttgactgattgttcgccttatgatctacaccgttttgtttcaagttctccttgctcgcctgggccgtctcctcgcccagggttatatccttacacgtctgaacatctttcttggacttctcgaaactggcaaatgccgcatcgttggcttgagtcttcagggagctcttcgagtgatctgtgttctggagcgccttggctttgttgagcacatccctggcattgaccagaacagtgttatccgggctatgctggttaatgaaagtggctatgacatcccaacgctgtgcagtgccagcgggaaacagattaaccgccttgataagcaactgcacgttctcattgctccagagctcattcttcttgacctccttaacgccttttggcgtggccgctgagctggcaagcttcttggcctgtgtctggttaatctcctccaactcggcagctatcttctgctcggccgtttgaagggcagcaacaaacgactcacggcccttgctttccattgccttatttagagcttgcagctctgccagattgaaggtctcgcaaatcttctcggtgccctccatgtgcttcagctgatccttgtcgttcttggcataatacttgcagtccttgaccttgtcgcgcagcgttttgcgctccttcttaagcagctttttctgctgctcgcgttcgatgcggatctgctcgatgcgtttctgctcggccttttcagccttctccttggccaaagccgcttcacggatggcacgatcagcttctgccttctgggcctgggcggcgtccatcttggctcgcttggcagcagccttgcgatccttttcctcctgcttgaagcgctgaatgcgcttatcattgttgtaggctaaatcgacgagcgaccggatacgagacatttcctccttcttgcgcttgattcgagccgccctgttctccttttcgatccagcgacgttcgtcgcggtcctggcccttctccttgtcctcttcgtccaagtagctgaattcccgccatgacttaaaatcgtaccagaagttgtagaagcgctccacctcttcgcgtttggcgtccacctgcccgaaggagggaacatgcggcttttcgctccagcgcccgttaagtgtgaaaaatttgttaaatacgccaaagtagtcgttatcgatgtcgttctgtgagggcagcgagtcgtcaaactcgggatccactgagtcaaagctgcggcgcggcttggatgtgcctggaatacaagatggagtattagatggtttaagaggaaatagtttaaaatcttcctgtctatttcgtacaattgtttacaattattcaaagtgtttaaagccaaaaaaattctgttgtataatagtaagttataatttggcattttgtttaaaagaatgtgagagcaaacaactagtcctatttttagatatgcaaaaataaagcttcaagttctgcgcgcttagacaaaggcaacagcacaccaatgaattagatcgagtataaattagtttcagataatttaaaatcttaattgattattatactcaacaggattgtatggtatcataattttatatagcttaagcaaatgctctgaaaattaatatcaaaatattcttatctgtcgatttgcatgggcaatgcgaagtccgaaggacacccaaggatcagcaaggacattttcttgacacccacccagtatctcgtaagctttggttatgcatgtgaagtaatcatcgtcctggatgacttcctcgcccttggctttccgcttatcgggatggtgcagcagaaccatgcgcctgtaagcccgtcgaacatcatcctcgctggcctcgtatctaaagggtgatttagtcagacaatacagtattagttggggaagtcccattaaatattgatagaaacgaacacatgggaagaacaccacgtgctgccgtcgcactaaccggagcttgcccaagccaagaacggcgtaatgatcctggtccttccactccttaggatccagcgactttaggtagctgatgtccacctcctcgcccacgccctccaatttctcatcgctttcgctgcgctccacgccgccgggagctagaaattggcgccgttgcgcaaagtaagcgaagccaacgcgctcgattttacggcgaacgaccttgagcggcagctgcacctccaccgccgttgctaccgtaccgctcgtcatctctggtcaggtccgctggttaatgggcattcaccgccactcctgtggattcacgttactcaaaatttggcgatccgctgccttcaaaacgtcgaaatccaattaataatcacacttttccgcagcaccgcatgtgtttcgactagtggtggtgaaacatcgatgccatcatcgattatggcgctggtaaaatcgattggcttcctactctatatttgatcgataacagcaagcatgtatcgctggcacttattggcagtgctgccagctgctatagctaaaatcgaatggcaactgttgtattggtttggcgccaaagtgtgaccgtatctcaactaatggttatttatgatttatatatttagttaaccgtcttaacaaattattaatccacgttcattacataacaaatcctacactattaaatacattccacattcgagtttttgttataatgggccactaaaaaaagaaagtgtcatacaatagttaagaaaacgactgtttataattcatttgaatgataacttgacgtatattccaaaaaccattaagttctaccatttgttagttttgcttatcacatttatttataacgaattgtataattacaattaaagtgctaaataagtgctggctgtatagtaatacaccttttatttgccaaaatccatttcacatttcagtaacacttgacctcattacatttagatggtcgtaaaatattttatacataagtatgcttactttatttacatttccgctctttgatcaaaagaaacggtttgtacaactaatatttggttttctaattgattactggctgttaaattgactattagtactagaaaactagttggtacacattatggttgaattgaacgaagctagtaggttcattggcatttcgtatggttggcttttgtgggaagatccaaatatcttactctaaacagatttgaaacgcacacatataaacgacagttcttaagtttaacgactagaattgtgctgagataaatgtaattcttgcaacttcaagtatggtgatttaaaaattctactaagtagcttcagtgtcgttctccaccatttcatttcagtgttaagccaaactttgaaacatatgccggcgtaactccatttgtataaaatcgttcca

SEQ ID NO: 22211 - DNA, 2225 bp, DROSOPHILA
cgatgtttcaccaccactagtcgaaacacatgcggtgctgcggaaaagtgtgattattaattggatttcgacgttttgaaggcagcggatcgccaaattttgagtaacgtgaatccacaggagtggcggtgaatgcccattaaccagcggacctgaccagagatgacgagcggtacggtagcaacggcggtggaggtgcagctgccgctcaaggtcgttcgccgtaaaatcgagcgcgttggcttcgcttactttgcgcaacggcgccaatttctagctcccggcggcgtggagcgcagcgaaagcgatgagaaattggagggcgtgggcgaggaggtggacatcagctacctaaagtcgctggatcctaaggagtggaaggaccaggatcattacgccgttcttggcttgggcaagctccgatacgaggccagcgaggatgatgttcgacgggcttacaggcgcatggttctgctgcaccatcccgataagcggaaagccaagggcgaggaagtcatccaggacgatgattacttcacatgcataaccaaagcttacgagatactgggcacatccaagccgcgccgcagctttgactcagtggatcccgagtttgacgactcgctgccctcacagaacgacatcgataacgactactttggcgtatttaacaaatttttcacacttaacgggcgctggagcgaaaagccgcatgttccctccttcgggcaggtggacgccaaacgcgaagaggtggagcgcttctacaacttctggtacgattttaagtcatggcgggaattcagctacttggacgaagaggacaaggagaagggccaggaccgcgacgaacgtcgctggatcgaaaaggagaacagggcggctcgaatcaagcgcaagaaggaggaaatgtctcgtatccggtcgctcgtcgatttagcctacaacaatgataagcgcattcagcgcttcaagcaggaggaaaaggatcgcaaggctgctgccaagcgagccaagatggacgccgcccaggcccagaaggcagaagctgatcgtgccatccgtgaagcggctttggccaaggagaaggctgaaaaggccgagcagaaacgcatcgagcagatccgcatcgaacgcgagcagcagaaaaagctgcttaagaaggagcgcaaaacgctgcgcgacaaggtcaaggactgcaagtattatgccaagaacgacaaggatcagctgaagcacatggagggcaccgagaagatttgcgagaccttcaatctggcagagctgcaagctctaaataaggcaatggaaagcaagggccgtgagtcgtttgttgctgcccttcaaacggccgagcagaagatagctgccgagttggaggagattaaccagacacaggccaagaagcttgccagctcagcggccacgccaaaaggcgttaaggaggtcaagaagaatgagctctggagcaatgagaacgtgcagttgcttatcaaggcggttaatctgtttcccgctggcactgcacagcgttgggatgtcatagccactttcattaaccagcatagcccggataacactgttctggtcaatgccagggatgtgctcaacaaagccaaggcgctccagaacacagatcactcgaagagctccctgaagactcaagccaacgatgcggcatttgccagtttcgagaagtccaagaaagatgttcagacgtgtaaggatataaccctgggcgaggagacggcccaggcgagcaaggagaacttgaaacaaaacggtgtagatcataaggcgaacaatcagtcaaccaagcagaatggcacggctccagctccagcaaaccccacggctgcaccagccccagttccggccacaaatgggtctacgggcggcggtgctgcctccaaaacctggaccaaggaggagcaagccctgctcgaacaggccattaaaacctatccaacgacgacacccgatcgctgggattgcatcgccgcctgcataccgaatcgcagtaaaaaggactgcttacgtcgcgtcaaagagctggtcgagctggttaactccaagaaggaggcacaggcggcggtcaaatgagtgcggctcctgctccactttacctgcctctcgtccgcctcatccacttctagctgctgtgtcccatataaattttatttaaataaaacataaaaagtttttgaacgtttagcgaaaagtta

SEQ ID NO: 22212 - protein, 646 aa, DROSOPHILA
MTSGTVATAVEVQLPLKVVRRKIERVGFAYFAQRRQFLAPGGVERSESDEKLEGVGEEVDISYLKSLDPKEWKDQDHYAVLGLGKLRYEASEDDVRRAYRRMVLLHHPDKRKAKGEEVIQDDDYFTCITKAYEILGTSKPRRSFDSVDPEFDDSLPSQNDIDNDYFGVFNKFFTLNGRWSEKPHVPSFGQVDAKREEVERFYNFWYDFKSWREFSYLDEEDKEKGQDRDERRWIEKENRAARIKRKKEEMSRIRSLVDLAYNNDKRIQRFKQEEKDRKAAAKRAKMDAAQAQKAEADRAIREAALAKEKAEKAEQKRIEQIRIEREQQKKLLKKERKTLRDKVKDCKYYAKNDKDQLKHMEGTEKICETFNLAELQALNKAMESKGRESFVAALQTAEQKIAAELEEINQTQAKKLASSAATPKGVKEVKKNELWSNENVQLLIKAVNLFPAGTAQRWDVIATFINQHSPDNTVLVNARDVLNKAKALQNTDHSKSSLKTQANDAAFASFEKSKKDVQTCKDITLGEETAQASKENLKQNGVDHKANNQSTKQNGTAPAPANPTAAPAPVPATNGSTGGGAASKTWTKEEQALLEQAIKTYPTTTPDRWDCIAACIPNRSKKDCLRRVKELVELVNSKKEAQAAVK

SEQ ID NO: 22213 - DNA, 5071 bp, DROSOPHILA
caagcacgtcctactactttttcgagtgtattttttatgatccaaaataatagaagccgccaagtatcgggccgttggtgtggttatttcagtgtgtcttaaagtgcattatctttcttttcgacttaatcaatttagacagatcacacatacagctacacacttaggctcaaaacatgcacacacccacatgcaggtggcaaaaactccacctcacaacccgtttttctcattgccaagaaaactactgagctttgcacagacttcttcactttcttcttgtgcgtgcaagtgtgtgtgcagcctcagaaagtaactgtatctcataaatacacatttacaactcttttcatacatacctgtccagcgaattagcaatgccgcatacaaaagaatacacatgtgtcgctttcaattttgcaattgcaatattgcagtctctaaaatggaaaactcaaaactcgagcttaagccaccggctaacacacacatatgcatttacataggatccaaacaaacacacacagcgttaatcagaggtaaacaaacgaggaaaactcgcgacgcgaacgaaaagcacttgcgtaaatataaatattgaatggttcgattggggaaaagtgaggggcaataaccaaatacgcgactcgtgttctggcacggaatgagaaactatggagtctcgtctcgtccgctgcgaggtccaaagacgatctgaatcgcgaacgagatactatatctgaacttcacttttcccacatagcatttcctctgtcaggtttgttggacgccaacagttcgcttcgaacttgttgtgcccgcattattttaagttgcagcgttgcaccagaactatgttatgttcgttaacatagtgttactgtactctgtagcgtgcccctttgtatatcgcaaatatactgaactttaatggcttagcgccaagctacatgtgtacccttttatacaacgaaactgaattcaaatggaaaaaaaacatacacttcgctctaatgtaattttagttatttattccttacaaatgagcacgtatttaagggatttcataaattatggaaaatatttggatcaaatgttatttggcaatttctactaaataccatgacttaacttagatcccttaaataccacccgaataaaggactttagtgtgaccctatacaaacggggcgcttgacagtgctgcaaagtgacgattgcaatcgaaaggcgataagcattggaaaataacgatacagcgccaccccaccacccaaccaccctcctaaacaaccactcagtggtgaaaaatcacccgtagctgaaaactggaacggaaaacggcgaaaatatgctcaagtcggaggttcagcaccagttctggattaccaaaaaggtggtgcagcgcaagctcggaacgaaggaggacaagcacataatatcctcggacgcggagctggattccaagatcgaggtgttcaaatcgatatcggacaccagcttgaacctgtgcaaaatcattgaccaataccaggagcgcctatgcatcctgtcgcaggaggagtgtgtgttcggcaggttcctcaaggaggcgggaaagcggagcagaaccacgggcggtagtatcgcccacacggccaaggccgtatccttcgctggacaacagaggatgtgcgtgcgggtgccgctcctgcggctccagcacgaagtcgatgtgttccgctgccgggcgataaaggacacggagcagaccctccagacgatggagaaggagcgcacggaataccgcgccgctctctcctggatgaagtccgccagccaggaactggatcccgatacgggcaagggtctggacaagtttcgcacggcacaggcccacgtgcgggtggccaagcataatttcgatggttactcaatggattccattcagaaggtgaacgcgacgctgaaggacctgttcaatccaatattatacaatataattattattaatcctttccagattgatttactagcagctgcccgatgcaacatgtactcccatgctctggtggcctacgttaccgagttgaagaactttgcccagaaggccgcctccacattccagaccatatctaaggccttgattataaagcccaagtacgacttctgtgtgctaaaggaactgtctcaaaatgaaggatccacagaggaagtgccgccaatcgaagccgtggataaggaccagtcgttattctttgctgtaacttcatatcccagagctctaattcaagaacttattctaaaaatgcatttccttacagaacgagtaccaggacaagctggaaacccagccggaaatcaaggagtccgaagaggacaaaccaagtgcacctcccaatgcctgcggcgacaatgaatccttgcttattgagctttccaagcagctggaggacagtcctctaatagatgcgccgctggatgaagatatacctgcccaaaatagcactaacaagctatggtcccgcttgtttagccagcagaatcagcaacccataccgagccaagtagccacggactcgaaggcaagtgcaggtggcgccaccccggttcccagcaaatcgcagaccaccaacaatccctggctggatcttttcgccgacttggatcccttagccaatccgcaagccttcgatttaaaactgagcggcggacgcagtgtggccgagcagacctgagcagattaccctcccgcacagattatatttgttgatctgcatataccgttggaaactagctagtcaaaatggagaatctttggatgtaacttttcgctaaacgttcaaaaactttttatgttttatttaaataaaatttatatgggacacagcagctagaagtggatgaggcggacgagaggcaggtaaagtggagcaggagccgcactcatttgaccgccgcctgtgcctccttcttggagttaaccagctcgaccagctctttgacgcgacgtaagcagtcctttttactgcgattcggtatgcaggcggcgatgcaatcccagcgatcgggtgtcgtcgttggataggttttaatggcctgttcgagcagggcttgctcctccttggtccaggttttggaggcagcaccgccgcccgtagacccatttgtggccggaactggggctggtgcagccgtggggtttgctggagctggagccgtgccattctgcttggttgactgattgttcgccttatgatctacaccgttttgtttcaagttctccttgctcgcctgggccgtctcctcgcccagggttatatccttacacgtctgaacatctttcttggacttctcgaaactggcaaatgccgcatcgttggcttgagtcttcagggagctcttcgagtgatctgtgttctggagcgccttggctttgttgagcacatccctggcattgaccagaacagtgttatccgggctatgctggttaatgaaagtggctatgacatcccaacgctgtgcagtgccagcgggaaacagattaaccgccttgataagcaactgcacgttctcattgctccagagctcattcttcttgacctccttaacgccttttggcgtggccgctgagctggcaagcttcttggcctgtgtctggttaatctcctccaactcggcagctatcttctgctcggccgtttgaagggcagcaacaaacgactcacggcccttgctttccattgccttatttagagcttgcagctctgccagattgaaggtctcgcaaatcttctcggtgccctccatgtgcttcagctgatccttgtcgttcttggcataatacttgcagtccttgaccttgtcgcgcagcgttttgcgctccttcttaagcagctttttctgctgctcgcgttcgatgcggatctgctcgatgcgtttctgctcggccttttcagccttctccttggccaaagccgcttcacggatggcacgatcagcttctgccttctgggcctgggcggcgtccatcttggctcgcttggcagcagccttgcgatccttttcctcctgcttgaagcgctgaatgcgcttatcattgttgtaggctaaatcgacgagcgaccggatacgagacatttcctccttcttgcgcttgattcgagccgccctgttctccttttcgatccagcgacgttcgtcgcggtcctggcccttctccttgtcctcttcgtccaagtagctgaattcccgccatgacttaaaatcgtaccagaagttgtagaagcgctccacctcttcgcgtttggcgtccacctgcccgaaggagggaacatgcggcttttcgctccagcgcccgttaagtgtgaaaaatttgttaaatacgccaaagtagtcgttatcgatgtcgttctgtgagggcagcgagtcgtcaaactcgggatccactgagtcaaagctgcggcgcggcttggatgtgcctggaatacaagatggagtattagatggtttaagaggaaatagtttaaaatcttcctgtctatttcgtacaattgtttacaattattcaaagtgtttaaagccaaaaaaattctgttgtataatagtaagttataatttggcattttgtttaaaagaatgtgagagcaaacaactagtcctatttttagatatgcaaaaataaagcttcaagttctgcgcgcttagacaaaggcaacagcacaccaatgaattagatcgagtataaattagtttcagataatttaaaatcttaattgattattatactcaacaggattgtatggtatcataattttatatagcttaagcaaatgctctgaaaattaatatcaaaatattcttatctgtcgatttgcatgggcaatgcgaagtccgaaggacacccaaggatcagcaaggacattttcttgacacccacccagtatctcgtaagctttggttatgcatgtgaagtaatcatcgtcctggatgacttcctcgcccttggctttccgcttatcgggatggtgcagcagaaccatgcgcctgtaagcccgtcgaacatcatcctcgctggcctcgtatctaaagg

SEQ ID NO: 22214 - DNA, 2941 bp, DROSOPHILA
acacttcgctctaatgtaattttagttatttattccttacaaatgagcacgtatttaagggatttcataaattatggaaaatatttggatcaaatgttatttggcaatttctactaaataccatgacttaacttagatcccttaaataccacccgaataaaggactttagtgtgaccctatacaaacggggcgcttgacagtgctgcaaagtgacgattgcaatcgaaaggcgataagcattggaaaataacgatacagcgccaccccaccacccaaccaccctcctaaacaaccactcagtggtgaaaaatcacccgtagctgaaaactggaacggaaaacggcgaaaatatgctcaagtcggaggttcagcaccagttctggattaccaaaaaggtggtgcagcgcaagctcggaacgaaggaggacaagcacataatatcctcggacgcggagctggattccaagatcgaggtgttcaaatcgatatcggacaccagcttgaacctgtgcaaaatcattgaccaataccaggagcgcctatgcatcctgtcgcaggaggagtgtgtgttcggcaggttcctcaaggaggcgggaaagcggagcagaaccacgggcggtagtatcgcccacacggccaaggccgtatccttcgctggacaacagaggatgtgcgtgcgggtgccgctcctgcggctccagcacgaagtcgatgtgttccgctgccgggcgataaaggacacggagcagaccctccagacgatggagaaggagcgcacggaataccgcgccgctctctcctggatgaagtccgccagccaggaactggatcccgatacgggcaagggtctggacaagtttcgcacggcacaggcccacgtgcgggtggccaagcataatttcgatggttactcaatggattccattcagaagattgatttactagcagctgcccgatgcaacatgtactcccatgctctggtggcctacgttaccgagttgaagaactttgcccagaaggccgcctccacattccagaccatatctaaggccttgattataaagcccaagtacgacttctgtgtgctaaaggaactgtctcaaaatgaaggatccacagaggaagtgccgccaatcgaagccgtggataaggaccagtcgttattctttgctaacgagtaccaggacaagctggaaacccagccggaaatcaaggagtccgaagaggacaaaccaagtgcacctcccaatgcctgcggcgacaatgaatccttgcttattgagctttccaagcagctggaggacagtcctctaatagatgcgccgctggatgaagatatacctgcccaaaatagcactaacaagctatggtcccgcttgtttagccagcagaatcagcaacccataccgagccaagtagccacggactcgaaggcaagtgcaggtggcgccaccccggttcccagcaaatcgcagaccaccaacaatccctggctggatcttttcgccgacttggatcccttagccaatccgcaagccttcgatttaaaactgagcggcggacgcagtgtggccgagcagacctgagcagattaccctcccgcacagattatatttgttgatctgcatataccgttggaaactagctagtcaaaatggagaatctttggatgtaacttttcgctaaacgttcaaaaactttttatgttttatttaaataaaatttatatgggacacagcagctagaagtggatgaggcggacgagaggcaggtaaagtggagcaggagccgcactcatttgaccgccgcctgtgcctccttcttggagttaaccagctcgaccagctctttgacgcgacgtaagcagtcctttttactgcgattcggtatgcaggcggcgatgcaatcccagcgatcgggtgtcgtcgttggataggttttaatggcctgttcgagcagggcttgctcctccttggtccaggttttggaggcagcaccgccgcccgtagacccatttgtggccggaactggggctggtgcagccgtggggtttgctggagctggagccgtgccattctgcttggttgactgattgttcgccttatgatctacaccgttttgtttcaagttctccttgctcgcctgggccgtctcctcgcccagggttatatccttacacgtctgaacatctttcttggacttctcgaaactggcaaatgccgcatcgttggcttgagtcttcagggagctcttcgagtgatctgtgttctggagcgccttggctttgttgagcacatccctggcattgaccagaacagtgttatccgggctatgctggttaatgaaagtggctatgacatcccaacgctgtgcagtgccagcgggaaacagattaaccgccttgataagcaactgcacgttctcattgctccagagctcattcttcttgacctccttaacgccttttggcgtggccgctgagctggcaagcttcttggcctgtgtctggttaatctcctccaactcggcagctatcttctgctcggccgtttgaagggcagcaacaaacgactcacggcccttgctttccattgccttatttagagcttgcagctctgccagattgaaggtctcgcaaatcttctcggtgccctccatgtgcttcagctgatccttgtcgttcttggcataatacttgcagtccttgaccttgtcgcgcagcgttttgcgctccttcttaagcagctttttctgctgctcgcgttcgatgcggatctgctcgatgcgtttctgctcggccttttcagccttctccttggccaaagccgcttcacggatggcacgatcagcttctgccttctgggcctgggcggcgtccatcttggctcgcttggcagcagccttgcgatccttttcctcctgcttgaagcgctgaatgcg

SEQ ID NO: 22215 - protein, 411 aa, DROSOPHILA
MLKSEVQHQFWITKKVVQRKLGTKEDKHIISSDAELDSKIEVFKSISDTSLNLCKIIDQYQERLCILSQEECVFGRFLKEAGKRSRTTGGSIAHTAKAVSFAGQQRMCVRVPLLRLQHEVDVFRCRAIKDTEQTLQTMEKERTEYRAALSWMKSASQELDPDTGKGLDKFRTAQAHVRVAKHNFDGYSMDSIQKIDLLAAARCNMYSHALVAYVTELKNFAQKAASTFQTISKALIIKPKYDFCVLKELSQNEGSTEEVPPIEAVDKDQSLFFANEYQDKLETQPEIKESEEDKPSAPPNACGDNESLLIELSKQLEDSPLIDAPLDEDIPAQNSTNKLWSRLFSQQNQQPIPSQVATDSKASAGGATPVPSKSQTTNNPWLDLFADLDPLANPQAFDLKLSGGRSVAEQT

SEQ ID NO: 22216 - DNA, 26636 bp, DROSOPHILA
aagcccaggctcaggcgcaggcgcaggcgcagccgcttactggccgaataccgggacgcgagcgaaaggcttcgcggacggatgagaacggacggtcgacggaggtctaagtcatctattgtacattttagttattgagcaaagcgataattataatatctatatagcatattgaatgaaatatctgtataatccgaatcgaaacgacccgaacgccattttcttcaacacctaacccacacacagcgtacgagtatatagtgaattcttaatgttccttcgttctctgctaatattaatgtaaataaattaaacatttgtctgttttacactatctacacactaaaataagtttctaaaactatttgtatatacatcagcatactataatacacccacaatctatgaaaattattctctaaatatgcatatgtattattgtataactctaatcctctccagacacttgaaacaccaatttacccctgggcaaccttctatgcccatacccgttttgatctacccctccccttacgaattacaaaagcgattggcgaaagtagtttcattagcatatactaaaaactatatcccgataagtgcgcgctatgtatattatatattttgtttaccctacattttctctgtgtaactaaaaagtgaagttcgtgtataccgcgtgtgtgtgtatataccctgaatattaatttaaaagcatttagctataattattcatatttatagagccaaaactacccaaaacctaaaatattaaatacgagtataacaaacacgaagtatatgaaaacaaaacaatatgtatatgaaaaagcaaaagacttaaaaatttcaataaatgaaaagaaataataccaatgatcagttgatcgtttttaattatttgctgggaatttaaatgaaggggacacgaattatttgcagtaattcaatttcaatagtactttgatacgaatttatgaaactcccaataaaatattacgaatttataggtttatttttatatcgtttttattagtgattcaacttattttgtattattgctgactttactaattaaggccttgtacaaaattattgtatttctgttttagtgctaagttctatgttcgtagtacatctctgttctcttgcggttcgcgtctgtatagataggtttgcatttggggcgttgtgagtataaacaattattttgaataatgtacacaaaagtaaggataacatagtggttgtgtggatttttacataaatcggattgcttaaacagaagccgcttggcggtgtctctctggtagaaagcgaaatacgaactggcatatgaaataataagtattaaaattaatctaaacgtattttggcactgtaaattaaagtttgcttccgataaaaccctaaagaaagatacatacaaattgctgctatcgtcgaatggagaaatcaaattgtaataaattacaaaaaatggtttgccaaatgcggagcgtatataactcctatctagaccctaagatcttgtcgtttgattaagctaagaggccaataagctccggaaaacccacagcgatgacctctgttggggcggaggtgatgccttttatctggtctagaccattccaaaatcggtgcacacggatgcagttggtcctgccgtcgctggctggttgttctgctgcttctcctgcgcgttatttgccaccgctgccgccgccgccgctgctgccatgttgagttccaccagggtgtcgatgctgttgaggctcacaccctgaaggatctttctcgccgccaaggacgtaaagttaaaggacaagtcggtcagactgggaaagttatatagctcttcgccgccgttggctagcacgctgcccattccttgctccaaagattccttggtcaaactgagtcgtcggtcgatggcttccttatcaatggacttatcattcgccagatctttcagagccaaattgggctcactacccagtggattgcttgacttgtgtagcaaatgggccagcgccagttcatcgccattcatagagcacttctgcagctgacacacggactcatagcacagattcttgaggtcggtactactgttcatcatcatgttgttgctctgtgaggcacccacatccttcgaactcttttcgtaaaaattcaggttgcccaccgagccggcaatctcaaaatcctgcttggctagtgctgccattttaagaggagcatccgcactgggcgaatttggttgggattcattcttcagcacgttgttcttatacgcaatgccattggccagttggaggcacagtttccgactgttgttcatggtggcatcgttattggtgttcttggcgtactttcctccatcataaacaggggtctccggttcaacagcacacgtgctctccggggaacactcactgatgaaggaaatggagtcgcaggtctccgagttggcctccgtttcactaagtggctgctcagaaacagtttcaggcttaacaggcgtagatgtggccgctggggcagcggaagtctgcttggaaagggttttcttgatgatctctcccttctcgttagtcatcgtctcattgttgatgatgaatacattggagttctccagcatcttgccgttctccagggttataacactccttaccggtgagttttggacaaagatcttggtgctcggtatgctttgattcccattcgaggtggtaacctgtagggtaatggagttattgctgttcgaggtgggaacaccattgcttccacccgccggatagatttcctccatgatgcgactgggcgtactagctctttgtctttgcgcctgtgcttcggccactcgtgccctcatggcctgatgacgtggtgttcctcgtggagaaccgtttagcaggagaatcgaacgagaactcccattgttactgttcgatggtggtgctatcaccgccgtattcgtggagcactgcgagtccagactagagtggccgctggtcttttggctaaaggacaccttgccgctgtcaatactcgatggaccgctggcgagcatcgaggtagtcttgcaggactcgaggctcgagggaccactgctttgcagactccggtacgtggccttgttgtccaggcagctgttgatgatcagtccgtccgtgtggcgcttggccgccgtcgcttttaacgtggcggatcgcgatggcgagctctcgaagatgtgcttcccaatcaccgacttctgtgccgtctttggcggcgttggcgtcacagatcctccgtgaccatgactcaaacgcgacgagtgatttgtcttggccgtggtggccggaatcgactgcgtggaacgaggtagcgaactgctgcagtacaccggcgatcggcggcggatgggcgagcagtccctggaggaaatcagaaacgtcgattcgctggacatgtggcgtcgatggcgacggggcaacgtcgaggagcgctggctcagctcagagccgtcgtagaacgtcgagttggacagcgtgtgggcaacgggcatgtcctgcggatggaaaacaggaaacggtttagtatttaacaaatttgtgaccttttcctaagtcactaaggtcttacgtgctcggccgtttgggtgccgacgctgtgcaggtgaacggctctggtgttgaaccactcggctggagggaactgggccgaataggtctcaatctgccgctgcttggctcgaccgctgcgtcggaacagtcgtgagagcaaagatcctttttcttaaaaggggaaaatagcgttaagataggttctttattttcaagatccctcaacttactgggtgatgacgaatctgtgctttggtattccgagctgctgctgtccgtggtgttgagcgtttgggcgtacgtcttggacagacttcgcgtggaggcgcagcgttgcaggcgcttcgacgagccaaagagccgcaaactgtgccggcgttccaagctgcgaggcgtcggaaacgatgcactgcgtcgcttcgccgcccttggatagatgatcttgtcattgggattgcctgtaagtaatttattgatcgattgctgattacactaactgatataattgatgtggagatgtgtgtacttaccgccacagatcacatccgccagattcgtttggatgcactgatgggtgaggtcgccgtcccgctccgttgagatttctccgtagagagagtgcaaggcctcggaattggacattagcattgtgcgtgcctcctggggaaccacatcatcaccgtgctgctgctcctcctccgccaagtgaccataggctagactaccattcaactggtggtgattgctgcgcggcctcgatcgactacgtcggcgtctggaaaggattgggatttggccaatgttattgtattactataatgttaaatgtctaaattcattattcatctaaatttcattaggtaaactgactctggtgtgaagatgaagtatcctttggaggtctgataaatcttctgctcctgcatcagctgggcgagggagtcgtaaatgacctcggtggccggcgtggtcatgtgtgggaatcgggagcccagcttgctgcgcacatgctcaatggttgccgactggccctcggcggtgaggtccatgatcacatcgcagagtgcctctggaagcggcgtgaactgtccctgaaccgttggcgtcacaatgcaatcgtcaatgtcacctggaaaatgtcaaggagacaggtggtatggtcagtgaaaaaccaaaaacatgtgcaactggcccgcttatatggctaatcattggacgaacgactgccccatttggacacctaaacttgctcacattttttccaacgaactcggcttttcatttgctggcattttgggtggtcacctgggagagttgccttggctcgcttggcatttgggtacgcgttcgattgacggggtaattaaaccgcttgatttaagtttgactttttagttttgacctctcatccgcccgaaggtcgtgtgaggtctgttgcgaggcatgaaatgttccacatacaacgacactttaaatgcttaaaagtacacggttcttacaaattggaaaatactaattcaatcttttactttgtagtaattacagtcactttaaagttaaaatgtaatgtaatttagttgcgaagtttaatcaaaaaaaaaaaaaaaaaacaaaacccttcccttttatcatgttacaatctttaacccattcgtttatgattaaaacattttttttacgagtaacattcatcttcatatcatataaattcatcaaatttgatatcccttcctcaaaacgaatcatcaaggactatgcaacaacttgaacaaaccagcaaagctgacaacagttttccgcctgtagttgcggcatcatctgctggcatcgccttatatggtcggcgcatcgttcacgcggcgtatacttaattaaaacgccatgtaccatcagccagaaaaatccatgccaaagaaaagagctctgcacaccttgttgtcgtttcattattatttttacctgctggtgccgcatcgagctcgtaaataaaatgcgcctccacaaacgcttcctacttgcaacttaacctctaaaaaagtggcaaacaaccaacgacaagcaacgcccccgaggcaagtgaatagtagtggcatgcctcaaaattgcaataataaagagggagaggatcgaaagagacggagacaatgacataaggcaaagacagcgtgatggcgatggcgatggcgggaggtgtgatgactgcaaaatcagaccaagtgtgtgtgtgacgacctccgttttagccaggccaagagaggcaggcacaggcacagacacaggcaagcctcttggccgcaaacgtccttgcggcagttgcataatcaatttttcaagttttcactttctgctgccgcctgcagctgtaaaattacactgtgaataatgtcatctaaataatgggtaagaatttatatatattgttgctcaaacgtttttaagtagaaatgacgcgatgatttatcctaccaaatattctagttctgctgttctccgttctgctttcccttctatattttagctaaagccaaaagtctccttaatctttttgattccttttttactaacacatttctctcggtgcaccaatacccggcagcaatttgcaccagcagccagatacaaaataaaatgccatgtgggatgcaccgtcgtcaaggacaattagccgccatattaaacgcagcttgcagttggttgttttgagctaacagcttggaagttggcagttgcaagttgcaagttgtaagttgtgagttgtgagcctcgcaggaaaacagaaaaacagtcgccagaaatccgccttttcctctcactcgcactttcacaatttgcaaatttgctaagcgattaatctttgggccgcatttgcggcatttgtgtgtggcgtcacttggagctgcactcaatctccatctcgccaggccccaaaagcatttgttgtccgccacttacacggatgcactcccttttccactagccgaacaacccaccaacttggcctgcagttaaactcggcttggggatttatttgaacgggcttatcatctggcacactcgcctctttataatacatttcccatttgatttggccactccgcaatttgccattcggcgctgtttggcagcaacgccctgatcataaatttgccagtagtgcagtagccaaattggggctagataaacaaatatgagagatggctgggcaaacacgagtgatatatggatgtggatggaaactcttgcggcttccagatgccgccagtcatccaaacgtttggctttctggtcagcgggcggagttagttcgaaatgccaattggcactgggtgcagtttcgcattcgaaggctacacttattgggaaggtcacggcttcaaattcaaatttaatatcggctaaaggccataaatgagaaagtcaaaccaatacttttacggcttgagacatttgaatatttataaaagcttttggaaatgaagtttttgacgcggcttctctaatgaataccattttttgtgggaacattttacatttgaatattaattcatttcacttgtactgtaccaggtattttaattagaatacattgtatataacatcaatttacttgacttaataagataaaaaagctatctaacgtctgtcacacttaagtggagctataatttttgcttattgggataataaatttcaaaaacatgcttgaaaataacataaaagaaatatacattctttagaaagatatcagaaagatactagcgagaaaagcttatatagccttgaattatttattgatcaaattgttcgataccgaattagacaactctgtgatcaagaacaacaatcatatgtatactttttttcaataatcctctgcgaagctataccaaatttaactacattgaactagttaacgtttacaataattagtttattttaagtaaatacatattggatattatttcaagaaattttgcgtctacttgatttatgaatgtatctattctgctcactgcagtgataatttaaattaataaatttaataagtctattagtttatcttctttgtaaatgccattcgtggaagatttttcttgctttcctcgacttttctatggtttacccctcagcaactgcagcatgctagatgtggcatatttataattcgcaccacactctgcccacatcggaaatctgaccaagatcaaggcctttgcggcaatcttgggttccctgaaattccaactgcccctcgagcacgcgcaacccactttcgttggatggcctagtattcgttcgatattcgtactatgtatacattgtatgtatgtgtttgtatcctccgatgggggagtgttgtatgcaatttgttcggcttatccgtgggctggatattagccggcggttgttgccaccccgttgcaattaaaattaataaacgaatcgaaaggcagcccgtgacgcccccgctttaaaatataaagcccgcgacactggcattatcaattggcatttcattttgatttcgaggtgcatttctccaacgccaaatgcagtttgcatcgccggggactttggcgtttatcgattaaggaagtgttaatttatttgctcctctctttcagtcgctgcccgccgggcagaaacaaaccgaaaacaaagctggttgtaggggggagggatggggggaaaagtaataaattgccatcgatagccaaaaattattgattatttcgaaatggacagcgttaaaagtttatgatgctgccgtggcatcgctggcggttatgagatcaaacagaaaatccccctttgccattccaatggaaaagagctaagcgaaaatgtgccaacaacacgataggcgcacaagatttcctctttattttttaacgtttttctttttctaataataagagacagccgcgaaggaaaaaaaatcatacatcaagattattgttactcgcggcaattgcatcacagtaatggccaacaaagcagctgaagacaacaacaaaaaaaaccaaaaaaaaacagaaacaaaaacaaaaaatggaaatcgcaagaaacatttttcatttgcataaaaattcattgcaactacaagcgctaaaaatgtttgccgcatgtttgagccccatggggcatcgggggtaattgtggtgaggggggggggggctccgatgccaaggagggggtgggcctgccttcagtgggaggctgtgtggaaaacaaccttcaagctacaaaacacttgactccgaaaagccagagcgaacaatccgggatccgtggaaaagcaagactgcgcggcgttgacggcgctttggtttgattgaacacaaggatatgtgtccgccggctaaaatagcggcaaaaaggcttaaaaaaaaggcacggaaaaacttaaaaactaaagcaacaataacataagcctaggcagcaacaattgcaactgtggccacaatttgaaacgaaaacgcaacactttcactctacttaagacggatgaaactgcggcaaaaaggaggcggctccaggaggccgaaatgttggggaaaatcgacggggaaaaggggtggaaaatcaaggggaagaggggtcgggcggacggagggacggcaggttgccttttagacaccatctataaagcgtcggtgggaaaatcgcggcaatcgttttcacgtctttttcatatttattatcatttgcaagtctcgttttccttcggatcggtttttggttttcagttttcagtttttcttttcgacgcaagctaaaaaatgcagatgaagctgaagagtaaaagatttccagctgcaggcagtttgagtttgtcatctgggacaaagactgtgtctttcgttttcacttggcaattaatcaatcagttcggttagtcagggtttttgggcaaaactgatggcgtgggcagcaagttaaaaatcagtaagacagtgagagtatttcattgtgatttacaattaggaaagtcgtcagccagtcattagttagtttgtggtttgtgtttcgaacaatttaagcagtttaaatcattaaaataatatttaaataaaggtccctaattgcggtcgataaaaacaaaaattaaagacattaaatggtgagaaacgcaaacattattaggtcacgctatgaagaatatataaatatttatattggatcaataattttaatttccattgataccttttatagctcagcttgctacttgcattattatcttatatataacgaagcttatttttggttgattctcgatcatatcctgatttcctatattgctcccatttcaaatgcatttcctggaatgcagttttgcataggcagccaggatcaccacccctaggaccgccccattgttgacccaccgtagccccccagttcattcctcattgccccccttttcatcgacatctggagcactgcagcaggaacaacaacgaaatgtctggcggccaaacgaaggcaatcacgattttgtgtctgaaacgttttttgcgcgttttcaatttcccattttggttttccttctcgtatcgcttggggtggtgggtggtgggtggttgtggagcggggggaaaggccacgcagtcgctcgcaaaaggaaacagatacgcctgtccgcagatcgtacaaaaccaaaaaaaaaaaaaaaaattaaaataaaaggagagctacggctttaactttttggccggcgcttgttgcgttcgttgaggcgacgctaattgtttccgtctgttaataaaaatatttcagatcagtaacaaattgaaaacaaggcaatggggataacaacggggagctgctgtttatgcaacgcctcacgaaatgcaaattgacatttacgtggttgcaacaccagcaaaatgccagacagtcggacattgggccaccagcttttttttttatagcctggtaaataaggagcaacacgatttgcccacaaaaaagcaatactaaataaataaccaaattcaagcccagtccgaggaaagaggaaaaattgtttggcgacactttttaccgtccctgttcgctgtgtgtgtgttaaaggtcaatgagttcgggtttgggtttagtttagtggacctgaacctgggagcctgccaagtctctcgtgttgtacaacctacaattgggagctgcagatgatgggataaagtcaggccctagaatcgtgtcgcatttggctaaattgccagccatttttggtgcgtcgctgcgacggaaaaaagtggaaaacaatggcggtgctgtacgattttccgcagaacactttcccgctaaatgagggaaaatgccgtcaagcgtaaccaagagttaaaatcaaataggccatgatgatgatgaacttgcaaagacaactccccaatgacaatgactcctatacttttttttggcgaacttggttacgctttagagaatttctacccacccccccccctcccacatgaaaaggttaacaaacctttcaagaaattgtccacagcttaacggtgaaattatacattatgcgcagcgaaaaaaaaaatacttggcattgatgttggcttacaacatcgatattttggccagcatcaacaaacatccaggataccaggattatttattaatttaattaatattatctataaattgatctcagcagctcattgttaggacttttgatagccgaaaacaaggtgaaattatgaaaataaatttgtatttcttttaatctatatcattctaacaaacacaaacatttgtgtgcaatgtaaatggaaatatggaaatttgaggtgctgaataaaatgtgtatttttcaatgctcacaaaattatcaattcatttttccaccgaattatcagagatctcatgtgattgccactagcaacatttgactgacattcgtttttcgcataagcccgatagatcggttgctgttgacttggctgatttctaccaagttgcgatttgttaatggctcgaatattaagttacaattatctgacggacgggcgatcgatgattgtggctcctctgcagatccagtgtcatggccacatttcactttcggcggcgatttagcgacgagaaatcgtgatgaaattgatttgcggctctttattttttattcgccatcatagttaccgacagctctcgctctagctgtccctctcttcgctgatatctcccatttatatatattttctcggcatctgggaaactgcataattttcccgctttccagctattttgcatttgccatttgtctattttgcttctctggcgcttccaccgatattccgctgtcaaattgccaaagcgccaagcgacggcattttccactgattttccttccttttcccctctcccacccacccgttagaaagaaaaaaaaagtcgagtctccacttggctctttaacacgaaactgaatttaatttgcttttcttcgtttcttttgcatttatttggcatgtttgttgcctaattgagcgagaaattgccgttgattgattgttttgcatgcaatgtgttatttgctatttgttatattgttattgttactgtaactgccatttcaatggtgcttttatttcccatttcgccatgcttaaatgcgatttgatcaacgttctgtgattgttggccaacaactgccatggctagctataaatcttttcctctttaagataaatgtatgctactccttttgcaagtgtcagaccaaagaaaactataaagtttatgtgcagagaagtctttaaaatatttaaagtcaagtgctgtctgtccagtttgttaagcatcgacaagcagttaaatgtttaaacaaatatttagtggcaaccaagcaagcagcgttcatttatgcctactcttggacttaatgcacataggcaattccctagatgtccggactgtaatattattttcatttaaagcgaaaacatattaaaagttcattgaaaaacagtcgccgtaaaaatgctagacaatgttggccacaacatttgaataataaataaccattggagtgtgttcaaataaatgtgactgaaattgatgtcctttttaatggggagactttataatactaactttttacaagtttctgaatttagcagtactctattggaccttaagatgaacaattaagtatagaattaaaacactttaaaatgctatggacctaaaatgagaggggattaaaatatcgcttatactgcattaatctattaaatatcaaatgcgtcactaacgttaataaaaatcttcttgaaaactttaatgggtatttctcttgtgactctcgaggactttgtgagtgtatctagcgtggcacattgttcggtctccttgttggccggccaatggaattgtcatgtttatggtaattaacagttaatgggttctacgccattgcagttgttaattagcaaacatggagcggattctgcaggccacaccatatgttgcacactgtctgcagttttgtgtatgtttttgagtgcagctctttgtttgtccagcgatatttcctcaatcgaatttcacaaagataaaccgacaatatagcctccaacccagaaaacatattactgtgagttgtggccacaaatcgcggcttattaattccccaagcaaagttcgccaaaggccgcagagtttccacaacttcgacgatctccggctggccggtcatttatcaaatcatagacttgcttggcaatggacttttcggctttgaacctcgtcgcgatggaagtgtgaaaacctggaggggaaacggtggaaatgggaaatgggcagcggcagcatcgcattaactgcacaggtgtccacttaattgacagctaacgaggcacagaggagcagaccagtgaccataagccgggccagacacatcaatatttgatgaagtgcatgtcgcctcgattacacaggaataatgcatcgataaaaggggactgtggcagcactcattttccactgtgtagactcatatattgaaaaccaagtggaaaggactgggcttattacaggtctacccttttgatttatttccctgatcagaaaggaggtggcaagcgcaggtgtttcttgttgcagagaggacaaaagcccagatttgaagattccccattacttttgaaggagtcttcgcttttcgcatgaggattgcaatattcgttgaaaaagggtaataagctatctttatatctttctgagttgggatcagttctcagttccagatcatcatctgaatcagaaatacagccacataggctagatctcactggttccagaaaccgttgccttccgccactatgtcgttcttccattagagacatgggtgagggaaaacgctggcaacttcctcgcagttgatctatttggagcttctcctccagatcctgctgggccatggccaggatgcgccagatggagggtccaccgtgtccgtaacgctcattgtactttctctgctcttcgtacatgaggtatctcaactggttgagttctgcccagcgctcaaagtcaatttttcgctgctcaaatgctgcttccttcctctttacgttttcaaacctaaggttgagctccccatcagacatcccttccacctcgtgaggcatcatctgtagacgtcctgcccagaagagaagacgcttcttggccaattcacgctggcgattgggatgcgaaacacgagcatactcctctttgactgaagcatccattgatctaccttctgccttttccccccaaaaaaacgcacaaatttagacgaagttccgaaactgattactaggctttctacgatctaaaagggaaggagactcacccactgagctgatcacataggtggctggtggcttcaggacacttcgggcaaaggctcctcgcaggacctccagggcacagggctcagccgtaacgagcagcattccaggcgccacatgtcctgcgtatttcagcgctcttgtggcagctgtcaaaggtccattccaccagcattgcgcattggcagctagaaagttctggaaaacatgaaacgacaggaaaattcaaaggtcacaaagtggcaatggtaacttgtgatagaaaaatggtaattcaaaaattttaaactgttagtgccttgaaattgtacaacctttacaggaagcccgacgaaacaggtcgaaaggggggtggcttttcccaccaactggtttttacatacatacatttccagtgggagtctgcatctcatcagctaattgacaaattgcagagcaccgcgtggcataattggtgtggtgttgtctggcttaaagagctatccatctgtgggcgttgcgagcggtaactgcctgatggctggcaaccgtcaattagctaaagcggatcgttgccacgcccccgaaatgaaggcggcagggatggtgtggcgccacaaaaaagtaagaccaaaagccgctgtcttattgctgggaatatttatttttttgaagctgccagcaaaagcgaatcgaatcgcaacgaaacgaaatccttaacacgttctggcccagagtgtttctatcaaaaaggaaagatattgtacagaggaaaagtgggaggtgtgcggaaaagtggtgactggggcagcaaataaatgtccaatttgtgcagtgacaggaacacttgaggcacgtttttgatgtaaacacggacaaaaagggtcgagagtcacagcaaaaagccatggacaatggaggcggatgaggattgggaatgggactgggactgggactggtacgcggattgggtaagaaaggccaagagatcgatgtagccgctggagtttcacgctttgtggctttctgtgtcgctaatgaacatcatccagtttgagcgatttgacctttttctcgatgggccatcgagggcaccacggggtgggtatctccgcaggtattgccatttcttgtggtcactcctcttgggctttaatgtcgcctgggtctggtatgtcgcttacataagttgcatggctctcctgcctcttgcccctgtccacgccatcatcgtaaccatctgcatctccacctccatctcgatagccaagatgcccatccatgcccattccaaccttccgcctggggctgctcaattaatgcatgagaaggcgaagaaattaactcgtcattgcctgcccgtcaggcttttgctttggcttcggctgtcacgcgccgccagatggcgctcatcgtacactcagcgaaagtgcggtgaccagcaaagtttggaagtatttattggtagtttatgaaatttcgaagcattcccttttgggttattaaaacgttggttaacttatattattgcatgtgttggtatcccaatggaattgcaattgtagttgcttaaacattgaaaaaatgtataccaatttaaaatagatgttttaggtaatccccgcctatggaagatctttcctttggtgcagttcatcacccaaccatcgccgcaattatagtgctgcatcattgtaagacacgagacaaaataccaacagtctacttatgaaggctttctatcgatcaaagggatctggtttggagctgcgcttcgagttggtggggtgtctgagtttctcatttctcggaagtaatgcaaaacttttaataatcaaatcaaatgcttacgccggccagtgtcgcgcgtatgaaagtcattttcaccgcgggctgaatttgaagtttcgctttttggttgctcttgatgtcgtttcatgtcttttattattataaacctctttttttttcgtttgttggtttgtttcgggtggcggctttcgttttgggacttttacttaatttcatgtaatagaaaactgaacaacaaaactcccacaaaagcaaggctcaaagacaaaactatcaccgatatactctagtggcagaaggcctcatgtggggagcttgctgctgttgctgctgctgctgctgctgctgctgctgctgtgctgcaacagttgctgccgctgtagatctctcgtgtgtgccgcataaaaagataataacaatatacaaacaaatgcgcagtcaggcagcccgaaagccggagattgccaaccgctgcggactgggggcttaatagagttatgatgaagtataataatccttgacctttccaccagccaacatcaagttgcagctacaagtcaagaccgcagctcttaggcacaagtcaaaacgtttttgggctctttgtgtttccccctccacattttgccgtttttatttggggaactcttcatttgacttcaaaaggcgccatttaatttcgcatatgggaagcgaccggctccgaaaatgaaaacgtttcgcttttctccaaagggatgttaaatatgaacgtaaaatggtgacatggatttaatgatcaaagagtatgtattttagttgcggattaaactataagttttaaccatatattttaaaatattgtccgggtcgaggtcacgtttaatatttggttgctcacgttttttgttttgacggcaacaaaaaacgcccatattccctgggaacttttagttttcgacataaagtcgtttgttttatcttaatggttcaaaatctatcatgggtgagcgctacttttattataacttttatggcagccttacagatttgagaggtcttcaaaacgacgattaatgtcgaataatgatataacaaataaattatttttggcaatataaacatatcataatgtttaatgttctccttgatggaagttatgttgtgggtatccaattagtataacatgtcattatatgaataatttcatattttattaattttatttcacatttttcccaaaaggtaataacttaagcgataataataattattttatggtagctcaaggccacgcgaagacttagtaagttaattattttcagtgctcgccaagcaatttatttaatcttctattccccgttgattacttttgggattacacttatttttctgcactcccagctgcaaatgaaagcgctcgtttccaattatttgaggatttctcacgtccataacttgtacatgagcgccccaggacagttcctttgtttgtgccttatccctgtcatcattgtttatttggctctggtcaagtgccagacaaaaccgagggttgagtccataaaccggagcggttgtcggaagccccagccagcataaatacaggacgaactccgtactccgttccaatcaatgcggctggtcctgataaggatacaaattgcatggccatgtccgagtgacgcccacttccccgctctagatacccaaccaccctccctcaaccctgcggcggaataagatgtgtacggctgaatgactgcgtttttctcggacttgaactcgatttgcactgcacttaaaattctatcggacttggggggcgctgcaccccacaggcaatgactttggtcagctatcgagggttgccaggatgccaggttcaatgaccagatatctactacttttggctaaacatgcgatttgttttattagtttccctcgagcaaatacagaaacaacacgagcacaaataccaacagctgttggcaaaagtcctgcctgactgcaagtctttctgcctgccaaacaaaaacagatcccatggattgcggcctggatatctagcaaggcatcccatctgcaactatttcaactttttggcagcccattgcggtcgctatttttgttgcaattaataataaaaactttcaactggaagagctaaaaaactctctcaaactcttttcatataaatatgctcgttttgtggggataaagttttgcaattgctgaaacttctaaacggtaaaatctaaaagggaaatgggtaaaaacatatattacgctctcgacccaatgatacctgatgtgtgaagaataataaatttattatgctgtcactgtatgaacttccctgaagtaacatatggcgccccatgtggggcactcataaaatgtgttatttatacagaaaacctgccaataggccccaatatgaaagcgaaattaacctgttggtaaacaagatctcctaccgaactaagacagcatgaatacaattcttttcagatctagttcttggatctaaaacgatttatttacataatcacgaatacgtcttggcaccacaaacagtgggtatatttatgtgccttgcattgacataccattatatacatatacatatacatatatccatgcaccagagctatcagttgtaaaaatcaacacctcaatttaaaaccaaagcgtgaaaagtgtattagaggttgacgtggggcgacgatgatgacgaagtcgtctgggagaactgtgggaacaatccagtgtgctgcagtcagttcaattctacctcatggcccctctaaagccctctaatatccagattttccgctgcacctgtagtcggttctgcaatgtttttgttttgtgtgtgatttgactgtattgttagcgcatttattgttattgttgctgccttttgtatttcggcgttgaagcttcgctggcacttgctgaaatgtttggccaaaatgaatactagggagcattcgaggtctatttggtgcctttgtacttcgaatgcggtgtctgtcattcacttgcaggtagttaaacaccgtatctatgagtgtgtatagcatttagcacgcaacttgccttaaatgcagcatactagccatactatacaagccttgtcattcaatccatcaggcaaatcatgcgatcaggggtattcatccagaagattgcccaccaagtttcgcgaaatggctgtcaaagttgctaatgagaatccgactgccaaaggggaatgagtgtattgtgaaaatgatttaagcctagctttaattgttggcttagtacaccttaagcgaggaaagtattattatgggcaattatagttcggtagataattgcttaaggtttcacgtgttacaattgtaatagattaagaaatttaattttctcgcggaagcttgcaaaccatacaaattttaggtgaatcattctactccgtattaaatccacaatttttcggaatatttcctcatctaatctagttttaatagtttaaaagtgtattagaaacaaattaacttatcgaaaacaagttttgctattttactccctcgcacttttgtatttatagaagttaagttacaaaaattcccgggtctcatatttgtttgctcttttacttacaaaaaatagctcctactaccgaataaacatgatctcacagacgcggcgagaagcatgaagattgaactacaagtacgtggcccaatgttttggcttttattttatgctttttcggctggtgctgcaatctcagtcacctggcgtgaccgaaagcaaataaataaataaaggagaaacgagagcttcaacttgaactgaactgaactgaagttgtttgccactggacaccaatggccccgagcgaccttgtcgatgaaaattatgcaatcggaggggcaagcgcagcagatggcggcaggtggagcggcaagcgatctctattcaatgtttgtcaatcaaattagtcgccgatgattgcaatctaaattaatgaaatgcaatcataaggcgcacgccaaccaattaaacccactgacgacaaaaagtaaatttgcgcttaaacgattgcgccatcgattcaatttcattaagcccaatcaaaccaatcgaagtggcgagggaaggggttaataacaattcaaatctcttttctttttccccgtttgtaagagccgcgtgccgataaaccaatttacttggctctgtgatttgtttcttctttttccctgcgattgcatgaaattgtatttgaattgtattgaagtgccgaagcttgcaactgtccagctgaactaaaatgaatctggagctcaagttttacaggaaaatattctttgaatgtgagaaggaagtaatttatcgtcttaaaatcagacttttactgaaagtatgaccaatacataattcgtttgctaattacgatcagtaaactcagttggtatttaaaaagttgttgattaagaaaagagctgctaagaacagttgttttagatcatatcatcaaaagtaatcattaattttagaaaaaactttaaattaaatttgagatgaattgcctgaattccatataaatttgtctaaagcttgcttactcaaataacattttcaataagtgatctcatataataatgtgcagtctgccaaaaaaaaaaaaaaaatggcagatgcaaatgttattaatgattcccattgtaactcccataagccgatgaaggatatcacattgtatgccacctcaacgtgtcgcaatcagccttcctttcccaaatcgctttgcttcataacgatcacaggtttaccttcattgtagaccgatcaaaataattccgttcccagactctccatttcccagatatatttccagagccagttttgctaacagttcatttatgttttttattatttgtttcttaacgattttatggacctgcaaatctcaggcggttctcagattcgcagaacggcagaaagcgactcccgcgctcttgacatgacgcaatcagctcgcatccgtagagatatttcaaaacttgttgcaggcttattaatttggctcggagcaccgagagcacaactaaaacaagttgatttaggtgaagtaatttgcgtgcaaccagacactaaacactgaaaccgaacactaaacacggcaacagaaagcaacaaaattaagcaaaaaaccagagaaacaacgaaacagttcagagatcagctcggggcactcaggagatcagagtttgaagtcaagtctggtcctcgactgtttgttgttcgatacttaagttttttgtatttttgccaagttccaagtttcaagccacgccgcaagccgcacgcctgacaaatttgcgcaaataataaaaacagattttaaatgcctggaaattgagtctggcattgcggccttaaatcagtttcctccccagctgaactgacatttagagttttgctgaaaaaatggcaacgagagcccaagctcaacgcttaaataggagaaactttatggtctttgtgtatattcagcacatttattattgctaaaaatgtatgtttttctcaggtttaattgtattcattgttatgctgaacatggtcgttaggaaagtaacgaatatgtatgcgtaataacaacgacttccttaaaatttatcgatcttttaatagcgacagtgctataagacttaaattagtgtcaaaatttttgcttttgtttgtaaataattattagtttcacggtagacaaacagaaaatcgttttcgccatataagttgatatgacaacttttgtgcaaaaccgttcggaatccctttagtttttgcgctgtataatggtcaccttcgcactttcgcatggtgcgcttcgtcactacgtttacggtgatatgtcaataccctgatagtagaaaggtgtagaaaatgttcagagctccagaagtctctttactgatttttcacgtaattctttagctctcaaggttttttttttgtaatgagtactcttttttgggcacaaaatatatattttttataggctcatttagtaaaaagccagaaataaagtatctcaatctttgttctttaaccttactattgtcttgtaagcgtttctcaacggtacaaaaactttttaaattatggcacgccctaaaacttgagcaacatcaccggaaactcttgcccattcgatatggtcgatggttgtgcagaagacccgccttagggaatgcatatatgtacatacatatatgagtgtatatacgaatatatctcccttcctcaacgcgaagcgccggcacctcaatctacataattcacacttcattgagcttggaaatttacaatgaatactcggtagctgcattagctgccccgaatcgaattcatcgggcttcccattcatcacttggcattttcccattcaagttctcgacattttttccatcaattcacgcacttttcttccgctctgctctaaatgcttttggcccctaaatcttcatactcgtatatatgtacatatgtatgtatgcacacattaatagttctattcagagcacgctttgcattggcccttttacacaccgaactgaggcacgtaatattaattagtccagctcgaaactcattcgaaatacccaaaaaatgaatggccggcgattgttatgttttgccttctacttacacacaaaataactaaagaaaataaaatgaactcaagggaatgtttatgcgacactttttagtatgcacaatgcaaaactcagtgcaaaaaataaaaaaaaataaaaaatacagcataaaagcacaaacgagaacaacagaaattgagcttaacaataataaaaagagacaaacaaaaaataaagcggcagcgccttttcaagtttcacactttttggcagccagcaattaaattgaaattaaccggcattgtgagaaaaattaagttattcatagaaaggtgttggtggacattgtctcgccagaaactaataatagaccttgtaaaactgactctcattatactagttactttagttactatgcttgtaactgcaaaatgggtgtattatattgtaatataataagccttgatttgaaattgaggaagtacttctgaatatatgaatattacgattgcaactataaaaacatttgattatacgtctttgtaactattaatgactattctgcgttataattttccttcttttaaatacccatttaaacgctcttaaatatttaatataaactttcgatatacgcacaggtattcaacgcgtatcattagccaaattattcaaagttttaccagcatttggctcatcatttggatccattaacacttcaaacttgaacttgtcggaatgacgtcatctcgattggcaatttgtgcaataaacaatggaaaaaacaacaataaaaatcagcaactaaaaaaaaacgtcggaagcagcagcatcgaccgcaacaaaaaaccgaaaaagttgatttaaaattttaattcgtttttcagccggtaagaacgggttgaaatgtcaccgaaacgaataaagcttataacttcgatcgtctgcctgaactcatgagttccatgaactcataagttattttgggttatatctaggggcaaacggcttcctggccaaaaagtttcggagactttggcttctgttcgaaagtcatcaataacaaaagcggtgggtaataaagaaaaagggacaagaaaatggcaaatgttgcatgtgcaatacgtttgttgcaagtgttcaatgtttgtttgcagcatggtctgggtctagtctggatgacgccctggaaaacggaacccagcaacctgttagggggattttctgccccatttcgttccgggccatttattttcatgggaagtggtcgcgaataaaggcgaaaccccaccgccaccccaaaaccccaacgtagcgactgaccttgagcgggagttacagtccatcgtcacctccgttgcctgtctctttctgccgcagcatagtgcccatctcctcgctctgcctcacgcactttttgcagttcaaactggacaaccagtcggcaaaccagttccttgcacattaaaagcagaagaagctgaaagcaacgcgggagccacactcggaaaaataccagttaagaatcactggttatacttgcatatcatattatacgtatgtgtacatacataaatttcaaattttctactaagtatcctaaaacattaaatgttcgaaggattcatggttttcttaacactttccatcctcgcttttagggtgtgagttcagggaaataaaaaatacattttaaacacgtgtttcctcatgggaattacgtttaaatactaaatacaaaataaacattaatctgaagtcgtttttacatcagcattgactcttatgtaagcaaaacgaagcacatttctgacacatttttatacatattgccgtcacataagtctttgaagctatgaaggaatttgtttgacaaagtttttgcggtttataactatttcaaacgagaaaatcttagctatgtacaaaaaattttaggacttcataggaacactccgacggtggttttctctctgtgcaccaatcgaaactcacctgaaatatcatatatcccgagtcgtacatccaaaagtcctcgggcgtgtggccgggcttggtcagctgaatggccaggcagcgctgcaagatcagacggcagcgctgtggaccaccgggtgacttggtgcccatttctgttggtgcctttctgctggcgggttgctcggtggcttggtttcttggttgctttcccagattttttgttagccgtctaaaaataacgccaagagttcagacttaaggatctggcactgcgcgcgcgtgtgtgtgaaaggttcttttttaatggtcaagcacttgggcagcgaacaaaaaaaaaataccagacggcgcagaacgcgataagaacgaaacccgtatttgcagagttttatctctttttggttttgcttttggccaggctcactttattttcgcacacttcttagaccggacttctgtggcttcttattttgggaatgaacttttcacatcagcattatattatcccagcatctcgaacgcgaacgcgacgcctgcgcactaaatcactcaacactcattgggcacttggtgagtactcactctcgaattcgaatgcgagtgcgagttgcgaaccgaatcgtaccgaaccgaccgagcgacgaattcaaactgaagttgcggcgccaagaaaagtcgtctcacgaccgctctttcgccggagagcggcgttcgcggagagcgccaactcgccaacttttttggagacctgaaacgatagaaaaatcggagagctcgctttaaaaccttgattattaaatcaattaggtgtacgaaaaaaagacaaaaaacaaaaaataatactaaatttataaactggagtcaggctgccgtgatcgcaatcttgtcgtcgttctgtctgagaggcgaacgggctctgctcctaataacatcatcacatcatcatgctcgtatcattatcgttaactgtaagccgtgtttggcaactgtttctttagccaaacagtgggacctcgaaaatgttcaatctggataacagaatcaaaaacataaaactagaggtacttgaaaatactttgacaaaatatcttgccggttttctgaatttttattggctgttttccatagtgagcatggagatatagaaatggagatataaagatatagatagatagaaatcaaataaaaaaattatttaaaaatacagaaaacacaacatttggcatgcagccttttactgtgaaatgcctttaacttaacttttggatgcgcatacagactttctgttacataaccaaaaataaaccaatcttttgagcctccactgtatactaattttttggcattcgtttttgcattgactcgtgtatatttggattttttttttttaaagtgcctttcaatcttggctggcgcttggaagtcatttcctgcccgaatcaccggatgggcagatgactcaaaatgggttaattaaaaaccatctagcagtgattttatttgggccgatgtaaagtcatgtgcccaaaagagttgttctcattaccacagatcgcatttagaagccctacggcggtcatatccactgatggactttgaacccatgcgaaatctaggaaatgtcagaatagtcagtcgcatccataattgcgtatacgccatgtgcgccgactgtcaatcacaattctcatgcaaattcgttcgctttccgcactgtccaaatgcattaagtggaaatgcattaggttgactgtctt

SEQ ID NO: 22217 - DNA, 4378 bp, DROSOPHILA
tcgtttcaggtctccaaaaaagttggcgagttggcgctctccgcgaacgccgctctccggcgaaagagcggtcgtgagacgacttttcttggcgccgcaacttcagtttgaattcgtcgctcggtcggttcggtacgattcggttcgcaactcgcactcgcattcgaattcgagagtgagtactcaccaagtgcccaatgagtgttgagtgatttagtgcgcaggcgtcgcgttcgcgttcgagatgctgggataatataatgctgatgtgaaaagttcattcccaaaataagaagccacagaagtccggtctaagaagtgtgcgaaaataaagtgagcctggccaaaagcaaaaccaaaaagagataaaactctgcaaatacgggtttcgttcttatcgcgttctgcgccgtctggtattttttttttgttcgctgcccaagtgcttgaccattaaaaaagaacctttcacacacacgcgcgcgcagtgccagatccttaagtctgaactcttggcgttatttttagacggctaacaaaaaatctgggaaagcaaccaagaaaccaagccaccgagcaacccgccagcagaaaggcaccaacagaaatgggcaccaagtcacccggtggtccacagcgctgccgtctgatcttgcagcgctgcctggccattcagctgaccaagcccggccacacgcccgaggacttttggatgtacgactcgggatatatgatatttcagaactttctagctgccaatgcgcaatgctggtggaatggacctttgacagctgccacaagagcgctgaaatacgcaggacatgtggcgcctggaatgctgctcgttacggctgagccctgtgccctggaggtcctgcgaggagcctttgcccgaagtgtcctgaagccaccagccacctatgtgatcagctcagtgggtgacattgacgattgcattgtgacgccaacggttcagggacagttcacgccgcttccagaggcactctgcgatgtgatcatggacctcaccgccgagggccagtcggcaaccattgagcatgtgcgcagcaagctgggctcccgattcccacacatgaccacgccggccaccgaggtcatttacgactccctcgcccagctgatgcaggagcagaagatttatcagacctccaaaggatacttcatcttcacaccagaacgccgacgtagtcgatcgaggccgcgcagcaatcaccaccagttgaatggtagtctagcctatggtcacttggcggaggaggagcagcagcacggtgatgatgtggttccccaggaggcacgcacaatgctaatgtccaattccgaggccttgcactctctctacggagaaatctcaacggagcgggacggcgacctcacccatcagtgcatccaaacgaatctggcggatgtgatctgtggcggcaatcccaatgacaagatcatctatccaagggcggcgaagcgacgcagtgcatcgtttccgacgcctcgcagcttggaacgccggcacagtttgcggctctttggctcgtcgaagcgcctgcaacgctgcgcctccacgcgaagtctgtccaagacgtacgcccaaacgctcaacaccacggacagcagcagctcggaataccaaagcacagattcgtcatcacccaaaaaaggatctttgctctcacgactgttccgacgcagcggtcgagccaagcagcggcagattgagacctattcggcccagttccctccagccgagtggttcaacaccagagccgttcacctgcacagcgtcggcacccaaacggccgagcacgacatgcccgttgcccacacgctgtccaactcgacgttctacgacggctctgagctgagccagcgctcctcgacgttgccccgtcgccatcgacgccacatgtccagcgaatcgacgtttctgatttcctccagggactgctcgcccatccgccgccgatcgccggtgtactgcagcagttcgctacctcgttccacgcagtcgattccggccaccacggccaagacaaatcactcgtcgcgtttgagtcatggtcacggaggatctgtgacgccaacgccgccaaagacggcacagaagtcggtgattgggaagcacatcttcgagagctcgccatcgcgatccgccacgttaaaagcgacggcggccaagcgccacacggacggactgatcatcaacagctgcctggacaacaaggccacgtaccggagtctgcaaagcagtggtccctcgagcctcgagtcctgcaagactacctcgatgctcgccagcggtccatcgagtattgacagcggcaaggtgtcctttagccaaaagaccagcggccactctagtctggactcgcagtgctccacgaatacggcggtgatagcaccaccatcgaacagtaacaatgggagttctcgttcgattctcctgctaaacggttctccacgaggaacaccacgtcatcaggccatgagggcacgagtggccgaagcacaggcgcaaagacaaagagctagtacgcccagtcgcatcatggaggaaatctatccggcgggtggaagcaatggtgttcccacctcgaacagcaataactccattaccctacaggttaccacctcgaatgggaatcaaagcataccgagcaccaagatctttgtccaaaactcaccggtaaggagtgttataaccctggagaacggcaagatgctggagaactccaatgtattcatcatcaacaatgagacgatgactaacgagaagggagagatcatcaagaaaaccctttccaagcagacttccgctgccccagcggccacatctacgcctgttaagcctgaaactgtttctgagcagccacttagtgaaacggaggccaactcggagacctgcgactccatttccttcatcagtgagtgttccccggagagcacgtgtgctgttgaaccggagacccctgtttatgatggaggaaagtacgccaagaacaccaataacgatgccaccatgaacaacagtcggaaactgtgcctccaactggccaatggcattgcgtataagaacaacgtgctgaagaatgaatcccaaccaaattcgcccagtgcggatgctcctcttaaaatggcagcactagccaagcaggattttgagattgccggctcggtgggcaacctgaatttttacgaaaagagttcgaaggatgtgggtgcctcacagagcaacaacatgatgatgaacagtagtaccgacctcaagaatctgtgctatgagtccgtgtgtcagctgcagaagtgctctatgaatggcgatgaactggcgctggcccatttgctacacaagtcaagcaatccactgggtagtgagcccaatttggctctgaaagatctggcgaatgataagtccattgataaggaagccatcgaccgacgactcagtttgaccaaggaatctttggagcaaggaatgggcagcgtgctagccaacggcggcgaagagctatataactttcccagtctgaccgacttgtcctttaactttacgtccttggcggcgagaaagatccttcagggtgtgagcctcaacagcatcgacaccctggtggaactcaacatggcagcagcggcggcggcggcagcggtggcaaataacgcgcaggagaagcagcagaacaaccagccagcgacggcaggaccaactgcatccgtgtgcaccgattttggaatggtctagaccagataaaaggcatcacctccgccccaacagaggtcatcgctgtgggttttccggagcttattggcctcttagcttaatcaaacgacaagatcttagggtctagataggagttatatacgctccgcatttggcaaaccattttttgtaatttattacaatttgatttctccattcgacgatagcagcaatttgtatgtatctttctttagggttttatcggaagcaaactttaatttacagtgccaaaatacgtttagattaattttaatacttattatttcatatgccagttcgtatttcgctttctaccagagagacaccgccaagcggcttctgtttaagcaatccgatttatgtaaaaatccacacaaccactatgttatccttacttttgtgtacattattcaaaataattgtttatactcacaacgccccaaatgcaaacctatctatacagacgcgaaccgcaagagaacagagatgtactacgaacatagaacttagcactaaaacagaaatacaataattttgtacaaggccttaattagtaaagtcagcaataatacaaaataagttgaatcactaataaaaacgatataaaaataaacctataaattc

SEQ ID NO: 22218 - protein, 1049 aa, DROSOPHILA
MGTKSPGGPQRCRLILQRCLAIQLTKPGHTPEDFWMYDSGYMIFQNFLAANAQCWWNGPLTAATRALKYAGHVAPGMLLVTAEPCALEVLRGAFARSVLKPPATYVISSVGDIDDCIVTPTVQGQFTPLPEALCDVIMDLTAEGQSATIEHVRSKLGSRFPHMTTPATEVIYDSLAQLMQEQKIYQTSKGYFIFTPERRRSRSRPRSNHHQLNGSLAYGHLAEEEQQHGDDVVPQEARTMLMSNSEALHSLYGEISTERDGDLTHQCIQTNLADVICGGNPNDKIIYPRAAKRRSASFPTPRSLERRHSLRLFGSSKRLQRCASTRSLSKTYAQTLNTTDSSSSEYQSTDSSSPKKGSLLSRLFRRSGRAKQRQIETYSAQFPPAEWFNTRAVHLHSVGTQTAEHDMPVAHTLSNSTFYDGSELSQRSSTLPRRHRRHMSSESTFLISSRDCSPIRRRSPVYCSSSLPRSTQSIPATTAKTNHSSRLSHGHGGSVTPTPPKTAQKSVIGKHIFESSPSRSATLKATAAKRHTDGLIINSCLDNKATYRSLQSSGPSSLESCKTTSMLASGPSSIDSGKVSFSQKTSGHSSLDSQCSTNTAVIAPPSNSNNGSSRSILLLNGSPRGTPRHQAMRARVAEAQAQRQRASTPSRIMEEIYPAGGSNGVPTSNSNNSITLQVTTSNGNQSIPSTKIFVQNSPVRSVITLENGKMLENSNVFIINNETMTNEKGEIIKKTLSKQTSAAPAATSTPVKPETVSEQPLSETEANSETCDSISFISECSPESTCAVEPETPVYDGGKYAKNTNNDATMNNSRKLCLQLANGIAYKNNVLKNESQPNSPSADAPLKMAALAKQDFEIAGSVGNLNFYEKSSKDVGASQSNNMMMNSSTDLKNLCYESVCQLQKCSMNGDELALAHLLHKSSNPLGSEPNLALKDLANDKSIDKEAIDRRLSLTKESLEQGMGSVLANGGEELYNFPSLTDLSFNFTSLAARKILQGVSLNSIDTLVELNMAAAAAAAAVANNAQEKQQNNQPATAGPTASVCTDFGMV

SEQ ID NO: 22219 - DNA, 3591 bp, DROSOPHILA
tatacaaacacatacgcacgcacacctatatttattaaatgcatttaatttcatattaaacttaaaacgaaaaacaagttaattgttacacaaacacgatttggttagcttcgacttacttccaccgatttgtttccaaagctcttccatattaattacacatgtaatttacatctagaactagaatgttaaataatctaatttttgccatatttagttcagtgttcatcaatcgcattgaaaagtgtcttccttcgccgcgttcaatcatattgccttttgtttatgcattccaatccaataatttgtgcatttcttaattctaatatctgcataatgtacatagagatacgaaacggagaaagaaacacgacgagatgttgctatgaatttaaattgtttggagtttccaacgtggttcatatacatataatttcacttgcattttaaggacacaattatagtttacttttaccatgcctagctgataagttgttggtacaaagaatcgaaaataaaaacatagatattttccaagggaaaaataaagcgtatcgccaatggataaattttgatttcgttttcttttgagtttattattgatagagctttcatattttattgtgataggattatacaagcaccttgtcaagtactattggattacctatttttctatataacatccaatatatatgtatttgatttggttcagaattcaaaaatatttagggggattatatttctattttctttctttctttagaaacaagttttttttttacgaggttgaatgaaatatacagaaagtttttctggctttgcttgtttgtggatacaatagaattttttaaacagtaaacaaaaaattaaaaaaaacaaaattataaaaaaatgttttctgttttaaaaggctagctataaaaaaagctaggtatggcgagcactgttcccattttccatccctggttaaggctgtgttatcgttatcgggagacagctgattggcggcatcttcatttacaaacaattgtggaatttgcaaacttttgtaaaaatggactacgatttcaagatgaaaacgcagatagagcgtacgaaagtggaggacctattcaactacgagggctgtaaggtgggacgcggaacatacggccacgtctacaaggcgaaatggaaggagacaaggtgaactggtcatcgggtgctcttcaaacaatataaataattatagtattcatgttctttagcgatggcaaagaatatgccttgaagcagatcgacggcaccggattgtccatgtccgcctgccgcgagatcgcattgctgcgcgaactgaagcatcagaacgtaattaccctcatccgggtgtttctgtcgcacaacgaccgcaaggtgttcctgttgatcgactatgcggagcacgacctgtggcacatcattaagttccatcgggctgctaaggccaccaaaaagcaggttgtggttccccgcggtatggttaaaagtctgctatatcagattctggatgggattcactatctgcacagtaattgggtgctacatcgtgacctgaagccggccaacatcctggtgatgggcgatggcaacgagaggggccgcgtaaaaatcgccgacatgggtttcgcgcggctcttcaatgccccattgaaaccgctggcagatctggatcccgtggtggttaccttttggtatcgcgctccggaactgctgcttggcgctcgtcactacaccaaggctatcgacatctgggctattggctgtattttcgccgaactactcacttcggagcccatcttccattgccgccaggaggacataaagaccagtaatccgtaccatcacgatcagctagaccgcatcttcaatgtgatgggctttccgcaggacaaggactgggaggatatcaagaagatgccggaacatcatacgctgacaaaggactttaaacgctccacatactccacctgctcgctggccaaatacatggaaaggcacaaaataaagccagacagcaaggcctttcacctgctgcagaagctgctgctaatggatcccaacaagcgcatcacctccgaacaggccatgcaggatcagtacttccaggaggagccgcagcccacgcaggacgtgttcgccggctgccccataccgtatcccaagcgtgaattcctcaccgacgacgaccaggaagataagtcggataataagcgacagcagcaacagcagcagcaacaacagcagcaacagcagcagcaacagcagcagcaacaacaacagcagcagcagcagcagcaaatgaacgctgagccgaatgcaaagagagttcgattgtccggagctggtaaccagcaagattttcaccaccagcagcagcagcaacagcagcagcagcaacaacagcagcagcagcagcaacagatgatgttcaatcagcagcagaacttccagcgcttcaactgagagactgatacatgcagcattttttctacaacacctactaatttctagccttctaagtatttaatttaatgaccttgataatagcaagtaaagtgtacgatataaaacgttgatttttaatggacagggttttctttatttaattttgtgaactccaattaactcaaattcgttgaaatatctttccgaaggatattcaaaaataaatttgaatgcatgttctttcctctcaaaaatgaatttctcaaacgaagttttgaaaactatttttaaaattggttcgagtctgagctatttatttaaagcatgttatgtttttgtgtcggcttgggtcacgatacgcaagtatcgattaaatgtaatcgaaggtgccatcgctgtgttgccagctctagtagaatttgttagaatattttaccggatttgccatttgctttgcaatacaaattagaagagaatatccacacagtgaccattaaagcgtaaagagccaaatctaacgttttccaaattaagatcaaaaccgcccgtctggcgacatcgatgagatcgtggccctcgcccaaaacccagctggctgccaacttgaagattgtggcgtaaattgccctccggaaacgcagttgcaattgcagttaacaggcgaaagtcacacaagtaagtgggattcggaatggaggcggtggtgcaggcggaggcggacgacaacaatgcgtcggatgtccagcggggtgttggtggggcattgctggccgtagtggccacccagtgggcggcaatggcaacccctccaagggcacgaggtttcgccgcgacctgtgccattataatctggcgaacatcgcgatttcagtgcctgttcggctactgccgccgtgattcacgattgtccagcagcaacagtggcagcagcaacagaaacaacaaccataaaatctacgaaatcatcaatgactcccaaccgcctgacgtaattatccgcgtgcattgttcgcaactaaagcacactctggtctttgcccattgttacaggtaacacagatagccaggatgcagaacaatcccagcccacagctaccctgcaagggtatactaaagacttcgcgt

SEQ ID NO: 22220 - DNA, 1529 bp, DROSOPHILA
ctgattggcggcatcttcatttacaaacaattgtggaatttgcaaacttttgtaaaaatggactacgatttcaagatgaaaacgcagatagagcgtacgaaagtggaggacctattcaactacgagggctgtaaggtgggacgcggaacatacggccacgtctacaaggcgaaatggaaggagacaagcgatggcaaagaatatgccttgaagcagatcgacggcaccggattgtccatgtccgcctgccgcgagatcgcattgctgcgcgaactgaagcatcagaacgtaattaccctcatccgggtgtttctgtcgcacaacgaccgcaaggtgttcctgttgatcgactatgcggagcacgacctgtggcacatcattaagttccatcgggctgctaaggccaccaaaaagcaggttgtggttccccgcggtatggttaaaagtctgctatatcagattctggatgggattcactatctgcacagtaattgggtgctacatcgtgacctgaagccggccaacatcctggtgatgggcgatggcaacgagaggggccgcgtaaaaatcgccgacatgggtttcgcgcggctcttcaatgccccattgaaaccgctggcagatctggatcccgtggtggttaccttttggtatcgcgctccggaactgctgcttggcgctcgtcactacaccaaggctatcgacatctgggctattggctgtattttcgccgaactactcacttcggagcccatcttccattgccgccaggaggacataaagaccagtaatccgtaccatcacgatcagctagaccgcatcttcaatgtgatgggctttccgcaggacaaggactgggaggatatcaagaagatgccggaacatcatacgctgacaaaggactttaaacgctccacatactccacctgctcgctggccaaatacatggaaaggcacaaaataaagccagacagcaaggcctttcacctgctgcagaagctgctgctaatggatcccaacaagcgcatcacctccgaacaggccatgcaggatcagtacttccaggaggagccgcagcccacgcaggacgtgttcgccggctgccccataccgtatcccaagcgtgaattcctcaccgacgacgaccaggaagataagtcggataataagcgacagcagcaacagcagcagcaacaacagcagcaacagcagcagcaacagcagcagcaacaacaacagcagcagcagcagcagcaaatgaacgctgagccgaatgcaaagagagttcgattgtccggagctggtaaccagcaagattttcaccaccagcagcagcagcaacagcagcagcagcaacaacagcagcagcagcagcaacagatgatgttcaatcagcagcagaacttccagcgcttcaactgagagactgatacatgcagcattttttctacaacacctactaatttctagccttctaagtatttaatttaatgaccttgataatagcaagtaaagtgtacgatataaaa

SEQ ID NO: 22221 - protein, 454 aa, DROSOPHILA
MDYDFKMKTQIERTKVEDLFNYEGCKVGRGTYGHVYKAKWKETSDGKEYALKQIDGTGLSMSACREIALLRELKHQNVITLIRVFLSHNDRKVFLLIDYAEHDLWHIIKFHRAAKATKKQVVVPRGMVKSLLYQILDGIHYLHSNWVLHRDLKPANILVMGDGNERGRVKIADMGFARLFNAPLKPLADLDPVVVTFWYRAPELLLGARHYTKAIDIWAIGCIFAELLTSEPIFHCRQEDIKTSNPYHHDQLDRIFNVMGFPQDKDWEDIKKMPEHHTLTKDFKRSTYSTCSLAKYMERHKIKPDSKAFHLLQKLLLMDPNKRITSEQAMQDQYFQEEPQPTQDVFAGCPIPYPKREFLTDDDQEDKSDNKRQQQQQQQQQQQQQQQQQQQQQQQQQQQQMNAEPNAKRVRLSGAGNQQDFHHQQQQQQQQQQQQQQQQQQMMFNQQQNFQRFN

SEQ ID NO: 22222 - DNA, 3881 bp, DROSOPHILA
gggctttccgcaggacaaggactgggaggatatcaagaagatgccggaacatcatacgctgacaaaggactttaaacgctccacatactccacctgctcgctggccaaatacatggaaaggcacaaaataaagccagacagcaaggcctttcacctgctgcagaagctgctgctaatggatcccaacaagcgcatcacctccgaacaggccatgcaggatcagtacttccaggaggagccgcagcccacgcaggacgtgttcgccggctgccccataccgtatcccaagcgtgaattcctcaccgacgacgaccaggaagataagtcggataataagcgacagcagcaacagcagcagcaacaacagcagcaacagcagcagcaacagcagcagcaacaacaacagcagcagcagcagcagcaaatgaacgctgagccgaatgcaaagagagttcgattgtccggagctggtaaccagcaagattttcaccaccagcagcagcagcaacagcagcagcagcaacaacagcagcagcagcagcaacagatgatgttcaatcagcagcagaacttccagcgcttcaactgagagactgatacatgcagcattttttctacaacacctactaatttctagccttctaagtatttaatttaatgaccttgataatagcaagtaaagtgtacgatataaaacgttgatttttaatggacagggttttctttatttaattttgtgaactccaattaactcaaattcgttgaaatatctttccgaaggatattcaaaaataaatttgaatgcatgttctttcctctcaaaaatgaatttctcaaacgaagttttgaaaactatttttaaaattggttcgagtctgagctatttatttaaagcatgttatgtttttgtgtcggcttgggtcacgatacgcaagtatcgattaaatgtaatcgaaggtgccatcgctgtgttgccagctctagtagaatttgttagaatattttaccggatttgccatttgctttgcaatacaaattagaagagaatatccacacagtgaccattaaagcgtaaagagccaaatctaacgttttccaaattaagatcaaaaccgcccgtctggcgacatcgatgagatcgtggccctcgcccaaaacccagctggctgccaacttgaagattgtggcgtaaattgccctccggaaacgcagttgcaattgcagttaacaggcgaaagtcacacaagtaagtgggattcggaatggaggcggtggtgcaggcggaggcggacgacaacaatgcgtcggatgtccagcggggtgttggtggggcattgctggccgtagtggccacccagtgggcggcaatggcaacccctccaagggcacgaggtttcgccgcgacctgtgccattataatctggcgaacatcgcgatttcagtgcctgttcggctactgccgccgtgattcacgattgtccagcagcaacagtggcagcagcaacagaaacaacaaccataaaatctacgaaatcatcaatgactcccaaccgcctgacgtaattatccgcgtgcattgttcgcaactaaagcacactctggtctttgcccattgttacaggtaacacagatagccaggatgcagaacaatcccagcccacagctaccctgcaagggtatactaaagacttcgcgtagcttcgacaagtcgggagccaggtgaggtcatcgaatgaccccagttaatagcccttattaattggtttctttttcatccttttaaaaagttttcgcaaaagtgccaagttcgatgagctgaacgtgatgcagaccttccatccggccgacaaggactacggacacatgaaaatcgatgagcccaaaacgccgtacaactacacggagggcttcgacgagaacagggacgagctggacacggagttgctagtggagaagtatgtggagctttcctattgtttacttgctaaatggtttggcaagagcacagagtatcaagtttcaaacaaaactgatttccagaaaatgcgccgttcacatttgtttgtttacatgtgacttatagattcagagattaaacaatcgttgataattatacgatttgcaaaatgataatcaaatatatcaacattattgagcaatatgactgcctcagatttcttaagaatataactagctaaattcataatcaataatttgtttgaaaagaaaaagttttttttgaaatttgaagacttattttaaagccgtgccagtcattttgtagtttacatattattgcacttacaattactaaaaacacatactaatttgcagactccgcatagcggctaacacacagccgtcgacagagagcatcgaggacgatggttcctccggtgatgaccagccccttagcgaagaggagcgacgtaagtaccatgaacatctcagattccaacaattgctcaaacatatttgcttgcagaacggcggcgcgaattcgagcgacgccgtaaggcccactatcgcgagtttgaggccgtcaaactggcacgaaaactgatccaggaggaggacgacgacgatgacgacgaggacaagggtgcggatagccggccctcgggctcgtcacagggcgcttccagctccggacgtttcgcgagcagttcgaccaaacggtcgagctctcaggctgactccaccacatccccgtctaccagcgccggccagaacatggacctggagccatcgaataactagaagcaatgtcaacccatcaatcaatcactaatgtttacctagcggacaatggacgattctgagggcagctcatccaaaacaataaacaaacgaaattatatcaaattatcaagtgctgtgcgagtgcggagtgagaagtggatgctgattagcagggtggcgaggagcactcgtgattaattgaatttacccaactaaacacaaaaaacaaaccgtcgccaaggagatgcgtcatcgagtagtgaacacagccgataagccgaggggcactttattgttgcaaattgagtttagagcacaaagaatgtgcacctggtcggagaatttgattgtacgacacaaaatataattaatcgtatgcgtctcagccgtagcgtcctgtattgttgcaaatgtagttaaacaaaagtctttcaaattgatatcgagatggaaagccaacccgttcgcagctccgtttgcatttaatttgattggatgcccagtgccacagaatggataacttgttgtaactagcgttgaaattgatttggccttacttttagttatttattaatacgatactattatgattactattaagttttagccatcgaatgcgagccgagcgtttcaataaagagagtccaaaaacccaattgaaaaaaaccttcgaaatagttcttctcgtcgcgagtattcaaaacttgccgtttatttagtttctcatttcatattagttatacatcgtagtgtagttgcgtatagacattgctggtcatagtaattggtaaagtctgagagttgtgttggcccgtcctcgatctcgccccggcctcatcccccatccatacgccaagatctgggccctgagtccgcggctgctcgtccagcaggcaaaggcatcctcatattattgcctggggtcagcgggcgaactaaagggccgacctcagacggctggaagggggactgatggggccttataggggtggcataatccgaacgtgcgcgttgaatttaatatccttgaatgacatatttcgaactcacagatttgtttcggcgcggtcgcctggtttcttgtataacttacttatagcgggatatttgacggttttttataatttgcagttaacaat

SEQ ID NO: 22223 - DNA, 1530 bp, DROSOPHILA
attttaccggatttgccatttgctttgcaatacaaattagaagagaatatccacacagtgaccattaaagcgtaaagagccaaatctaacgttttccaaattaagatcaaaaccgcccgtctggcgacatcgatgagatcgtggccctcgcccaaaacccagctggctgccaacttgaagattgtggcgtaaattgccctccggaaacgcagttgcaattgcagttaacaggcgaaagtcacacaagtaacacagatagccaggatgcagaacaatcccagcccacagctaccctgcaagggtatactaaagacttcgcgtagcttcgacaagtcgggagccagttttcgcaaaagtgccaagttcgatgagctgaacgtgatgcagaccttccatccggccgacaaggactacggacacatgaaaatcgatgagcccaaaacgccgtacaactacacggagggcttcgacgagaacagggacgagctggacacggagttgctagtggagaaactccgcatagcggctaacacacagccgtcgacagagagcatcgaggacgatggttcctccggtgatgaccagccccttagcgaagaggagcgacaacggcggcgcgaattcgagcgacgccgtaaggcccactatcgcgagtttgaggccgtcaaactggcacgaaaactgatccaggaggaggacgacgacgatgacgacgaggacaagggtgcggatagccggccctcgggctcgtcacagggcgcttccagctccggacgtttcgcgagcagttcgaccaaacggtcgagctctcaggctgactccaccacatccccgtctaccagcgccggccagaacatggacctggagccatcgaataactagaagcaatgtcaacccatcaatcaatcactaatgtttacctagcggacaatggacgattctgagggcagctcatccaaaacaataaacaaacgaaattatatcaaattatcaagtgctgtgcgagtgcggagtgagaagtggatgctgattagcagggtggcgaggagcactcgtgattaattgaatttacccaactaaacacaaaaaacaaaccgtcgccaaggagatgcgtcatcgagtagtgaacacagccgataagccgaggggcactttattgttgcaaattgagtttagagcacaaagaatgtgcacctggtcggagaatttgattgtacgacacaaaatataattaatcgtatgcgtctcagccgtagcgtcctgtattgttgcaaatgtagttaaacaaaagtctttcaaattgatatcgagatggaaagccaacccgttcgcagctccgtttgcatttaatttgattggatgcccagtgccacagaatggataacttgttgtaactagcgttgaaattgatttggccttacttttagttatttattaatacgatactattatgattactattaagttttagccatcgaatgcgagccgagcgtttcaataaagagagtccaaaaacccaattgaaaaaaa

SEQ ID NO: 22224 - protein, 205 aa, DROSOPHILA
MQNNPSPQLPCKGILKTSRSFDKSGASFRKSAKFDELNVMQTFHPADKDYGHMKIDEPKTPYNYTEGFDENRDELDTELLVEKLRIAANTQPSTESIEDDGSSGDDQPLSEEERQRRREFERRRKAHYREFEAVKLARKLIQEEDDDDDDEDKGADSRPSGSSQGASSSGRFASSSTKRSSSQADSTTSPSTSAGQNMDLEPSNN

SEQ ID NO: 22225 - DNA, 5130 bp, DROSOPHILA
agtgcttaccagtttcgtcgcccagccgaggcggctctataacgatgaagtccaacttggcttccagcgccttgtccagctcagcctcgaatctttcatgggcattggagctgtcgtagacctcgcggatgacatggaaagtgggcaccttactcgtgctgcacaattagaacaacaatacacgaatcaatcatggttatcttgatgtggaactcaaggttaaggtcaagatcaagcgctcagaacaaccgaagcagagaagccattgtgcagacgagataaatgaagaagccgcctagtaaattgcataaccagggcaggtgcacttgggaactgggatttggctgcacccaggtggaatgtgttgcgtaatcccactgcattcacgtaactaggcgccgtatttacctttctatatttctgctaaccattttgctaataaatttgttgttttctatgttgttcataaactcagtgcggccgcagctggaccgttaaaatataccaggtacctaagggcataatactgcaaatagcaatcttccaaaaaaataccgcagttgggcggcacttttgaattatatcgtattcgcaaataccattctcctttaaagagcggcctatatataaaggcttaattccactatttagcaatttatttgcttatttacctatattcataaagacaattagattagattaaagtttttaaaaatatttcagtatttctattgttcttccaactactcaactctcccatctctatttacgataattgaggcatttaagaggcaaatcatgtaaaatctgtatacgattataggagcttaacttaattgaaatcaataattatactcccaataaagatcaaaaatataagatacatgtgttaaatgaattagccggctcttattgtcccaagcgaagaagccaggatttcgccggctgtccgatatggtcacactcgcccactcataagaaaagacacccaaaattgaaaatggaaaagcatcatcgcctgcccctcccggaattgcacgacgacaaacacagacacaaacagtgcaatggggagaacagcaatcgcttccggccgcccaagtacaagacgcgtggctacgtcgccgtggacaacaacaatctgaaccgaagccaatcgctgggctcctgtagcaccaacagttcccagatcgcgcacgcgatctccttccgggacgccggatgttcggattccagtacgctgccctcgtcaccagtccaggccgagctgagcaccctctccctgtcacacttcgagcagtgcttcgaaaggctggccaaactgggcgaaggatccttcggcgaggtattccaggtgcgcgatcgctccgacggccagttatatgccgtcaagatctccaagcaactgttccgcggcgaacagtaccgcgcagagcggctggaagaggtgcggcgctacgaggagttctccggccatgagaactgcatccggttcatccgcgcctgggagcagtacgaccgactgtacatgcaaatggagctgtgccgcgaaagtctggagcagtacttgctgcgctgccaaaggataccggaggagcgcatctggcacatcctgctggatctgctgcggggtctcaagtcgctgcacgaccggaatctcatccatctggacattaaactggacaacgttctgatcggcgaggacgacgagacgtgcaagctggcagactttggactggtcatcgatgtggacagggccaacagccatcacgccacggagggagattcgaggtatatggctccagagatcctgcagggtcacttctccaaggctgcggacatcttcagtctgggcattgccatgctagagctggcatgctacatggatcttccttccaacggcccactgtggcacgaactgaggcacggcattctgcccgaggagttcataaacagtgagttgcgaactagctgcctacttaaatggcaggttgctaaagcctttctcttcgcacagaaatatcactggagctgcagtcggtaattaagtccatgatgaagcccgatcctgcgcagaggccgacggccgagcagctactctcacatcccaagctgcagtacctgcaaaagaagcgcaagtcgctgatgaacttcagcatgctggtaagcattcccaagcacatctttgagaatcaatcttaacccttgacaacttgcagtcgcgtagttttaggcgatctcgccgcgccgtttggggaagaatgtgcaattggaaaacagccgcctttcgttaccttctatacttcctggaggtcctgcatctatgcaagcccataacggcctcacagcccaatattaacatagtgccctcctcgccttcgtcaaagggagtgcctctggtgcctcaggtggagttccagctggtaggatccacacccattgccaatcgtgactgctatgcctccgacttcctttccggcgaggacccgctggacctctccaatcagggtagccccaacgtaataaattccacgccattgaacacaaaccaaggcaaatcccgtctggatttgctaaagaataagtaagtacccttaatcgattagctcatggactagcgcacataacccatccgctttcagtgttgattcaatgggcaggtacgttcatgtacacgatttcgagagtccgtgttccgccctatcttccgccaaggtcctggacacctcatcgttccgacgcaaaaagctcttcgtcctggaatatgacgacgagtgagtgagtacggtgccagcgagcaacgtaaaccgaatgaatttatgataaacccaatatatatcagttacgaaacgaataccagatacatatggcaacagaatatatcgttaattgtattttgattagttctagaccgtagtgttgtacgaagttccctagatatagtcttacgattgtgtaatgttaatgcttctttagaagaacttgttgaacttgaacatataatcatgtgatatatatacgaaaagcgatttgaaaagtttaaaaataaaaaacttattgaaattgaaacctgcactgaatgccatctatgacatatgataacaacaaattaaaggtaaaaaccaagaaacgtataactataaaaattttttttaaaacatttttgaattctaacgtacctttcgtttcggggaaaagtattttgcccatctggtaacactggccgctcgcacatgttgaaaacgtaaacaaaaacgagtagcacaatttttgaaaatgaccaggaaaaaggctcctaagaaaaaaacagaggttgtattcgacaacaagaaacgcatgtaagtaaggagacacagaatccccggaggatactaatgcccacatcccaatcccgcagagagtttctcagtggcttccggaaaagaaagaatgagcgacgatcgcgtgcaaaggcggatctggaaagaaaccttaagaacgagcgcaagcgcatacggcaggaggtaaaggatggctttaaccacctgaagaaatccttcgaaccgctgcgcgagctcaccgaggaggacaaggccgaggaggcggagcagcagcaggaggagacctacgaagatgatgaagtgcaggtgaagatcgtggagctgaccaccaacgatctggccgccaagcgcaatatgttgggtgccaacacggcagaggaaagcgaaccggaggagcaggctgaccagagcgaggaggacgaagccgaccaggccaataggatacccggcatggatttcgatcccaacgcccgcaaacgtaaacccaagccggaggacgaagaggagccgaaggccacaaagtccaacaactccacgctgccggacatcaagagcaaaaaggatctcgaccgcctgatgaagaccaaaacgctgaagaaaatgcaccagagcaaactgttcaagcagaaggagcgcctggacaagaagaacaaccagaagaaggccaagcgggaccgcaacaacaccatcaagagcgttcccaagcatcagcgcaagcagctcaagtacggaaaggccaaccagaccaaataccgaaagggtcggatggtcaacaaaaaggagctgcggcgcaaacggaatgccgactaaatttagcttttagcatagtttgttttacggtttatttactattactctagttaatcaaataaactgtataattcctggcttgtacaataattttgctaacacgccgatgcgttcgatctttttttttaccgctctccgtcgtattcatcatggtacatattacatccaacatactttattttttttgggttattaacattggcaatatcgctgctcgccgccgttcggttatgctctataaataaaaggggggcgccgctaaaattataataaaattttcatgggtcctaaatctagtctcgaaatctatgtacaaagtttgcttgcatgctggttaggcataggttcttaacgtattattgggttgctttatttccattctgcgcagttgtgcagcctgtttagtgtttgcctttacggggttaacattttttaaaaatgaaacattagagcggtaaccttgttgtctgattattggcgtcattaaagcggtatcgccagcacgcgattgatgcaaggataccgattcaatgaaataaaaacgaattcagccaaacacaatctttcatttctttttttttatcgtacttaatgatagccttagtttctaatgggactgtgtgcttcggtgaaggttggggatgattttgggaggcaacaattatgttctagcttatagcttacagtcctacgcctactcctatttctaatatgttcatcatcagcagttaaaaaacgtttacaaaactcatgcgaaattgaaatccaataacaaatgcacacgccgcagtcgcatcggcgtcatctctttctcctgaccctcgcctatccgcatccagttaggtttgctgctgctgctgcgccgacggttgtcgccgactgaagccaccgccggcggacagatgtcgttgcagggctcgctgctgctggaacttggcgctgcctggtcctccgaagcggttgaacttgaacttgttgcgctgctggaagttctggcgat

SEQ ID NO: 22226 - DNA, 2385 bp, DROSOPHILA
atggaaaagcatcatcgcctgcccctcccggaattgcacgacgacaaacacagacacaaacagtgcaatggggagaacagcaatcgcttccggccgcccaagtacaagacgcgtggctacgtcgccgtggacaacaacaatctgaaccgaagccaatcgctgggctcctgtagcaccaacagttcccagatcgcgcacgcgatctccttccgggacgccggatgttcggattccagtacgctgccctcgtcaccagtccaggccgagctgagcaccctctccctgtcacacttcgagcagtgcttcgaaaggctggccaaactgggcgaaggatccttcggcgaggtattccaggtgcgcgatcgctccgacggccagttatatgccgtcaagatctccaagcaactgttccgcggcgaacagtaccgcgcagagcggctggaagaggtgcggcgctacgaggagttctccggccatgagaactgcatccggttcatccgcgcctgggagcagtacgaccgactgtacatgcaaatggagctgtgccgcgaaagtctggagcagtacttgctgcgctgccaaaggataccggaggagcgcatctggcacatcctgctggatctgctgcggggtctcaagtcgctgcacgaccggaatctcatccatctggacattaaactggacaacgttctgatcggcgaggacgacgagacgtgcaagctggcagactttggactggtcatcgatgtggacagggccaacagccatcacgccacggagggagattcgaggtatatggctccagagatcctgcagggtcacttctccaaggctgcggacatcttcagtctgggcattgccatgctagagctggcatgctacatggatcttccttccaacggcccactgtggcacgaactgaggcacggcattctgcccgaggagttcataaacaaaatatcactggagctgcagtcggtaattaagtccatgatgaagcccgatcctgcgcagaggccgacggccgagcagctactctcacatcccaagctgcagtacctgcaaaagaagcgcaagtcgctgatgaacttcagcatgctgtcgcgtagttttaggcgatctcgccgcgccgtttggggaagaatgtgcaattggaaaacagccgcctttcgttaccttctatacttcctggaggtcctgcatctatgcaagcccataacggcctcacagcccaatattaacatagtgccctcctcgccttcgtcaaagggagtgcctctggtgcctcaggtggagttccagctggtaggatccacacccattgccaatcgtgactgctatgcctccgacttcctttccggcgaggacccgctggacctctccaatcagggtagccccaacgtaataaattccacgccattgaacacaaaccaaggcaaatcccgtctggatttgctaaagaataatgttgattcaatgggcaggtacgttcatgtacacgatttcgagagtccgtgttccgccctatcttccgccaaggtcctggacacctcatcgttccgacgcaaaaagctcttcgtcctggaatatgacgacgagaaaaaggctcctaagaaaaaaacagaggttgtattcgacaacaagaaacgcatagagtttctcagtggcttccggaaaagaaagaatgagcgacgatcgcgtgcaaaggcggatctggaaagaaaccttaagaacgagcgcaagcgcatacggcaggaggtaaaggatggctttaaccacctgaagaaatccttcgaaccgctgcgcgagctcaccgaggaggacaaggccgaggaggcggagcagcagcaggaggagacctacgaagatgatgaagtgcaggtgaagatcgtggagctgaccaccaacgatctggccgccaagcgcaatatgttgggtgccaacacggcagaggaaagcgaaccggaggagcaggctgaccagagcgaggaggacgaagccgaccaggccaataggatacccggcatggatttcgatcccaacgcccgcaaacgtaaacccaagccggaggacgaagaggagccgaaggccacaaagtccaacaactccacgctgccggacatcaagagcaaaaaggatctcgaccgcctgatgaagaccaaaacgctgaagaaaatgcaccagagcaaactgttcaagcagaaggagcgcctggacaagaagaacaaccagaagaaggccaagcgggaccgcaacaacaccatcaagagcgttcccaagcatcagcgcaagcagctcaagtacggaaaggccaaccagaccaaataccgaaagggtcggatggtcaacaaaaaggagctgcggcgcaaacggaatgccgactaa

SEQ ID NO: 22227 - protein, 794 aa, DROSOPHILA
MEKHHRLPLPELHDDKHRHKQCNGENSNRFRPPKYKTRGYVAVDNNNLNRSQSLGSCSTNSSQIAHAISFRDAGCSDSSTLPSSPVQAELSTLSLSHFEQCFERLAKLGEGSFGEVFQVRDRSDGQLYAVKISKQLFRGEQYRAERLEEVRRYEEFSGHENCIRFIRAWEQYDRLYMQMELCRESLEQYLLRCQRIPEERIWHILLDLLRGLKSLHDRNLIHLDIKLDNVLIGEDDETCKLADFGLVIDVDRANSHHATEGDSRYMAPEILQGHFSKAADIFSLGIAMLELACYMDLPSNGPLWHELRHGILPEEFINKISLELQSVIKSMMKPDPAQRPTAEQLLSHPKLQYLQKKRKSLMNFSMLSRSFRRSRRAVWGRMCNWKTAAFRYLLYFLEVLHLCKPITASQPNINIVPSSPSSKGVPLVPQVEFQLVGSTPIANRDCYASDFLSGEDPLDLSNQGSPNVINSTPLNTNQGKSRLDLLKNNVDSMGRYVHVHDFESPCSALSSAKVLDTSSFRRKKLFVLEYDDEKKAPKKKTEVVFDNKKRIEFLSGFRKRKNERRSRAKADLERNLKNERKRIRQEVKDGFNHLKKSFEPLRELTEEDKAEEAEQQQEETYEDDEVQVKIVELTTNDLAAKRNMLGANTAEESEPEEQADQSEEDEADQANRIPGMDFDPNARKRKPKPEDEEEPKATKSNNSTLPDIKSKKDLDRLMKTKTLKKMHQSKLFKQKERLDKKNNQKKAKRDRNNTIKSVPKHQRKQLKYGKANQTKYRKGRMVNKKELRRKRNAD

SEQ ID NO: 22228 - DNA, 3624 bp, DROSOPHILA
cattggccacgatgtgattttgcaggctgccgttggtgtcctcgccgctcttggcctggtcagtcgacgagccggcggaggagttgccgccaagggattcgcgcagcgctgcgttgacgacattcgccgtttcgcatacggccatcgaaacgggcatggcgatgctccggctggggatttgcggtggaattttgaacgggtgtgaggggcgtggtgtggcgtgtgttggtggttttcgccacccagttagctaatgcacatgggcgtgcgatccaaagcagatactagagatccttctgcacagcccacacgtccttcaaaactctcctactgctctacgctcacttttctcctcgcccctctctcgaacacttcttgtttcacacaccgactgcgacaccgacacacgcacactaacgcactcgggagcactcttctttttctggctttttcgcgctgcgatctcgatctgttggcctactgagcattacgattaagaaacgttcgctcacaaattgatctgtttcaatttcgtgcgcggccaggcattttagaacgaaaagtctgctttcgaaaataatggcaattccttccctcgtgtttcttccgactgcggattctcttttcgcttcattttcgtcatttggggatgccaactcgcgagtggccaagtgacgcgataggcctctcgaaatgtcctaaagcatttcacgatatttacaaaaatgtatttcgatgttttcttaacaataaaaaattggtttaaatttaataagacatttgttaccttgaatatgtaagcaatatcttattgaaaggcttgcagcgacattttttatttatgcctactattcaagttataaatttaatttttataacggtatttttacaccttatcagcacatatcgataagtgtgattgggaacgacaacccatcggcacaatgttgatgcaattgttgagctagccttcataattagtcgcaatcaatcgagcagaatggcttcatccacaggtctcctggtggtgtccaacatcaagcaccttggcaaatccctgcgagccatcgagaagtacgtgaattcactgtacatccacctaaatgtggcggggtcaacgtccacgacgtcaccagttccaccgcctccggtttggggtcgtctaatctcgcagctgtacgccaacagcagcagctatgtgggcaagcagttggaccttcgcgtccttgtctctcccctacgaccaggtgccaatggatccctgaagttgcgccagcccgtcgacctaatcttctcggatgcacatcatccggagctgtgcgacaggcttcgcgcggatcttaacatcagcaagccaacaatcttcctggatgactcggtcatctcggatttaagtgcccagcaggatgacacccagccgcctaaggtgtatccctcggttgtcctgggcggaacattcgatcgcatccatctgggacacaagatattcctcacccaggctgtactgcgcacctgcaagcgtttggttgtgggcgtaaccacctccgccatgacgaagggtaagacgggcatgaattggcaaaataaaacgcttatcttaacgaccattcttatcgctgtctgcaggaaagacgctgccggacttgattttgcccgtggaagagcgcatcgcccggctaagggagttcctggtggacatagatgatacgctgcagtacgaaattgtgcccatcgatgatccctttggtcccacgcaagtggatcctgacctggacatgattgtggtcagtgcggagacgttgcgaggagggcagaaggtcaacgaggtacgctccgctaagcaactgcgcgagctggagatctttgtgattgacattgttgaaagcaacgtgcatgatggcatccacgagaccaaggtcagctcgagtaacacacgcatcgatctgctgggaacccgctggagaaggccggagccacgaccacagctcccgccgcgcccttacattattggactcactggcggcatcgcatctggcaagagcaagatgggcgagagattggccaacatgggcgcccacgtgatcgactgcgataaggtggcgcacgatgtttacgaacctggtcagttgtgctacacccgaattgtgcagcacttcggacagggtattgtttcagacgatggtcgcatcgatcggtccaagctgggacccttggtgtttgccgatcccaagcagttgcaagcactcaacggcattgtctggccggaacttattgcggaggttaacaggcggctggatgcactgcgttcccaggcggacgtgccgcgtgtggtggtcctggaggcagcggtgctgctgcgagcgggctgggagaccaattgccatgaggtgtggtccatgattgtgccaccggatgaggctgtgcggcggattattgagcgcaacaagttgagcgaagtggaggcccaaaagcgactggccagtcaggtgcccaattctgagatcgtggccaagtcgcatgtgatattcagttcgcaatgggatcacgaattcacccagaaacaggcggagcgtgcgtggaaaatgcttaccaaggaactggactcttaccagagcagcctttaacccgatggatatttagattatcttgttgatccttattttgtatgattttttatgcatttgttgtatattgtttagttgtaagtccaaagttgaaaagaaatgctgggacgtcattggggaaaaacgctgaaaatttcaatggaaccttagtggctctcgcccttcttgccagccactcgcttgaagtcgttcatcttggtggtcatgatgggggaaccgatgaagccgatataatcaatctgcgtcacatcgccacctgactgattgttcttcacgaagatttggatgttttgcacattctggaacttgacgtagcgcagattcacgggcactccactctccagctccttctgagccaggctgcaaaatggattgaacagtgagaagagctaagcagccatagagaaggcaatagctaccttagatcctgcacactgttcatggactcggccatgtcaaagtcaatcgtgcggggctggttaatgaacagcttcacatccttgggacccaggtgcgaaggtgccttgaacttcaaagagtggatcttcacagcctgattaaaggtgatggacaggatgagctgctcatcgcaatcggactgcaggtagccaccggcggaggccagggcgtgctttaagttgtggtcatcagcttcgttgaggcactcgcactcctgcttcgaaataaatgtattcagttccatctgtaagaaggattagggattatttttggaacatttccaaatactgcactatattaccaatccctgcccgtaatcctcgcccccctcctcgccaccggatgtaccgatgtgctcctggatcttggcctcgagcccattgacgtccgcaccctggacgcgatcgatcttggtcctgttcctgtagaagatgaatgttggcatggccgaaacgccctgtccagcagccgtgtcctggcacttgtccacatccactttcaggaagatggcctttgggtactttgttggaaacgtctcgaa

SEQ ID NO: 22229 - DNA, 1557 bp, DROSOPHILA
atggcttcatccacaggtctcctggtggtgtccaacatcaagcaccttggcaaatccctgcgagccatcgagaagtacgtgaattcactgtacatccacctaaatgtggcggggtcaacgtccacgacgtcaccagttccaccgcctccggtttggggtcgtctaatctcgcagctgtacgccaacagcagcagctatgtgggcaagcagttggaccttcgcgtccttgtctctcccctacgaccaggtgccaatggatccctgaagttgcgccagcccgtcgacctaatcttctcggatgcacatcatccggagctgtgcgacaggcttcgcgcggatcttaacatcagcaagccaacaatcttcctggatgactcggtcatctcggatttaagtgcccagcaggatgacacccagccgcctaaggtgtatccctcggttgtcctgggcggaacattcgatcgcatccatctgggacacaagatattcctcacccaggctgtactgcgcacctgcaagcgtttggttgtgggcgtaaccacctccgccatgacgaagggaaagacgctgccggacttgattttgcccgtggaagagcgcatcgcccggctaagggagttcctggtggacatagatgatacgctgcagtacgaaattgtgcccatcgatgatccctttggtcccacgcaagtggatcctgacctggacatgattgtggtcagtgcggagacgttgcgaggagggcagaaggtcaacgaggtacgctccgctaagcaactgcgcgagctggagatctttgtgattgacattgttgaaagcaacgtgcatgatggcatccacgagaccaaggtcagctcgagtaacacacgcatcgatctgctgggaacccgctggagaaggccggagccacgaccacagctcccgccgcgcccttacattattggactcactggcggcatcgcatctggcaagagcaagatgggcgagagattggccaacatgggcgcccacgtgatcgactgcgataaggtggcgcacgatgtttacgaacctggtcagttgtgctacacccgaattgtgcagcacttcggacagggtattgtttcagacgatggtcgcatcgatcggtccaagctgggacccttggtgtttgccgatcccaagcagttgcaagcactcaacggcattgtctggccggaacttattgcggaggttaacaggcggctggatgcactgcgttcccaggcggacgtgccgcgtgtggtggtcctggaggcagcggtgctgctgcgagcgggctgggagaccaattgccatgaggtgtggtccatgattgtgccaccggatgaggctgtgcggcggattattgagcgcaacaagttgagcgaagtggaggcccaaaagcgactggccagtcaggtgcccaattctgagatcgtggccaagtcgcatgtgatattcagttcgcaatgggatcacgaattcacccagaaacaggcggagcgtgcgtggaaaatgcttaccaaggaactggactcttaccagagcagcctttaa

SEQ ID NO: 22230 - protein, 518 aa, DROSOPHILA
MASSTGLLVVSNIKHLGKSLRAIEKYVNSLYIHLNVAGSTSTTSPVPPPPVWGRLISQLYANSSSYVGKQLDLRVLVSPLRPGANGSLKLRQPVDLIFSDAHHPELCDRLRADLNISKPTIFLDDSVISDLSAQQDDTQPPKVYPSVVLGGTFDRIHLGHKIFLTQAVLRTCKRLVVGVTTSAMTKGKTLPDLILPVEERIARLREFLVDIDDTLQYEIVPIDDPFGPTQVDPDLDMIVVSAETLRGGQKVNEVRSAKQLRELEIFVIDIVESNVHDGIHETKVSSSNTRIDLLGTRWRRPEPRPQLPPRPYIIGLTGGIASGKSKMGERLANMGAHVIDCDKVAHDVYEPGQLCYTRIVQHFGQGIVSDDGRIDRSKLGPLVFADPKQLQALNGIVWPELIAEVNRRLDALRSQADVPRVVVLEAAVLLRAGWETNCHEVWSMIVPPDEAVRRIIERNKLSEVEAQKRLASQVPNSEIVAKSHVIFSSQWDHEFTQKQAERAWKMLTKELDSYQSSL

SEQ ID NO: 22231 - DNA, 3613 bp, DROSOPHILA
cggaggacttggtgaggaatacttctctaatgctggtcaaccagcacttttcgctcagtgggccaaagcctttgcccccaaacgtcatcgaagtgggtggtgtacatataagtccaccgaaaccgctgccctcggatcttcagaaaatactggataacgcacccaaaggagtcatcctaattagctggggctctcagctgaaagcgtgttctctttccgctgctcggagagatggaatcgttaaagcgattggaagattggagcaggaggtcatctggaagtatgaaaatgacacgctgcccaataagccaccaaatctgcacatcaggaagtggctgcctcagcgagacatcctcgctcatccaaatctaaaggtatttatgtcccacggtggcttaatgggcaccacggaggcggtctccagtgctgtgccgattgtgggtgtcccaatttacggcgaccaatccctcaatattgccgcattggtgcagcgcggaatggccttgcaattagagcttaagaaactggatgagaatactgtctacgaagcgttgaccaaggcactagatccttctttcaaggcaagagccaaggaggtggcctcatcgtacaacaaccgcatccaaggtcccttggagacggccatttggtgggtggaacatgtggcggagacgaaaggagctcctctgacccaaccaagtgccgtgcatctctcccgctttgtttactactccttggatgtctactcggtcgtggccctaagcctgctactacctgtgatcacgctcttgggactaatccgaatgtttaaaagaagggaacccaaaggtgaccgcaaactaaaacgcaaataagcccaatcaatagattactgttttggttttcaagaattacctttggatttaaactatgaaacaatagattgctaagtcaaatacgtgtgatacattattagaaaccaaaatacattttaccagaacagaattggcaagaaccagtttaagttttatataaagcagttcccgtttaataaaaatatttacaaaatcaagatcccatcccttacaatttggccttggccgcacccgggaaacccagacgatacaaggcaaccacaacagcaccacccagtcccagattgtgctgcagagccaactgagcattgggcacctggcgcttctcagccaatccacggagctgccagcagagctcagcacattgtgccagacccgtggcgcccagaggatggcccttcgagatcagaccaccactggggttgaccacgaacttgccaccgtaggtgttgtctccagcgtcgatgaactcgccggccttgccctctccacacagtccaagtgcctcatacgtgatcaactcgttggccgagaagcaatcgtgcagttccaccacctggacatcctggggcttgtacccactcttggcgaacagacgctcggtggccagacgggtcatatcggttccagcaatcttcatcaagctcttgtcggcaaaggtggacgccgggtcactggccatctccatgcccacaatctccacagcctgcttttccaatccgtggcgacgcacgaaggcctcggaggcgagaatggcagctccagatccatcggaagtgggacagcactgcagcttggtcagcactccctccacaacctggggcgacttcataatctgctccagggtgtattcatcgcggaactgcgagtagctaaaagaaacaatggagagaaatgaagtggcgtgaatgaggatcagctgcatgcaataccgagtggttgacggtctacggtctacttatttctctgttttcagcgataagataagcacacgcgtaaggtgaactttcgactaaacttacggattattgacggagtgcttgtggttcttccaagcgatcttgccgaaatgctcgggcttagtgccatacttcttcatgtgctccttgccggcgttgccgaagatctgggcagccattggaccagccccgatctcgggtcagctcactcatctcggtgatgtggcgctccatgggatttgcgcgatcaaagtactattagaagagcaaataatggatcagtaattggattttttagaagtggactcgtgtacctttgcggacaatgatccacgctccatcttttcgaatcccagagccaggacgcattcggagtttccgctctctacgatctgcttggccaaatacagtgcgctggatcccgtggagcagttgttgttcacgttatagaccggaatgccggtcattccgacctcgtagatggcccgctgtccgcaggtggagtctccataaacgtagccggccaccgcctgctgcacttcctcgaacttgattcccgcatcctggagagctttggtgatggcttctttggcgaagtccgggtagcaagcatcagctcggcgaccgggcttctcaaactgcaggaaattggaaggagatggtcggatagatattaacacccaaggcggcacaaaggtcaatcattcgcagacgaaccttggtcatgccaactccgataacgtaaactctggtcttggtcatttttcggctgttggttctttgcgggatcacggattggactttctgtatcgactgaagtggatcaacaggttgcggacttatatacgatagatatgataaggctagatctgtcggttcagcttgtttcccgttaaatttgttgttcaccttctatgcagttcataaatatgcatctgtaaacgagaaacgtgcatacaacataagcatttggtgggaatctctatcttttagaaagtctaataataatgtaataatgcttataagagcactttccttgtttgtttataagtttaaaagcgctaaatatgacagcactatcaacagggctaccagctatgatacaccgctttgatatttttcaatgcctccaaaactgtggactcaaataagaggccatgagcgttgcaaaaaataactcatttaatggtcgaatttttccattgacttggtttttatggctatttcaatttcttatagatatttatttgtataaaaaaaataaactgcattcactttattcagggctgcacatatgtacgcagggcgcgtacttgaatattcgcttccctaaattttttgttatggcaatgtggtcaccctgtggaaatcggtatcgatagcccgataggttcagtcgtatgaaggcttaagcctcctaatatcgccaacaatcgccattcattttaacatttagttaattgctcttgagcactagttgtggtattacctgttttactcgcgatcctgtagctgcaaaatgtcgaagacccgtgtgtacgttgtcggtgtgggcatgaccaaggtgtgtgttccacgaattagccatctgagaggataaacataaacaaaaccaagacaaagaattcaaagagcagctttggtaacttgcaattagctttaatattgagcaatcttaagcgattgccggactttgaactgcgctgcacttcgtacgctaatctgctctcgaatgattttgtccccatgctattatcataaatataattattataacgactatcagaatcagtcctttgc

SEQ ID NO: 22232 - DNA, 1237 bp, DROSOPHILA
tccaatccgtgatcccgcaaagaaccaacagccgaaaaatgaccaagaccagagtttacgttatcggagttggcatgaccaagtttgagaagcccggtcgccgagctgatgcttgctacccggacttcgccaaagaagccatcaccaaagctctccaggatgcgggaatcaagttcgaggaagtgcagcaggcggtggccggctacgtttatggagactccacctgcggacagcgggccatctacgaggtcggaatgaccggcattccggtctataacgtgaacaacaactgctccacgggatccagcgcactgtatttggccaagcagatcgtagagagcggaaactccgaatgcgtcctggctctgggattcgaaaagatggagcgtggatcattgtccgcaaagatcttcggcaacgccggcaaggagcacatgaagaagtatggcactaagcccgagcatttcggcaagatcgcttggaagaaccacaagcactccgtcaataatccctactcgcagttccgcgatgaatacaccctggagcagattatgaagtcgccccaggttgtggagggagtgctgaccaagctgcagtgctgtcccacttccgatggatctggagctgccattctcgcctccgaggccttcgtgcgtcgccacggattggaaaagcaggctgtggagattgtgggcatggagatggccagtgacccggcgtccacctttgccgacaagagcttgatgaagattgctggaaccgatatgacccgtctggccaccgagcgtctgttcgccaagagtgggtacaagccccaggatgtccaggtggtggaactgcacgattgcttctcggccaacgagttgatcacgtatgaggcacttggactgtgtggagagggcaaggccggcgagttcatcgacgctggagacaacacctacggtggcaagttcgtggtcaaccccagtggtggtctgatctcgaagggccatcctctgggcgccacgggtctggcacaatgtgctgagctctgctggcagctccgtggattggctgagaagcgccaggtgcccaatgctcagttggctctgcagcacaatctgggactgggtggtgctgttgtggttgccttgtatcgtctgggtttcccgggtgcggccaaggccaaattgtaagggatgggatcttgattttgtaaatatttttattaaacgggaactgctttatataaaactta

SEQ ID NO: 22233 - protein, 378 aa, DROSOPHILA
MTKTRVYVIGVGMTKFEKPGRRADACYPDFAKEAITKALQDAGIKFEEVQQAVAGYVYGDSTCGQRAIYEVGMTGIPVYNVNNNCSTGSSALYLAKQIVESGNSECVLALGFEKMERGSLSAKIFGNAGKEHMKKYGTKPEHFGKIAWKNHKHSVNNPYSQFRDEYTLEQIMKSPQVVEGVLTKLQCCPTSDGSGAAILASEAFVRRHGLEKQAVEIVGMEMASDPASTFADKSLMKIAGTDMTRLATERLFAKSGYKPQDVQVVELHDCFSANELITYEALGLCGEGKAGEFIDAGDNTYGGKFVVNPSGGLISKGHPLGATGLAQCAELCWQLRGLAEKRQVPNAQLALQHNLGLGGAVVVALYRLGFPGAAKAKL

SEQ ID NO: 22234 - DNA, 5018 bp, DROSOPHILA
aagaaggattagggattatttttggaacatttccaaatactgcactatattaccaatccctgcccgtaatcctcgcccccctcctcgccaccggatgtaccgatgtgctcctggatcttggcctcgagcccattgacgtccgcaccctggacgcgatcgatcttggtcctgttcctgtagaagatgaatgttggcatggccgaaacgccctgtccagcagccgtgtcctggcacttgtccacatccactttcaggaagatggcctttgggtactttgttggaaacgtctcgaagatgggcgcaatccgcttgcagggaccacaccacgaagctgtgaagtccaccacaaccaattgaatgcccgcttgggccaactccgcctggaagtgggactcgtcgttgatcacgcgcacggacatggtgataggattaggtttctattaattgagcttttgtttcggcagccgaattggatttaagcaagtaaatgttattattaacgttcaatgcaaattttttttgttaaagatgacttgtaatatgcatttagtccaaattcgtgctaagaaaaataccgaatgcggtattccacaagcggtcacactgtgatggtatcgatatttcgagctctttgacttcctatttttagagggaccatttatgtgtaatagaaaaaaaccgaaacttaatatttaaacttttattgaaatattagtggattacaatatgtaaaactatgaaatattctcatttgatatagctcaaagtgttatttaaaattcattcagtgtttacgactagcaatctacgctttcacgctcatcttaagcttaccgcccatttgccagggttgtcaaggcgaatgagcggtcccaccatacacgccactggaactttcgatacctgcgctgcgcctggccacacgttcattacctcgtggtgtttcagtcggtcgcattttcattaagtcgccattttaaaattattagagtcaagtacaatggcagatgtggaaaaggagcccgagaagaccatcgccgaggatttggtggtgaccaagtataagttggccggcgaaatcgtcaacagtgagtattccttggccggaaacagcgaacgctggccgattcctggagtcgctgctacgtggcgcttacacaatgcaccgaatgccgctttcccttgtgcgccacgcgttggttaatctgcctatttctggactctgtctgctcgtttaattttagaaaccctcaaggcggtaattggactctgcgtggttgatgcctccgtccgggagatctgcacccagggcgacaatcagctcaccgaggagaccggcaaagtaagtggtggccacctggcggtcattcgcgccaatttcatgtccaatgattaagacttacacctttgagggtttcccgatggcgagccatgtgctgtgcgggctggggatcacctcgtggtcgccaggcgcacgcggggactccaatgctccacgtgcccggcttgtgtgctctccaaaaggtcccgaggatttacagattatgagatctgaggacacaccgcgcactatcattgatatatagtacaacgaacaagcaatctaatgcttttatcgatctttcacaaacaggtatacaaaaaggagaaagacctgaagaagggcattgcctttcccacctgtctgtccgtcaacaactgtgtctgccacttctcgccagccaaaaacgatgctgactacacgttaaaggccggtgatgtggtcaaaatgtaagttgaacctcctattccacatataccgccactaaatacgtaacatttcttttctacagcgatctgggtgcccacattgatggtttcattgccgtggccgctcacacaattgtggtaggcgctgctgcggatcagaagatcagtggtcgccaggccgatgtcatcctcgccgcctactgggctgtccaggctgccttacgtctgctcaagtccggcgccaatgtgagtcctcccttacttctaggtaatcctccgttaatccctgcaagaaacggattgtctgccgcgattctccagcgactgaacatctcaacacttgcaaagatcagctgtggcagctggtaattgccctggcctattattcaggactggaggcttcttgtcagttgtccacaaggttatttcttctgcaggcaacggattgactgcgctcaaactctgacacagatcagctcaacacctgcggatagaaactgtgtcaatttcgtgaactgaacaagttcattccatagaagtgttcggtctttaaatttgtccacatctccagtttatagatatgtcggaattgtaatctgcaggcaacggattgtctgctgccttaactcgtggctcagcacagctcaacgtctgcagagatcaacagtgtcgatttcgtgaactgaacaagtttagatacttgaaatgttcggtctttaaagttgtccacaatcgcaatgataatgccgatcagttattgttattttgcgttatctatagtatactatgatatttgattaagattagtcaaagggaattggaatgttttctttatctctgctttgaactatttccattttatttcatacttaatatttatgtttcaattctgtatccttacagaactactccctcaccgatgcagtgcaacaaatcagcgagtcgtataagtgcaagcccattgagggcatgctcagtcacgagctgaagcagttcaaaattgacggcgagaagacgatcatacagaaccccagcgaggcgcagcgcaaggagcatgagaagtgcaccttcgaaacgtacgaggtgtatgccatcgatgttatcgtcagtaccggcgaaggagtggttagtaatccatcaatagacactacatctccactaatttgttcgatgattaaaaacacgcgcttgaggctgactttgctggaatgcggtgtttgttgcgagagtgacttgtttgctcggcgtttttttatactaaaatgcggcacgtgcagacaccaagttccggctggctgttgtccgaagattgcaagattatgagatctgagaacgccaaatttaagctggatcctggatcatcgcagccagagcattattgctaacattattcgtattcgttgcagggacgcgaaaaggacaccaaggtctcaatttacaagaagtctgaggagaactacatgctcaagatgaaggcgtcccgtgctctgctggcagaggtgaaaaccaagtacggaaacatgccattcaacatccgcagcttcgaggaggagaccaaggcccgcatgggagttgttgagtgcgtcggccacaagatgattgagcccttccaagtgctgtacgagaagccatgtaagtgtgatgcatattattattaatcctattccctattatgcgagttggcagaacttaattccggacctggtacaccttcgggtgctaagtgcggccagacattttgccagaacaaattccaggcattgtcgtcttcagcagttgcctcagtgtggcctctgtctgaacatggcactgtcacaatcgtatccaatctattaacctgttttcttatacttattaaagttaatttagagactaaactagtttgagcaacctttataaagttcgaattttagccggaagtaatagcaaagttaaacaatccttttccttatcttgcattacagccgagattgtggcgcagtttaagcacacggttctgctcatgcctaacggcgtcaacttggtcaccggcatcccattcgaggcggagaactatgtgagcgagtacagtgttgcgcaggaggagctcaaggtaagctgcaacaatttccttgtattcacgatgcgtactcaatgaaatctcaactttttgcagactctgctcgcgcagcctttgggtcctgtgaagggcaagggtaagggcaagaaggcaacagctggggcggcgacaaaggtggaaacggcgccggccgtggagaccaaggcatagaccagcccgctgatgatgatccgcaccgccaagccatcaacggaaacacaatgtgaacaattgcgctgcccaacgctgcgctccacagatttttactatcgaattcgttgcgtattagaggacccttttgacaacagaacaggacagaagagaagacggcaacaatttgaggatacatttccccagaaatcctccatccatcaacaaggcgggcggtcggtcggtcccgcgccaactttacctctttatttcctttactataagctgccttcgtttatcggtctgttcaacatcatcgcaacgaaaaagcaaagcaagaactgtcatcaaattgtaacaattttaacgctaaatgatcttaaaatataattcaagtgaaacgttattaacgctgcgtagtaggtattaaataaaattaacattttctataaaacagccgataaatgccaaacgatttttcatttatttactttccgctggcgcccaattttaattcgatttcgatacgcttctcattctaataaatgcacttgcgagttgtgtttattttatacgtttaatttagttttgatgttcacattcacattatacaatttgtaatttagatttcttgccttttgttattttaaattttacagtctcatctttgaactcttgtattacgaaagttgcaagaataacttcgttatgttaaacgtcacttagtgctgtgctcacttggccaccccagttgtccatcccagatccaatcccaacaagaccagaccaattcgatgccgtatacggcgactttgcccaactcgctgacctcttcccttgcgtcaaacaaaataaagaacaacaaaaaacgcaattgctgcggatgaagtatagaaaacacgagcagcacttgcagacgacaaagatatgtggccggtgatcaaaagaggatctgggatttaatggtctgccgtcgcttacatacatggtttggtgtactttttttttttttgttatgatc

SEQ ID NO: 22235 - DNA, 1176 bp, DROSOPHILA
atggcagatgtggaaaaggagcccgagaagaccatcgccgaggatttggtggtgaccaagtataagttggccggcgaaatcgtcaacaaaaccctcaaggcggtaattggactctgcgtggttgatgcctccgtccgggagatctgcacccagggcgacaatcagctcaccgaggagaccggcaaagtatacaaaaaggagaaagacctgaagaagggcattgcctttcccacctgtctgtccgtcaacaactgtgtctgccacttctcgccagccaaaaacgatgctgactacacgttaaaggccggtgatgtggtcaaaatcgatctgggtgcccacattgatggtttcattgccgtggccgctcacacaattgtggtaggcgctgctgcggatcagaagatcagtggtcgccaggccgatgtcatcctcgccgcctactgggctgtccaggctgccttacgtctgctcaagtccggcgccaataactactccctcaccgatgcagtgcaacaaatcagcgagtcgtataagtgcaagcccattgagggcatgctcagtcacgagctgaagcagttcaaaattgacggcgagaagacgatcatacagaaccccagcgaggcgcagcgcaaggagcatgagaagtgcaccttcgaaacgtacgaggtgtatgccatcgatgttatcgtcagtaccggcgaaggagtgggacgcgaaaaggacaccaaggtctcaatttacaagaagtctgaggagaactacatgctcaagatgaaggcgtcccgtgctctgctggcagaggtgaaaaccaagtacggaaacatgccattcaacatccgcagcttcgaggaggagaccaaggcccgcatgggagttgttgagtgcgtcggccacaagatgattgagcccttccaagtgctgtacgagaagccatccgagattgtggcgcagtttaagcacacggttctgctcatgcctaacggcgtcaacttggtcaccggcatcccattcgaggcggagaactatgtgagcgagtacagtgttgcgcaggaggagctcaagactctgctcgcgcagcctttgggtcctgtgaagggcaagggtaagggcaagaaggcaacagctggggcggcgacaaaggtggaaacggcgccggccgtggagaccaaggcatag

SEQ ID NO: 22236 - protein, 391 aa, DROSOPHILA
MADVEKEPEKTIAEDLVVTKYKLAGEIVNKTLKAVIGLCVVDASVREICTQGDNQLTEETGKVYKKEKDLKKGIAFPTCLSVNNCVCHFSPAKNDADYTLKAGDVVKIDLGAHIDGFIAVAAHTIVVGAAADQKISGRQADVILAAYWAVQAALRLLKSGANNYSLTDAVQQISESYKCKPIEGMLSHELKQFKIDGEKTIIQNPSEAQRKEHEKCTFETYEVYAIDVIVSTGEGVGREKDTKVSIYKKSEENYMLKMKASRALLAEVKTKYGNMPFNIRSFEEETKARMGVVECVGHKMIEPFQVLYEKPSEIVAQFKHTVLLMPNGVNLVTGIPFEAENYVSEYSVAQEELKTLLAQPLGPVKGKGKGKKATAGAATKVETAPAVETKA

SEQ ID NO: 22237 - DNA, 8574 bp, DROSOPHILA
ttccaagccaagggaaaatcgaatagtgttaaggtgaatacattaaaggaagatgagtgttttgtggcatcatgttgtggaaataatgtagggtttttttaaattgatttttaggcataacgattttttttaaatctgaaaaacaagattcaaatcgaatttctgtatgtatatggtgaagtaccttcgagattcaagagattaccccagttaactatatccttatacctgggatttattaaccagttctttctattgattttctgcactgcaaatcattgccaaacgtctcctttactatttatttcaccaattgttgcttcaatccaatagcattgagaatccttgtgccgatcaataagtttgtcatcgtgggctaatcatttccttcactttccttaaagcatatgtcggtgctgtctctcttcctcttgctctacctgtttcgctgtctcttttcgataatggatccttttacgcttaggatatctattctttgagttaggggtagtacaattgttctttttgggtaacccgacgagggcaacacaaaacagatgcattttgtgtgggattcggcgtatatgtgtgtaggatgatcacgcacacgcacacacatttaatgagccatgcgaaacacgtttttggaggaagtgagatgggtagagagtgcgagacagatatacaaagaagtatcgctgccgacgcgcttgcgcagttaacttcttcctctaccttggtggatcgtcgatcaccttgtcgagcggtcgtcgaatgctcggtttagttcaaacgcgagcatcgccgggatcggacgttaccctggcccactcactacatacaatctatacatatatccgccgggatttagttttttcagtgtttcctctgaccgaacgttcgaaattcaatttgaatatcattgttaagagatattgtgattctcccagcccataactgtgtcacaatgtgtctgttggaagaccacaccaccgcctagtgcataaatcttgaacgttttgtgatattttcttcaccatgatcatttgcatatcgggttttataattggcgaaaggtaggaacccatggcctgacccagaaaacgaaagttctcttatcgtctacttagataaacaaaaactaaggcttggtttgtttatcgaaactggaaatttcttagagaatcccacacttatattaaattggagtagtgtacctattttaaatttccctggacttcagaaatttcttctttattttcattttatttagatgtcaaaagcttagtgtgttattgactcatattaatatatatttgacatagtatacagttcgaaccattagttttaagcatttcatgtgtgtatacctaaacgaaataatagcgtaatgtctaaattaaacagcaattactcctgactcaaaagccgcacttgtgctttcaatgtttccttatcaattttgatagcataatcttgataaagtaattatttatatataaggtctttcttttgttggtagaaacggtctgcgaaaacgtatattagtatcattccaaattccaatgcaagtagtgttctaaacagatccctcgttttttccacttgcagctttccccagaagagcctggagcgaagtggttccacccagtatgagctggctggagcgcaacagccaggatcagccaacgcctccacctgcacagatagcggcagtgttggcggctatgtttacctgcagaatcactacgcccccggcgcccacagctcctcagccgccatcaactaccctgcgcaacagcatccccagatggtctaccaaatacagcagtatcccacgtgccatcagcagcagcaacagcagcacctccagcagcagcagcatttgcatcagaccggcgcaggtcactacatgcaggtgacggcgacgggtggtggccagtatcatcaccatcacatgctccatggtcacgggcatcatgcccaccatcacggtggggcggtggtcatcgccgggagtggtgtgggaactggcctgggatctggagccaccagcgtgatcatgcagcaccagcaacagcagcaacagcaacagaatatgcacaagaagaactccatccggaacggcggagatgtcctcaagcgaacgcgagctcagtcggcgtaagtactttctcccgggtgatgttgatagtttggggtgtggattcagctgggaattatgtgccgacagaaagtaaatatttccagggcccaaaggagatttccgggaacagtttcttatcgaaatgtaaaatttgggtggattgttcaggaggtttttcaaatacaattttatcaaatgataaacaggtggctttctaaatcggtaacggactattatagcatacctttaggactatcattagataagtgaaatcaagaagactttatttttagacctgaatatgcgtaatagtaacttatcttgttctagaaaagtgactgcgtttaataactgaaatcaattaatttaagtttattaaatcacagatgtgcacttatcagttttcagagatatgagcagaaaatcagccataaactattcatggcctgagcttattcacagtctggttgcctatcagctataaaatatttgccatgattaaaaattcattatcttgagaatgtgtactgtatacaaacaaaaaacgaacggcaatgcttaatttggtttttaagcatttaaatatttctaatttgtactcccttttaaagtgacaggttattttttgtttgggcattaattgcagaattaaaccatttcaccatttttgtgtaaacaatccatcaatcctgagggttggcaacagaagctcgtctgtttatctaattagttatctgtaaaaagtaaaagtgtgccttcgggggattgaccattcgtcagctgaatgagtttgaactttgtccgcacgctgagaacttgaaaagtcataattggatatacaggtggtatcttagattagacgccgtcaaaagatagcgacttctatgcaaatatttgtgctactgcagtgcattttctgatgttggccatggacaggtcgctatgcagctgattcagaaagttatagtgctcgataggttacaattcagggaatgtcccagaatatgttttcaaaggtatctttattgcggcatgatgagtaatttaccgatcgaaagtaacgattgcttggggcacgaggcacatagcaataagcaatattattgccgtctctcgagaggcgaatgttaatcaggtcgatagcccagaggggcgacagtgacgacgccagagtgaattgtatttcaaagatactcgtgcgctatcttatcgggcggggcaacaaaacattcggtctccggcgtagacttttgtcagttatttgcaaatttccagccaaccaagcacaccacacatcgcaccttccattcccacacaccggatgcctccaaatacttatcggataaatcttttctgatctcctcccaatagctacgaactctcacaagatctgcttgagaaacagatcgagctgctggagcgcaagtacggcggagtgcgagcccgtaacgcagcggtcactattcagcgcgccttccgtcactacatgatggtcaagaagttcgcctcgatcacggcaatggccaaagctgagaagcgtctaagccggcggatggtggttacagccagcagtcttggattggcggaggagggtgcctcctcctcgtcagcctacggaagtgccacggaatctcagctcaccgagcagcaacagcaacaacaggcgcagcagcaacagcagccacgtgtcaccatcatggcgggtccggcgggagcagcttctccgggcttatcccggacgccacctacgcgatcgctttccatgcgggagcgacgtcagctggactgcagtcccataccgcgtagtcagtcaggtgagtaaagataagggacgtctgctacctggatagcaaatagtgtgacaaaaattgcatcagcttaaatttttttttaagttaaatacttaaattccaacttgattagctcacagattatgtgggtgttaagacttcgggattcatccgttttgtgttaaatttttctttttaatcctcaagattttaaatagatatattacttaaattcgagagcaatcatttcggatgaaatgttaaattgcttttcatttcttcttaaagggcgcctagaatacttaccaatttccccgaaatttctttgtgttattggttttcattatctgtttcggatgacccttgtggtaacatcaaaataaatataagtttattgatctcaacaaatctcacaaggttaacttgcaaataacatactgacatatacaacttgtttaatgtaaatttatctgcaaacaagatgtgtcatttaaacaagtacatcttatattggacatttacaatatatttacaatatatggtcaaataggccatgtttaaacaataattgcgtcttaacttttttttatcaaagtgaactagatatgttaagttattgtgtctgtaatcaaaagaatgttgtttgatcttatcaaagcaatcgtgattaacttattttagaattcagatcacaaataaagggttttaaaaaagcagtttagaaatgctatcttgctttgtaacacttttatccagagggctcaaaattttaatacttttgtcaacattaaactgactttatccaatctacaggagcctctcccgcctccatatcgagctcgacagtcagcacatcggctctggcctcacatccacatgttaatctgctgcacgcggcagagccacattattataatgctcaggcactgccccagggagctgcttactacactagttaccatggatcaccgcacgacttgagctatgccagttcggcggacacctcgctaaatgcctcgtgggttaacacgagcggccactccccgcacacgccctactattcggcggcccagatctatatgcgacccaagggcggcagcaccacgcccacgcccagttgcagtggcagcacaggtagcggcagcggaggcagcgggagtggcagtagcaagaaggtgccaccagaggtgcccaaacgcaccagttccattacggcacaacagcagacacagcttcttttgctgcagcgccagacaccgccgcctccttcgctgctaaggaccaatggcctgtgcaaaaccgccgagaacggcagtctgacctccgtgcagagttccggatcggattctagtgttacctctgcggaacgcaatctaaacagcgatttgggctcggatcgcagtaactcaccacatacatggaaacgaggaacagccctaaatagttcccagcagttctccacgcactcggcggattcagcgggtgcggtgtctggtggaggagttggagtggctggaggagccggcgtttatgccgctcaaatgcaggctgccgttgcagcagctacagcggcaggaggaatgccaccagcggatgaccatgctatctcctcgcatacgagtgccgctcagtatgagcagcatgagcagcagcagcacgagcaacagcaattgcaggcggcagctgcagctgccggagtggcacaaaactacaagatgtcggagacgatacgcaagcgacagtatcgcgttggactcaatctgttcaacaagaagccggagaagggcatcacctatctgatcaggcggggattccttgagaatacaccacagggcgttgctcgtttcctcatcacccgtaagggtttgtcccggcaaatgattggcgagtatctgggaaatttgcagaaccagttcaacatggccgtgctcagttgctttgccatggagctggacctgtccggccggcaagtggatgtggctttgcgaaagttccaggcctatttccgcatgcctggagaggcacaaaagattgagcgcctcatggagatcttttcacagcgctattgtgaatgcaatgcggacattgtcgggcgattgagatcatccgatacggtaagtctgtcagctaatcaaatttagtacgatttctaatttatattttcttatcttaaagatcttcgtcctggctttcgccatcatcatgctgaacacggatctgcacacacccaatctaaagccagaacgtcgcatgcgcgtcgaggactttatcaagaatctgcgcggcatcgacgactgtcacgacattgataaggacatgctgatgggcatctatgaccgtgtcaagtccgacgaatttaagcccggcagcgaccatgtcactcaagtgatgaaggtacaggccactattgtgggcaagaaaccaaatctagcgctgccccatcggcgtcttgtctgctattgccgactgtacgagattcctgacgtgaacaagaaggagcgacctggtgtgcatcagcgcgaggtgtttctgttcaacgatctgctggtcattaccaaaatatttagcaaaaagaagacctccgtgacgtacacattccgcaacagtttcccgctatgcggcaccgttgtcacccttctggacatgcccaactatccgttttgcattcagctctcccagaaagtggatggcaagatcttgatcaccttcaacgcccgcaacgaacacgatcgctgcaagtttgccgaggatcttaaagagtccattagcgagatggacgagatggagtcgctgcgcattgaggccgaactggagcgccagaagtcggcgcgcaatcgagcacctggcaatgcggagaatcgtgacagtggcgtagccgatgtggaggtctgcccatgcccgtatcagcaaggatcacaagcatctggcgagcaggctccaaactctgccgataactcgcagcagctgaagcgcagtgcgctgagcaacagccttctcgacatgcacgagcagtgtgagtttacctcattatatgtagcaaaaacgcttagagcttaagttcaaatgtgatttttaattagttaaagagcatgtattgtttagtagttgctaaagtagttgcttagtagattaaagaatatgtagactttactgactggtttttgtatcaccttccagttggcaatgagaaacctcaacgtcgtggcagcgttggctccctggacagcggcatgagcatctcgttccagtccactacaacatccagcgcttcgagggaaaatgccgctgccattgcggccgcagcaaatgcagctgcagcagccaagatgcgatttaacatgccgccaacggcagcgattgccacgcccagcaatgtgtatgcagctccgggaatgcaggcgtatacccatgccaactttgtgcagcagtcacaggccgcctacatgttgcagcaacagcaaatgctccagcagcaggcacaaatgcaagctcaggctcaggctcaagcccaagctcaggcccaagctcaagcccaggctcaggcgcaggcgcaggcgcagccgcttactggccgaataccgggacgcgagcgaaaggcttcgcggacggatgagaacggacggtcgacggaggtctaagtcatctattgtacattttagttattgagcaaagcgataattataatatctatatagcatattgaatgaaatatctgtataatccgaatcgaaacgacccgaacgccattttcttcaacacctaacccacacacagcgtacgagtatatagtgaattcttaatgttccttcgttctctgctaatattaatgtaaataaattaaacatttgtctgttttacactatctacacactaaaataagtttctaaaactatttgtatatacatcagcatactataatacacccacaatctatgaaaattattctctaaatatgcatatgtattattgtataactctaatcctctccagacacttgaaacaccaatttacccctgggcaaccttctatgcccatacccgttttgatctacccctccccttacgaattacaaaagcgattggcgaaagtagtttcattagcatatactaaaaactatatcccgataagtgcgcgctatgtatattatatattttgtttaccctacattttctctgtgtaactaaaaagtgaagttcgtgtataccgcgtgtgtgtgtatataccctgaatattaatttaaaagcatttagctataattattcatatttatagagccaaaactacccaaaacctaaaatattaaatacgagtataacaaacacgaagtatatgaaaacaaaacaatatgtatatgaaaaagcaaaagacttaaaaatttcaataaatgaaaagaaataataccaatgatcagttgatcgtttttaattatttgctgggaatttaaatgaaggggacacgaattatttgcagtaattcaatttcaatagtactttgatacgaatttatgaaactcccaataaaatattacgaatttataggtttatttttatatcgtttttattagtgattcaacttattttgtattattgctgactttactaattaaggccttgtacaaaattattgtatttctgtttt

SEQ ID NO: 22238 - DNA, 3671 bp, DROSOPHILA
tgcataaatcttgaacgttttgtgatattttcttcaccatgatcatttgcatatcgggttttataattggcgaaagctttccccagaagagcctggagcgaagtggttccacccagtatgagctggctggagcgcaacagccaggatcagccaacgcctccacctgcacagatagcggcagtgttggcggctatgtttacctgcagaatcactacgcccccggcgcccacagctcctcagccgccatcaactaccctgcgcaacagcatccccagatggtctaccaaatacagcagtatcccacgtgccatcagcagcagcaacagcagcacctccagcagcagcagcatttgcatcagaccggcgcaggtcactacatgcaggtgacggcgacgggtggtggccagtatcatcaccatcacatgctccatggtcacgggcatcatgcccaccatcacggtggggcggtggtcatcgccgggagtggtgtgggaactggcctgggatctggagccaccagcgtgatcatgcagcaccagcaacagcagcaacagcaacagaatatgcacaagaagaactccatccggaacggcggagatgtcctcaagcgaacgcgagctcagtcggcctacgaactctcacaagatctgcttgagaaacagatcgagctgctggagcgcaagtacggcggagtgcgagcccgtaacgcagcggtcactattcagcgcgccttccgtcactacatgatggtcaagaagttcgcctcgatcacggcaatggccaaagctgagaagcgtctaagccggcggatggtggttacagccagcagtcttggattggcggaggagggtgcctcctcctcgtcagcctacggaagtgccacggaatctcagctcaccgagcagcaacagcaacaacaggcgcagcagcaacagcagccacgtgtcaccatcatggcgggtccggcgggagcagcttctccgggcttatcccggacgccacctacgcgatcgctttccatgcgggagcgacgtcagctggactgcagtcccataccgcgtagtcagtcaggagcctctcccgcctccatatcgagctcgacagtcagcacatcggctctggcctcacatccacatgttaatctgctgcacgcggcagagccacattattataatgctcaggcactgccccagggagctgcttactacactagttaccatggatcaccgcacgacttgagctatgccagttcggcggacacctcgctaaatgcctcgtgggttaacacgagcggccactccccgcacacgccctactattcggcggcccagatctatatgcgacccaagggcggcagcaccacgcccacgcccagttgcagtggcagcacaggtagcggcagcggaggcagcgggagtggcagtagcaagaaggtgccaccagaggtgcccaaacgcaccagttccattacggcacaacagcagacacagcttcttttgctgcagcgccagacaccgccgcctccttcgctgctaaggaccaatggcctgtgcaaaaccgccgagaacggcagtctgacctccgtgcagagttccggatcggattctagtgttacctctgcggaacgcaatctaaacagcgatttgggctcggatcgcagtaactcaccacatacatggaaacgaggaacagccctaaatagttcccagcagttctccacgcactcggcggattcagcgggtgcggtgtctggtggaggagttggagtggctggaggagccggcgtttatgccgctcaaatgcaggctgccgttgcagcagctacagcggcaggaggaatgccaccagcggatgaccatgctatctcctcgcatacgagtgccgctcagtatgagcagcatgagcagcagcagcacgagcaacagcaattgcaggcggcagctgcagctgccggagtggcacaaaactacaagatgtcggagacgatacgcaagcgacagtatcgcgttggactcaatctgttcaacaagaagccggagaagggcatcacctatctgatcaggcggggattccttgagaatacaccacagggcgttgctcgtttcctcatcacccgtaagggtttgtcccggcaaatgattggcgagtatctgggaaatttgcagaaccagttcaacatggccgtgctcagttgctttgccatggagctggacctgtccggccggcaagtggatgtggctttgcgaaagttccaggcctatttccgcatgcctggagaggcacaaaagattgagcgcctcatggagatcttttcacagcgctattgtgaatgcaatgcggacattgtcgggcgattgagatcatccgatacgatcttcgtcctggctttcgccatcatcatgctgaacacggatctgcacacacccaatctaaagccagaacgtcgcatgcgcgtcgaggactttatcaagaatctgcgcggcatcgacgactgtcacgacattgataaggacatgctgatgggcatctatgaccgtgtcaagtccgacgaatttaagcccggcagcgaccatgtcactcaagtgatgaaggtacaggccactattgtgggcaagaaaccaaatctagcgctgccccatcggcgtcttgtctgctattgccgactgtacgagattcctgacgtgaacaagaaggagcgacctggtgtgcatcagcgcgaggtgtttctgttcaacgatctgctggtcattaccaaaatatttagcaaaaagaagacctccgtgacgtacacattccgcaacagtttcccgctatgcggcaccgttgtcacccttctggacatgcccaactatccgttttgcattcagctctcccagaaagtggatggcaagatcttgatcaccttcaacgcccgcaacgaacacgatcgctgcaagtttgccgaggatcttaaagagtccattagcgagatggacgagatggagtcgctgcgcattgaggccgaactggagcgccagaagtcggcgcgcaatcgagcacctggcaatgcggagaatcgtgacagtggcgtagccgatgtggaggtctgcccatgcccgtatcagcaaggatcacaagcatctggcgagcaggctccaaactctgccgataactcgcagcagctgaagcgcagtgcgctgagcaacagccttctcgacatgcacgagcagtttggcaatgagaaacctcaacgtcgtggcagcgttggctccctggacagcggcatgagcatctcgttccagtccactacaacatccagcgcttcgagggaaaatgccgctgccattgcggccgcagcaaatgcagctgcagcagccaagatgcgatttaacatgccgccaacggcagcgattgccacgcccagcaatgtgtatgcagctccgggaatgcaggcgtatacccatgccaactttgtgcagcagtcacaggccgcctacatgttgcagcaacagcaaatgctccagcagcaggcacaaatgcaagctcaggctcaggctcaagcccaagctcaggcccaagctcaagcccaggctcaggcgcaggcgcaggcgcagccgcttactggccgaataccgggacgcgagcgaaaggcttcgcggacggatgagaacggacggtcgacggaggtctaa

SEQ ID NO: 22239 - protein, 1210 aa, DROSOPHILA
MIICISGFIIGESFPQKSLERSGSTQYELAGAQQPGSANASTCTDSGSVGGYVYLQNHYAPGAHSSSAAINYPAQQHPQMVYQIQQYPTCHQQQQQQHLQQQQHLHQTGAGHYMQVTATGGGQYHHHHMLHGHGHHAHHHGGAVVIAGSGVGTGLGSGATSVIMQHQQQQQQQQNMHKKNSIRNGGDVLKRTRAQSAYELSQDLLEKQIELLERKYGGVRARNAAVTIQRAFRHYMMVKKFASITAMAKAEKRLSRRMVVTASSLGLAEEGASSSSAYGSATESQLTEQQQQQQAQQQQQPRVTIMAGPAGAASPGLSRTPPTRSLSMRERRQLDCSPIPRSQSGASPASISSSTVSTSALASHPHVNLLHAAEPHYYNAQALPQGAAYYTSYHGSPHDLSYASSADTSLNASWVNTSGHSPHTPYYSAAQIYMRPKGGSTTPTPSCSGSTGSGSGGSGSGSSKKVPPEVPKRTSSITAQQQTQLLLLQRQTPPPPSLLRTNGLCKTAENGSLTSVQSSGSDSSVTSAERNLNSDLGSDRSNSPHTWKRGTALNSSQQFSTHSADSAGAVSGGGVGVAGGAGVYAAQMQAAVAAATAAGGMPPADDHAISSHTSAAQYEQHEQQQHEQQQLQAAAAAAGVAQNYKMSETIRKRQYRVGLNLFNKKPEKGITYLIRRGFLENTPQGVARFLITRKGLSRQMIGEYLGNLQNQFNMAVLSCFAMELDLSGRQVDVALRKFQAYFRMPGEAQKIERLMEIFSQRYCECNADIVGRLRSSDTIFVLAFAIIMLNTDLHTPNLKPERRMRVEDFIKNLRGIDDCHDIDKDMLMGIYDRVKSDEFKPGSDHVTQVMKVQATIVGKKPNLALPHRRLVCYCRLYEIPDVNKKERPGVHQREVFLFNDLLVITKIFSKKKTSVTYTFRNSFPLCGTVVTLLDMPNYPFCIQLSQKVDGKILITFNARNEHDRCKFAEDLKESISEMDEMESLRIEAELERQKSARNRAPGNAENRDSGVADVEVCPCPYQQGSQASGEQAPNSADNSQQLKRSALSNSLLDMHEQFGNEKPQRRGSVGSLDSGMSISFQSTTTSSASRENAAAIAAAANAAAAAKMRFNMPPTAAIATPSNVYAAPGMQAYTHANFVQQSQAAYMLQQQQMLQQQAQMQAQAQAQAQAQAQAQAQAQAQAQAQPLTGRIPGRERKASRTDENGRSTEV

SEQ ID NO: 22240 - DNA, 3005 bp, DROSOPHILA
aagcaatctgacccctgtagaagaatcccttataatattaacaaatgtatcctcaaaatagatcgatctctatcttcgcagacttacacgaaacattccagaaccgatagttttatgcgatatatgagatttaaggagtactttccgcatttcgccatcacagtcacgctttccttggcatttgcaatcaaataagcgctaataataatcgtaaaagcataagaagcatataaagaagagtcaccgccaaaagcatgcacaaatatatataaatggggagcgatttaaaaacagtgcactgtgtttaaaacatcgacagctatcggttagcatatcgatattgacattcgcagtcaaacgttttcgagatacaaccctaaaatccgagaagcatccagaaatttcgacgtagacgagggcgaacctataaaatgaggttgacgcacgaatcccgctcattattaaacaaaattttgaagagaaagaaactctgaagtagggtgtgtttttagtgcgcaagccacatttggtggataaagaaaaaagcgaagaagaacaattgaattgaatcaattgcgagaaagagacaaaactcataaatatttaaagaacattgccccgtgaaaatataaatagtgtgaatacacagtgaacaataccaacaattgcactttgccattgcattttgcacttttccacttggatttttgaacttttacggattcccagacaatcgcttacatttaaggtaagcttcgttggacatattgccacatgtgggcgcatcgatttgatctgctgaaagaagcacatcgggagcggagctctcgttgatggtgactacatacgtcactcgcgtgacaacacggcagttgcacaactgtgctgttctgtgcttctagcactttccatcgccccaacccagcaagctggcaatcagtattcattctaatctatagcgttcgttcgtttgtgtttcccctatattttcagctgagagatgggcaaagacttctacaagattctgggcctcgagcgcaaggccagcgacgatgagatcaagaaggcctaccgcaaactggcactcaaataccatcccgacaagaacaagagcccacaggcggaggagcgcttcaaggagatcgccgaggcgtacgaggtgctgtcggacaaaaagaagcgcgacatcttcgacaattacggtgaggatggattgaagggcggacagccgggaccagatggcggcggtcagccgggagcgtacacttaccagttccacggcgatccgagggccacatttgcccagttctttggatcgtcggatccgtttggcgcgttctttaccggcggcgataacatgtttagtggcggtcagggcggcaataccaacgagatcttctggaacattggcggcgacgatatgtttgcctttaatgcccaggcacccagtcgcaagcgccagcaggatccgcccatcgagcatgatctgttcgtgtcgctggaggaagtggacaagggatgcatcaagaagatgaaaatctcacgcatggccaccggaagcaatgggccgtacaaggaggagaaggtgctgaggatcacagtgaagccgggctggaaggccggtaccaagattaccttcccccaagagggtgattcggcgccaaacaagacgccagctgacatcgtcttcatcattcgcgacaaaccgcattcgctgttcaaacgcgagggaatcgatctaaagtatacagcccagatcagtctgaagcaggccttgtgcggagcactggttagtgtgcccacgctgcagggcagcaggatacaggtgaatccgaaccacgagatcatcaagcccaccacaacgcgccggatcaacggactgggtctgccggtgcccaaggagccatcgaggcgcggcgatctgatcgtctccttcgacattaagtttcccgacacactggcacccagtctgcagaatcagctgtccgagctgctgcccaactaggctagagctgtgccagccacacacacacacacacacacgcatataattgttatcactttagttaaggcctatatttaatttaccgtacgtactcgtaagacaacttagcctaaccaattgtagccctaagctagtgagtgtgccaagcgaagagctgtagatattggccgaggatgcaagcgctggataggattaggaaagagaacaacacacacacacacacacacataaagcagcccgtgtagcccgtttcgtgttggagactgatcgattattagctatttagcattacacaaattccataagttgttttgtttaccgccacatgaatcggtgcctcaacatcttatacataataatcccaaaacaaaatattaaataaatgaggtattataaatttaaagtaactaaccatttttcaagcaaagcacattttcggcattccaacacggggaggttacatcagttagtagaacacttatagatttatacgccgtaaggacatagtacgttttagtaccaattctattatgttataaacaataaaattacttatacacacatcaagtgtcgtttctgggtcagtgggttgcaagcattatagaaattgctagatttcacgtggtggcaatcaaaatgtggtggctaaaaccaaaacaacatgtattgctggcaatttcttctatttttaaatatatataactagcgcgccaaacaattcaaaagtctccacatgtggaaacttccagagggcaacacgccacctggcgtgtatagatcgtgtgttacatttcaaaaaccatctggcatcactggcaacgtttgtttaaaacgtcgagtggaaaagatgaaatttaaaataaaatcgttgtttaaaatcctttttccaaaacctgaaatccccgaaagccaaaaagagaatcaataaaaagaaattccatgttaattttattttaaatttcacattttattttcatttgttttctcttcaaaaggattt

SEQ ID NO: 22241 - DNA, 1005 bp, DROSOPHILA
atgggcaaagacttctacaagattctgggcctcgagcgcaaggccagcgacgatgagatcaagaaggcctaccgcaaactggcactcaaataccatcccgacaagaacaagagcccacaggcggaggagcgcttcaaggagatcgccgaggcgtacgaggtgctgtcggacaaaaagaagcgcgacatcttcgacaattacggtgaggatggattgaagggcggacagccgggaccagatggcggcggtcagccgggagcgtacacttaccagttccacggcgatccgagggccacatttgcccagttctttggatcgtcggatccgtttggcgcgttctttaccggcggcgataacatgtttagtggcggtcagggcggcaataccaacgagatcttctggaacattggcggcgacgatatgtttgcctttaatgcccaggcacccagtcgcaagcgccagcaggatccgcccatcgagcatgatctgttcgtgtcgctggaggaagtggacaagggatgcatcaagaagatgaaaatctcacgcatggccaccggaagcaatgggccgtacaaggaggagaaggtgctgaggatcacagtgaagccgggctggaaggccggtaccaagattaccttcccccaagagggtgattcggcgccaaacaagacgccagctgacatcgtcttcatcattcgcgacaaaccgcattcgctgttcaaacgcgagggaatcgatctaaagtatacagcccagatcagtctgaagcaggccttgtgcggagcactggttagtgtgcccacgctgcagggcagcaggatacaggtgaatccgaaccacgagatcatcaagcccaccacaacgcgccggatcaacggactgggtctgccggtgcccaaggagccatcgaggcgcggcgatctgatcgtctccttcgacattaagtttcccgacacactggcacccagtctgcagaatcagctgtccgagctgctgcccaactag

SEQ ID NO: 22242 - protein, 334 aa, DROSOPHILA
MGKDFYKILGLERKASDDEIKKAYRKLALKYHPDKNKSPQAEERFKEIAEAYEVLSDKKKRDIFDNYGEDGLKGGQPGPDGGGQPGAYTYQFHGDPRATFAQFFGSSDPFGAFFTGGDNMFSGGQGGNTNEIFWNIGGDDMFAFNAQAPSRKRQQDPPIEHDLFVSLEEVDKGCIKKMKISRMATGSNGPYKEEKVLRITVKPGWKAGTKITFPQEGDSAPNKTPADIVFIIRDKPHSLFKREGIDLKYTAQISLKQALCGALVSVPTLQGSRIQVNPNHEIIKPTTTRRINGLGLPVPKEPSRRGDLIVSFDIKFPDTLAPSLQNQLSELLPN

SEQ ID NO: 22243 - DNA, 25599 bp, DROSOPHILA
catggactaaaaactgattatctgcatataagccaactaaaaactggatacagccactgggccactctgtccgcatcagcatcgaaaaggcaaaaaataattgcccagaactgtttaacatatcacgagagccgggactcgtcgagtgagtcttttataaaaattcgcaacatgtcattggagccgagatgccgtatcgtgaggattggatgttcgggcaccctcaactcaactcagtcggcggacggagagcattgtctctggttaaggacatggacatggacattgtcgggcatcgacgtggacatgtcaatgtctatctttctgccgctggctctctcgctgtcctgtctgcgaaccgagtaccgcaccgtctctgatccatatcgaccgaaagttaacgctttagcggattaaacatggcttttagcgttaattaacaacgaattttcgcaaaaatgcaaactgcgctcagcaacaggaagctgcgcaaacaacaagtagacagaatgttcgtttacacgaaactgataagccggccgaccgcagcaacatcgatgggctaacaagtcgaaaacaacgaagttcaaggacccttgggggagatttgcattccaaatttctgtctgccatgcaatggattttttcgaattttaaatggccaacattattcatgtccaggagacttaagaaccattataagccattgtgccagttcatttatcgcttgattgagccagcttaagagaagtatagtcattcactgggatttttaaacagagtcagccactcttagaaccattttactgaaaacttatttaacttcaaacaaccatcaactaaaagggatgttgacatttcttgatattgttacgttcctaataacattgagaagcgcagagggggtactgtacatgtgatattattacttaactgccatcaaagttctttgcaggactttgtcacatttgtgaaataatcaatattcaacacaaatttttcaataaaatattctgttttattcaagcaaactaaaaattaacaaaatggtttaaacattgcttagttaattaatctactatatacatgcatattgctagattaggcaaacattagactgcattacagtattacacagcagagggtcaagcggtctctctgaatctaagataacttaaacgtagactagaccattaatttaactacgcactaagccgattggaagaatcgcgtgtaacgctatagggaagcacttggaagtgttggaattgcaagacctacagctacagtattacttataccattaggaagcacatctgtccagcgtattgctacatatatatatacaaagaacctttcgttgctcgtatactataaacttaatgttaaatcacagtggcgagatttgattttgacgcctgccccagcggttcacaaccgacccagtgcagacgtgcgcctgcaacagccaaataggatccccagggacctcggatcgggatcaaccagttcatctgggcgggcagaagctgaagtaggggaaaagctggcagtgcagggagtagaagcgcttgggatcggttttcatatcgaagccgtccaccttgatcacgttccactggtttttcatgtgggcatagctgaaggacacctggtcctggaacgtatcctggcgtatgaactccatgggctccaaatgcgagtggaagttgtccaccacggttagaggaactttcagaaggtgttctgtatataaaataatatatatataagttcagggtcactttggcttactccgcacaaactcaccaataataaaacccattgtgacatcatccggaaaacgtatcttgtcgccaatgctgataaacttgccaccacctgctatgggtagcatttttaaagtcagggctcgactgaggcagaagccagcgccgccagtggcgaaccagaaggttatcttcttgtttgttgtcgtgttcttctgcaggtcgaaagaaagtggagaagagggccaagattaacggaagaactggttcatgaatgggtagcccaaaaaaagaggatgactaaaccaaaggctaaacccaaataaatatccttttttttatcttcgtcttatttctggtttttggcaatggcccagagaaaattgactcgaaatgaaaaccgaaaaagaagcttaataccgaaacgtggcttgattaattgaccatgtaaatggacatgtgcgagctggaaacttaatacatgggtctggaccaaaagtaagccgagactcgacaggatctttctcccgcaaatgaagcgtaaagtttggggtttttaattatgcacgctgcagcgatcagggctggattggtttggtgtgccagattttgaatggatttctgagcacgcagtttacctggttgcttttgctcacatccctggcaaacctggctaaaccgataaaactatggcctgtacattcattacgggatcagctcgcggtatatcaaatggatcggactgaaaaacgggttcaaattcggactcaaactgggactcgtatacagactgctgctgctattgctattgctattgctattgctgttactcttttgccgcgccagatcatatcggttattaatgatagcttgcgctggcagctggaagccaaatggcggcatagacaaatggccctggtggtaacataaataacggccacggttcggcttttgggccgggccagaagatggagaaaggcgatcgcagtcaggcttgtaattacgaactatataggaaaatatgcaaaaataactggcatttgcacttacgctgtccaagtggatctccagcggcgacgagatgctcggcttgcccagataccaatccacactggggctatactcgtccagcagtttgaccagcctcggcacattgacatagttgtcatcgtcgaagtgacagaaccacctggaaaacagtatcagagttaaacacattcgaattcgagttcactcaaactaaaattcttatatttcttttactatatttgaacaattaaaaacgtgcaaaaatgccagctcatttggatttaaccctagaggaaatgaccaggattgctttgggtgtgcccgagttaacccacgtaaatgtggctgtactccaaagtcttttgaatgtccttctcaagaaactgaactgtcagaatgatatggtaaggataagtggcttcgagggcaagtgtatggagcgcattctcgagcaatccaaaatatctccactgcccttcgacgtggaggctattgttccaatttccgagcaattggataaagttcaagagttggacaaacgcatcaagcagctggagtgcaagttggagtgtcactttcagcagattcgcatttgcaacaaggccaaggacaagaagtacaagatcaaccaggccgaacagtacgcctctccttgcgaggatctgtgcaccgtttgcgatgaggacaacaagatcgcatgcagtctgctggccaacatggacttcatgaaaaagctaatgcgacgtatagccacacccattctggaccgaatggaagaggtcagccacaagctggagaagttctacctcacacttgaggcttttcttaagcaaaccgaagctttatttaatcgtttggaaatagtcaagcaatgtgtggtggagatcgaaggtctgaggactcttgttcaggaatacaaccttacttttctgggaaccatggaggaactgcaggatatgctcgacagcaagctggataaggtgcatatgcctgctcttaagaagtatatacgcgatcgcttcgatgatatagatcgccggctgagattgattgaggataaggatgcatgtcccagggccgctggatttatcaatacggggctatcttgtctatcctgtaatagtcccaaagtgggtgtcgacgtcggtcctcaaaccatgggactattcccggacgctccggtcaggcacctgcctcccaagttaaccggatcaccggtaaattgtcagaagatcgtggtctgtagatctgtggagaaggaacctaccctaatggtgcgagtaaacaaccttgatctgagtgtcctctcccaacgtcttgctcgtcctgcctctggcaaagtctgcaagttgcccgaagctaatgacgccatctatggcgttcgtaattcctgtatatccggtcaggaccactacccagtataacttacagctagtcgccatccaaatcgattagtttccgcaataaagaatacaactcaaggctgtgtccgttaagccgcatataaaaagtgcactaatttagattgcaattacccgggttgaaggtaagagctatgtctgcaaagcccagagtgcagctgcagtttttatagtgacaaacgatcagccatatccggtagcccacggtggactaatgatggcattaagcggcagctgaaaggtccgcgctgaccatcattatcgtaggcttcgctatgggtgcagttcccctttcgttgaggggatccccttaaagatgatattggtaacgcgggaatttacttggattccgcaaaggggaggctcgataaagagaaatttatacactgcaattccgggtaatcagatttagtacgctttctgcttaaattttggctgcaatattgtggatatctagcggacaggtatctgttaaaataaggacttacattgaatggatattaagggtaactactagaagctaaaaccaataaatggttcaaaagaaatgtatatttctgtacatgtgtagagtatcatcttcttcgacttgccaagtacatttctggggattcgcgactttcgccgagctcgtaagtattcaataaaatcgaatcttggaggattggctggtcttgggtttcttgtcgttgcgtctgttgggtaatttaatataatttttattgcataagactagagtagacaaggaggtggagtttcgtgtgtatgtgtgtggtactcagatagtcagtcgatgctactcccaaagcctggcattcataaattgcctggtcggatgatgttgctgctgttgtctacgactttggctgctgttgcggctgccacatgcgatacctgtgcgaaaaggccgcaactccccgagttttaacaacctctttacccctcctacatctacgactcgcccaccccaacccttagtttctacgtgaggcataaaaatgcgcgtttaatttgcttaattatgcacaaagcacagcccctccgttttttagttccccctctttttagtttttcataggcagctgctttccctgcttccaaattgaaatctagacgctggtttatgttcgatgtcgtttaattaacgccagtccccctctttgatttcattggcatttatgaaaatgttttcattcggtggttctttcgattcgggttatcaattaggggatcgctgatggtggcttttctccgattctccgtgtcgaacactgtttgtttattttgggtttgtccgctctctgtttctttgtttctcactgcatcggattgcactaaaatgcactgagggaaaataatatgtttcacagaaactgtcattacttgtgaggcttgtaggcttttaaataaacgcaattgattgataaacgaactaaaagttttcatatcccttgaacttaagtctttaatattaaccacaataatcatttatttattattatttattattatttaattcaatagttatctatttaatcaagctactttatataattcgcgtagaaaagcctttttaactatctataaacatcctgaacatttctgccagtgcatcggagtgtgtggccgttggccgagtaaaactgaaatgcgaaacgagtgcacactttagtttatttccatagccgtttttccaattattcgcgctgctgcagcagcagctgctgccatatagcatatatgtatgtatgtacatagctataggattaaccgatgctgatgtgggcagatttcgatcagttcgccagctgggctctttctttcaaaacccccagcccgacccacacgtaaccccctttcacccactaaaacataaggaaaaaagttcagaaaaaaaaaaagaagtaaaaacgctggcggggcgttggcggctgcgtagtcattccacattgcaggcgaaatgagtttatgtctggggccacaataaaaaatgattgacggggcacttcaagtcggccaaaggagatatatctggagttgcaggcaggctgcccaaaagacgcggggcttaatagatttcgcattaagagagcggcaaggcaacttagtaacgaacgagcgtgcaagccgcgctaaaagtattttgacagccggccaaagataagcgatcgccaaaaacctcgtcagaccacgatgacgaactgatttcattcggtttctgtttctgtttatgtttatgttttgtttttcgacttctcgactccatttcaggaatgagacccggacaggctcgcctgcaattagcaataagtcagctgtcatctgcccgagcagcagatacagaaagtatcttgcggtctcgagtttcgcggattgatacaaatcaatgtgtcatttatgcactgctgtgggggcagacaacatgatatttacattaagcggcagtccgaccactcaaatcaaccgaaatgtttgcctcattaacggactgcatcgagagccgaaaagggaaattaatcttttgatgtgaatgcagctagccatgctttccatacaccgggaaaacaggatttcgtgtgtaaatggatacttttatttatggcaaacgttataaaatgatgcttttatttcgacaactcagttgtagtgaccttaagatgcaatatgtatgcttaatgtgcagttacaaatttatagaataaaatcaataatattattcatgatagtattgtagtaatagctaccttgagacagtgccatgctcgtgtttcattattaattattattattttatcgtttttgtactgattagaaaggttaaaagatttattaaatattttttgtatatatgatatttttaatataatttttttcttattttagtacattttcttttgtgcacccgaatgagtcaaatatttacgaagctgtgcgcctgcgcatctacaaaggcatttccctttggacaagcaattgaaaggcatttgtcaactggcgtctcctccgagcttgacaaagcaaatcattaattctggtacagcggagctgtatctttgtatctatatatcttgtggatgcgcgcacttgagcccgcaaattgaaggcaattgccggcgattatgcgactttctgtgggtgtgagtgagcaagtgtgttggcgagaggcgctaattgaaatgtagagcaaagcaaagcaagtccacttcccggatgtggagtagcaattgcatttcctagtccaactccaatatgcatatgcatatacatatgtcgttgccactgttgcaattccagtgaaattgcctgtttccgctgccacaattccgacaaagatttgagcattttatttttatgtttctcatgtggcgacacaatgtcaacaaatgcattttgcgttctccctttcaccatggaatcaattgaataattgggattgttgtggtggttctgccacaagtagcaaataaatgaaattgatgcgtttctaagcggcaagaaggggaagtgttggcggtcgccccttaaaggaaaaactgtttagcttcacacgcagctcttcactctctctataaatagctgcccctggccgaaaaaaccgtggaaaagagggaaaattttctcacacattgcagccaacataagcatctggatttccccactcacatatgtaggcaaccctccagccaagaaagtgcattagtggcatcaaaccgcgattaaaactgtcgcagccatagatggatatacgattgcgagtgcgagtgactctattattttatggctcaatgtggaattaaccccgagtcggtgcggttgggtgaaagaccgcctgccctgggaaatttcctggatgaaccgtatcgaaaaccgagcgaatccaattcccacgcacccacagactttttggagtaacatgcagcagcattaacattaacatcatcatcatcggctggggcttgattgatgccgatccttcggcaccatttcttgtttgccccatttacattttatgctgtgaatattacgcatattacgtgttgtaattataccccgaaaagaggcgctcttattatgtcaaaatgttgattacgaaacgtgcccggtcgagagagtatccgtgagatgcgaatgaatggcgtgatgcggggcaacctcggattgcaatcagataagtgcccgtttatacaattgcctgacaagtttcaccagccacattaggtgtggccagcacaaggcgcacacccaagtcagccaagagataaataagaatctgagacaaataaatcgaaagagattaggtcaggcagctttgagactggaattcagcgtcgagaaaacacacaaaactaattaataaaataccccgagattgggccctaagccaaaggcaaatgtcgcgcacagtggggcacagggaacctttggcgcctccgtggcctggaatttctatacgctcatatagtataattgatgattgctgctgatgtcggtttttgtgggagttccaatggagtcttgactggcaggccaggtcatcgcctagttgtctgtctctctatgacttgcagttgctattgttgctgctgtaattttaattaaattgcactaattgtttggtattataatggatacccaacaccgacaagcagcagcagcagcagcagcagcggcaacagcaactgcaattagccattcaaggcgagcgaaaggcgttcctccagccagcgcacagtggggcaaataattcatgttttatggcaaataaatttacattcgcaattaaaaccaacttgctggattcacatttaatagtgctacttttgaacgggacgccccacggttgccgaaaccgattgcaagcaacatgttgctgccgtgcgtaagagtcgttcagcggcagcagcaacattcgcttgtaaaaagcgatgggggcagcaacagcaagcagcagcaagcagcaaagcagcgtggcataattgccagttcgaatgcacgttaattaacctctttttcatgttgtgctcgggtttttctttggccaggctgggatttcgctgttacggcctgttgcctgccggctcttaaacgttgccaatcagccagaaggatgcctggacagtttcctgtgccacctgataccatttcatatctctcttttagtctcatttctgccttcttacccgctggagactgggacccaccagcggcagcagccaatgcaacaacaacaacctcatctggctcataactgcacattttcattgctggccatttattttgtttcaacaatttgttgtagtgcctgttgccgtggctattgattgcatgctccgcgctcgcataatgacagtttcaagttctaagccaaaacggcaagtcaacttaagatgaaagccagactagccagcccagccatcccatcccatcccattccatcccatgccggctcgtctcattgcagcaccaagcccagctagtctcgtcatcctcatcatctgaagtccaagcatgtccaagttgttctagatttcttggctgcagttgctgctgcttttgctgtgcggcgtaattacaaataagcaaaaaaaaaaagagtaaaatataaaggagggaagaatttctaggctgctcctttgggcgctagttgaagtgtcttttctggtccgctcctctttcttctcggactgcggtcgctggacaagttttgagtggatgttgctgctgcgtcttaattgcgcaaattagaacgcatggcagctgcagcacagtgcccgaacagtgcaccgagaaccggagaactgggtgtttgtattgcccatggatagaatgatgggcttctcctgcggtcgcttattaaaagcattaaagtctattattacagcagcagctaaccacaaggagtcattgctctcgcttaagttgtacagcagaatcgagcattcaacgagcattaagccctgtaaatatgacaacattttaggcgatccagtcgagatgctgctgctgctccttttgccgcagatgcaacttgcaacatgacctcttaactctccagcaaacgccataattctgcgtgaaattgaagctgggcacacgtatggatatccaatcaaggggaaattacacaacgaagacatttacatacatggagtttcagcctccatatcgtttctcttatataaacttctacttgagcattttcttcaataaaggtggttacataagcttcgaatctttttggtcgctaatttccaactatttatttccacgataatctacagtttaatctatagtttctacttactttttgccactctccaggaagacatccaattcagcggacattttgcagcaaagcgccttgcgaaaatggccctgtgagcatttcgtgttgatgagatggccctctgaaaggagaaaagaggatgagaagggaaacgaggtgaaaagtctgataaagattggtaattaagcgggccaaaacaagaaacagaaggagccgatggtcggtgtttggtggttggtggccgtgggcccacttctatgttaattaaccaaaagaccaggcttcgcagccccagaacgaacagtagcttgttagtcgagaatgccgctcatatccagcggatacattttgtatcgtttgacagccgccgccgccgccgccgccgccgccgccacagataaagatgccagaacaaaaaaaaaaaaaaaaagcaaacaaaaaatgtataaaaagcgcaaaagcagagcaacgcacaaaaacttttgcgccttaattggatgaaaattgttgaaatatttaaacacaagacaactggggggactggaacttatcctttgtccagccagctctgcacataactcaaaatccccgagcgtgtttagccgaatccttttggcctaatcaaaataccaaaatgggtctgtatgtctgtatccgaggctgtgtgcgaaacttgagatcttcttggcttcttaagttctgagttttctgtctgcggcgttctgcatcctcgctccattgcggagctggagtatgcaaaatggaaatacaattttttgagcgaaattgaaatttgaactttttttaattaaaccccaagaaaatcgaagcgcagcccaggatgcaattcaattaaaatgcgggtgagtgatgaagcttcctcactcgctttgctccactatgggatatggaatttataaactttaatcggttttcggttggtccagacagtggccaatattaggcggtgccggtgggcgtggcacttggctgatgtgaaacttaattgagaacggacaaaccgaaggcaacggattgaaaaggcaagggttcattttttttcttttttttttttttgggttccgaattgggatcgaaaggtaagaggtcggtcggttgctgtttggccaggtaaaaggctgttcttcttttgtgataaattcgattttctccctcgcttgaaaatataatttttgggcaaaaaaaaaaaaaaataaaataaatgcatcacggtggaatcggttaaataactaatggcttcctctactcacttgtcttctcctggtagtagtgatcatcggtgtccgtgaagaaccaggtctgcaaaatagaggagagagaatcaaaagttagtcgatcgatatttgcataattgtggttcatgtaaattacaagaaaccgtagcatgggaaactttgtagtcaacagcctactcatttgactcttcagacgacggcataattattcaaacacaaaaaaaaaaaaacgcgtttggtcagcagcttttacaagaaagcgtccggcaatcagataagaaaattcccacacaccctgctgtcttcaaaagcggtccaagaaataactcaagcaaaaaggcccacagaagaagtgtcttttttatgcatcgctgactgcggtagggttctgaattctcaggaggtagtacacagtatttgccgctcattagtggctttctccaacccaagcaccaccatcaagccacaaaatctatttcgcgacattgccccaagggattgtatgcttttggtcctaataaatttgttactcgaacaactcaattggctccagttttcccttaataactttttgcctgtgcctttgtgtcaaatcaggcgaaaatcgctttaaagctttgacaagcacacgaacggggctatatagctgttgttgttagccatgttgctgttggccatgtagctgtcgtcgttttgcgaagtaagaggcacggcaacaacttgggcaaacaatacgcccgctccacaagcattttgagcaacgacttgtaacagttagaaagtcaacgtttgccagttcgcctccacttggagtcggagctggagttctttatccacaacattggaaggcacacacatccagcaaaccagcacaccgagcactccggcaacaccagcaacatcgtcgtctgctgaattttcatggatttttacgagattttcttttttttcagctcactttttccacttttttattttgagagagtcgtcgggatgcttccccgctttggggcgaaaaatgttaacaccatgttgccggcttgttgttgcaagttgctcctattgttgctggtgttgttggtgttgcagatgctgcagttgctgcaaagctgctgcgctgcagttgcagtccgcacttgactagcttttaatttatgtgactgttccaactgttgacaaacagcattacaacgtgtttcgcaaatttatggcgaaacttggccgctctgatggaagtgtcccataaatagagttctttagaacgccaagttaattgaaaggagcgattggaaatgcgaatccgaacaaatcagggagtaacagtgtctcttgagagagttgagatgacaaaccactgtagatttaataaaaaaaaatgtacaccaaattgaaaatagccgggcttggaaaccaacacccaacacccaactatcaccgtgttaactaaaatttcttaaaaatatgtcacttaaagatgtcgttcgattaatgtactcttgtaaatcgcttaaaatccagagttcataaatttggccaacacttggtggcggaaatctgcagagttttgctggattttcatggcgtggcatgcactcaattggaacgaagcgattgccacaacaattcgttatgttttcggcgcccaagagggaaaaagccaacagttaaataggcggcccaggaaaagcacaagccaaacaccacaccagctggccaacttcagtttttagcagttgtttcagttgactttgctgttcctgttgttgctgtagctgcagctccacttggccaacagagcaaaagccgcaacaagcaatgcattttcaatggcgtctgcgtttctaactgcagctgcgggccaaaggcaactgtggccaaccatttggacaaaccattgaagcatttttggccgctggctcttgccgtcctcttaccaatgtgctttgttttttctcggtcgcgctaaaatttaatgcccaccctagcaaaaaccccccgcagccccttcccaaaccgaccagtcctcacctggaaaagcacgtggggtgcggtcagctagccgcgcatttggtctgcggttgcagctggccttacatctagaccaggcccaaactgaacaagccaacgaaccggcggctttgtctgcatttttctgcattgggctggccgaaaccgaaggaaaatactgaaaattataatgtatgagcagggggcgtggacaatggatatgctttcccaaaatttcgtccattgcacctcgaagtccaagtgaaagttgtgccaaaacgaatagtctcaggatgtgactaatttcgtcgagactgccaataaggctgccgctagttgaggggaaatggaattattgatcgattttaggaagttacccgttatcaaactaataaaaaacccatcaaatttagatggccaaatttcgggcaatattaattcaaccagtgccgttttgggtggtgataaaacgttatgcatcttaatttttgtgtcataactttgttagtggtttttcatttttatgaagttcaacaagaatgacaatttaccacatactattttatgtcttttgaataacatggcataagttacaactctatctcttggcagtgcgattgattaatttaaggggatgcctaacactcaatcttgaacataaacacttgattacaaactgatgataatttatcagggggcacatacaagaaatcactttaaaaaccataatttattctcaagaagtcataccccttcgtagacgtaagtgcttcccataactataggctcatcagcagctacgcacacgcatcgctcaattcaggaagcgaccacaagattctgggcgtttcgcattttgcgtaatcttcttcagctacaaaaaccacaaagcctgggattttaattatgggtttttgggttttctctctttaaggttttttgggtttgaccctcccccgaaaacacctgctgaccctggaccctgggccctggaatctttctacacctcaagagccatttgccctgggcaactctgagtgttaaatgctcagaagagacacagaaacaagcaaatgaatcaattacctgatttgttgtgagtcaaaaccactctctgaaatcgaacagagtagaggtattccactcagcattcaattaatgcgatggcaaagtgattaagagccaatcaaccggcacattttgaattcgaattcgaatcgaattctctgatgttcggtggatcaacagaacataccatgccatatatatgagatatgtgaatgcagatgtgtttgcagcacaaatatgaaatgtgacaacgagaaccattaaagaggaagttgcatgcgggcctttgagggttaaaaagcgagatgagttgggtgggcgggctggttggttggttggttggttggatggatggacatctgacgaaattgtgtcgccgccggcgggcaaaaagcagcaacaattgaaattccaatttattgcgaattgaattcaattgaagagcattgagagcacaactcaaacagagcaaaggcctcgcaaaagttcaggcacgggctgttactatacgataaccatatgaatgggtatgaatgagcttcatacagtcggtttaagttgccagagattagaagatatagaataatgtacaaaaactactgcacaaaaactaacgcattttcaaatttaagattctcattcctccaaaaatgttgttgattaaaagagaaaaacccaatccatacccaggccagatgtatggctattaagtttccaaaaatatacatctcatactttttaaggctttattaacttttataagctcttgagcgtcatgtcccactgtgtggaacaactggtgcataaacattcgtttagttttgtattctatctcgtgcgttggcggcacactttcggtacgactattgtcattaattggcctttgatgggcattgcatgctcatacacattattccgaatacgaatctgaatccaaatcaaaacgaaacagctcgaataaaagcttaaatacttaaacaacgagatcggaccaagtgcggatggcagttccgttcgttccgttcgttatgagcagctgccacaaccagatatgcagtacttcatacagtgggccttctggtgattcatcattgggccctggacaggaatggctgtcaacgtcaaagaaccatgaactaggaaccgagaaccatgtgctacaaactcagagccgtgctcaaactcagagtagcgacattaaagcgcagaaatgccagcaaaggagccgagttaatgagatttaagccgcaactctgggacatggcgcgttttgaatttaatagccaccactggcgaccggcgtcaccaaaaaaaaaacccagagaatatcagcaccgagtggtctaactgagttttacgacattgtttttccagggagccgacgagcaactacatgtgagcctaataaaatgtgacgagctttaaagaaatcttgtttttccccagaatcaacgagaaaagaaagaagcgaagtagctaactggttccatttccatgcgaatcaatcaaacaataagtcaggcagccaaaactgaagcttcattaaaagtaaatgttcaatcagacaagcaaatcgagacaaccacccacaggaacactccgtggacaagctgtcagtccgtgttcgccgatctatccgtggattcggattccgagatccagagattcagtgatccagtgctgacatttgacatgcgtccgctgccccaacaaatgaagcacagacttctgcgattgctgccactgtgggttgcatgcaaatcgtagctgcctcggaaaaactggaaaactggtagccgaagccagtacaaagtcagtgcaggtcgaggcagaagtcagtggaaaacatacaagcgggaataaaaacgaaaatgcaaaacgatttccctccttgtcttagccgcattgggcattcaatcaaagtcgagctgctgttacggctctccatttttggccaaaactgtttacagtaatttatgctcatttgtaagcatgaaaaatttgaatcattcatcaaacgtccgacaaacgattggtccaaaaggggggtattgtcaagtaccagatctctcgatctttaatggtaaattcggttgccgcaattcgagtggtatattgacctctaaaagcttggttacaatgtggcttacttctaaagtagtactttcttttaggatatttctatatcttaagatatgttaaattttaataaagccaatttacctgctcattattattacaaatacgaatatcgttacctaaagttcccacctatttcttaaagaaactttaggaggataaacccaaatactgccttaatcgtcggtaaacgtggctccccgcggatatcttgcattgttagtgtacgcattccccagaaaaggaagagtactcactacttgtgatccccattccgagccatctggaaaaacaagctcagcattgattcgacatcgggttcgccaagtcaggctttgcccttttatgggcgctgtcttgacaacaacacacaaaacattaatcaacggcaacaacaacaatgacaagagcaacaaaagcagcaacaataataacaacagcagcagctgcaactagcaattacaacaaattgttttcaaacgctgctgcctgcgcagccaatcaaatcgaacgcaactttgagttgttgcctgtcgctgctccacattgctgttaaccacagagcaaatgacgtgcaacaacatggggcacagattttccatcaaaataattggccaaaaccgaaagaaaatcgaggaaaaagatgagaggagctggccaattgttgccggcgatatgttggtcttgctgttgctgctgtaaaatgttgcaagcgcacagaaccgacttatgttgcatgttgcacggtgaatgtttcacaagcgtttagtgtggaaattgtggcagccaatcgatggcgatagcagtttccactaaaaaaataagaaagtataggaagaaactttaaagtttaaaacgctcttttatttttaagctcctttccgctcccgagggctttgcaaatatgaagtaaaaaaaccccttttattgctgttgctggtggaaacgtgctcgtcaagcatttttacaattttccaaaaggtactgaacacacacacgggcatattccctcgggggttatttatttgtgttttcggttcatgttttattttttttttcctttatttttgtgacgtggtgatgttgctgcttggctgcaatgccagtcaggaacgtcaaatgaaggggacgagtgcagttttgtgtaaacaataacaaaacacatttgtgacgcgtgattttgcataagttggcacttggttccgacgatattgctgccacaacagcaaccaagccgaacaatgactacaataaatatcctttcaccacatgaagcccctttgaccgcacgaaattcgattatatttcggtttagcagcttagcagtttagcactcaatgaaatcataaacaaaagcgatcgttttggctaagaaaaaacaaatgctattagccgtattcgtagtcggtaagctccaaatgaatgaagacatttttatggccaattaagcgaccgccaaaaaaagaatcacaaatcgccagacataaaattagccaaaggaatcaaatcaattcccgtcagcttaaaaactcattatgcaaattggccaagcccaaatcagagttgccaaatcgttgccagcagatcgcgtccaacctttggagctcaccccacttagccaattgtcgcccacccgccgacctggcaggaaattagctgcagctaatcggagatcgatagatcgatgtggcacactcacctgatcgcgggccaattggaaccaggtcttgatgatcaacgccagccgggtgtcgtgatagttcttcgtcgtctttacgctgatgaaaatgtcatccaactcggtgaccggcggctgtggtgtcgccgtcaccgctctttgggacagatcgcggagcagttccccattccggctccttctggccaattctgttagcagcgtggccgtgggccgctcactgacctcgatgtcgctgaaattgaagctgcgtatatccttgcggattatgacggtggtgggggaggcggccggagctccagcccccggctgggtgggcgtggaggactgcacgtagtcctggagcagctggtcgcgatgtgtggtcacggcttcgctggcaagggcatccacctggctgtgcggcacctgcagagagagatataactttataaaaggaaactatatgcatatatatatatttaaaattttttaaataataagatgaattttcacctagtctagtatttcgagtcaccctattcctattgactagaatctaaagcccttgtgttctaagaacaatatcgtctttttccccagtgtcagccggaagaaatatagcaagtggcgtggggttaatgtaaatttgttgtgtaaatcgcacgtagggcaataaaaagatgaagacgcccccgctctatcggagacactcgactcgaactcgaactgggacggggactaggattgggactggggactcccactcctcgccagatccaacttcgggcattttcacctggcaaacaaaggcgaacttcaatggcaaacaacaatggcaaacaaatgagcggcagcaggcagaataaacaacggcaacaccaccaccataaatgctgagtaagagcaaacaaactgggatcgggattggtattggaattgggattgtaaccggggatcgggattgggatcgggatcggaatagggatggttagaggaagaccagaaacccactgagattgctttgagtcggagtgaactgcttgattaatttccactgataacaggttcatttgcttttgttgtcggcgattcttcaattgctcttctttgagattttcccccattgctcgttttaatggccctccacgaaaatggggacaggtggggcgtggagtttcgcctcgattgagccggagataaaggtcgagtgttcgtctgctcgaatgggaaataccttgggcgaaagacagcccagttctaacactctatgcaaatcgtagggcaacttccgctataaatctaagcgttagctctggcttcccagctttgtcccgccaaaaaaaaagaagagatttctctttggaacccgctggattatattgcttcacacgatattgtctcgttgatagcccatccacaagttgggctcatagaattttattgccgcacgatcgacagccaaacggtgttcaatataatggcagctccctaatgaggaaatcgggagtgagacgataacggtggcaggtgtaaactgccttcgacgccgatgggaaaccgaaactcaaaacccgaagcaattaaatttgctgaaatattaatttggctgcgcagaaatcgcgagtatgggaaatcgcactggagatttgttcaagaaagatagcaaaaaagtcgtgacttgagtgagggattcggcttaaagacaagacagtgaaagccacttggttatataacgcagagaacgcctctttcaattaagcgggttccgtaaattcaaggtttggatcggattagaatgtgcgccagttttccaatccccgacatgatgcaagtggcttaaccgtacaagtatgcaaatcaagtacacggactacggactatgaaaacagcaatgccttgtgacacttttgtgggatttgcgaattactcgaacgtgatgaaactgaacaagcaccgatacagatacatattcacagttgcggattctgattcagattcagctggagatacataaacacgtgtgcccatatatgcaggccgcctgcggattttgacaactacaataagccaaattgaagtaaaaacttttagaaaagaatacactttaaccacacacatcaaaaaagctaattggctaatatgtaagcaagcactttatatggaatacatttttggtaaactacccttgcaccattattcttatttcgtattttctaatagaactcaaattttttcttcaaatgtacagcctacaacatacaagtgccgggtgaaaggtgattcaatagatataaaatcccaaaacaaatttaacacggtccgcacaatagcaacagctgccccccactacgcccactcgaatgactaatgcttcattagccgcgtgattaatatgtttataaacatttccatgtcaattaataacgagcaaaccataagaatcgagcgaagaggtgcgagtgaataatatgaaagggcgccaaatggaatctacccctctcaggcgacctttgggaagattaattgagttaaactctggtcgccataacggaaagcataaatcagcgaaatcgaacaaatcaaaggcattcccgaaaaaatgcaatcagaaccgttcgttcgcctccagctgggcgagcgggaaaatcttcattaaatgctgtttaacaatattatccgtaagatacgaatctaagataagatacacacaacaacaacaacaacaacaacagcagcagctcagcagccaggcatccgagcatccaggctcaattaagcgaccaccaaaagatacccagatacccagatatgggtatcttttactcggttgcccagctgcagatactactccttttatcaggcgccttccgcggcttaatgtcgtcaactttttcgggctgattacgtgagcggcgggcagaaggagggctttgtggatcgaggggccacggaaaggtagctgcaaccagctgcattaagttggccatgggaagtgaagagcaagcacctgcttttggcctggccaaaaacaggaatcacatcatcatcatcatcatcatcgtggtctttgtctctcgggctgcctcgaaggcttcttgtggctgttgctttcctcaagctgatttgcatgctcctcagcttaggagtttgttaatgttattatgtatttaccatgcactcgtcaaaaatatttgaaagtccatactggaaaataaattcggatatcttagaagaagaattagatgtcattacagaaaaaatctatattgtgcacgttcataaatgcacgtaagtaatctactatccatatcgatgtgtcatcggtaagctgatcacagtgtagccacaacaaactactcaaatcaatcagcgactggtggccatttggcgcgccactttaaagaaattcataaacaagcaaatcgtttgacgattattattcatttcgtttcatttatgatttatgcgtcagcaacacgcgacatgccaacctggcgacctggcgacgtgagctgcaactggacatgagacatcagatactgggaatcttggataggcagggttgtggggctgatggagacccccatgacaatacccccgccccgcccccgcccgatttcgaaattattgctttatcaggcgaatgccaagcccagtttagcgcgagtatgtgtccagtcgactgtttagctgttcaacagttcgaagaatcgagccaagccaagtcatgtcaagtcaacaagcagcactttttgcgcaacatttaggaacaaaaagagaacactcatatacgaagtacgaaaagaattaagcaaattgtacgcggcatgcagtttttaaactgggacaagtcacagacctccgatggaacagaacttcaattgaaaagacaaacaacagtacagcagttgtcgacagttttttatccggctcagtatttagtagtgcgatgtgtgtgtagcactaattcctgccaagtttccggttagccccagaacacaaaaataaaaaaaagagtagagcaactggaagagccacaacgtcaacagcattgtccgaattaaaacaacataaagtttttaattacactagcagcagcatgcgaaaacattacaggggagcctccacaaactcgcctcgaagcctcgaagttgggcaattgagttgcaaattgagaagccggaaggtggtgaagggcaaggggattacatggatatttttgaggatgctgcagctgattcaattatgagctcttaactctattgccagcggctcgaatcactaatattatgaaatttgtaagccttagttagggagctgtaacagttgaaggtataactacagcagtagggttcatttaacaaaaatcgaactatataaagaaatgttggaagaaaactttgaggaatctgtatatgcaactgattaaaaatatgtgcactattttcttatggcgtcgtttcatttaaagtttttaaaatatgataatcctagaaggtggacacatagttcgaatttcaagggttctaaaaatagcctgttcgcataaaaccctgccaaaaagtgtttgcaatgcaataggaggctaactaaggccattcccacggacctcaactatttgttatctgtgatgcaactgacaaggttttccactggacgagtccattgagattcacctccatgagatcccccctcgcagcgcacaccttggtaatattagcacacaatattttattacacaaaaatttatgcaaaaatcaagagtaagaagagaacaataataaatgggcagagcagacagggctcagaaccctgacaggccctggaatcaggcaactgaaagctttggcgacgctctgccgacggcaaaccaagaaattcaggaacggttgactggatcttcggtaatcgaaactgggaatactcttgtgggaattggaaagtattggtgattttcaaaaatatattccaagtgcctaatggtatgattttaggattttaataatgtctcgataatgcgagccgatctttgaacatcaactttaacagaattacattctcttgtccttaaatcaatcaaatataagcttaattgtaaaaaaaaaaaacaaataaattcaggatcatatttccatttttgaaacaaaccactaagctaggcactacctctacataaacttctgcacaatttctaaagcaatcaagtccttagttccaaatgaattccccgtgataccgatccccatccaatcaccaatcgtagggtatatccttttaaaacgcttcctcgccgaaatttgtgttcaattatgataccccctattagggtataaaagcgcaaaaagccaagcaccgaaactgttttatatgcaaggcaagggcgtaaaaggtttttttaacggccaaagccgcagctgcaaaactcaagtcgccggcgttgatttatgaaagtgcacgagtcgacgtcgatcgggatcggaatcaaagggggataatgcaaattgcctggcctttgcagctttgcaacttatgcagatcagtgcggagcacacacgtttgacagtttcgcagcgctaacaacacccacgcaagctggattatgtcgcccactcgaactcgcaactcacttggatgcccggatatccgtaggcgctctggtagagcagtagggtcatatagacgacggcgacggctaacatcatggcttgcaggattcgcttaaaacgttgcggtggcgagagcacagtcaggctcatcatacggttacggaccactacgcgcacattgaagcaccgccgatttgatcactgggtaggttttatattccaatattagctggttcttttcctggatcgtatgaattctgctcgatttctgaaattacgatatcttttaagtttatttcgatttcgatatcgcagcacgcgcgcactgacgtcttgcttgtggcaagcttgaaaagcaactgattgtggtagcgcgatctactcttctcttcttccagcgaaaatcgtaaacaaaacaaaaaccagaaagaccagtaagcggtgagagtagcgagagagaaagagagagagagaattccctttgagctggtccaattggaaacgttagctgctccaatgggagcagctggcgctctctcttcgatcgcgctcgctctcatcctctctctttagcttgtgccacagtagctgccgaaggcaattttcatgtgctcgtgtgtcgacccccactcagcccacttctgatcggaatcggggattcggaatcgtgtaaggcagcctttgaaggtcccttttccaggtggcggccgtatccttaaagtaaacatagttcaactgacttggcagcgctccaaatgcggtgacttcttggctatgtcatatatacccccactcccctcctgactaccctgccacgccccaccgcccaccgtcggcgacgacaattccattaaaagttgtacgttgtcactttgcgttaacttatctgtggagcatgttgtgcgatcgcatttttattgtcgccattgtctctcgctctctccatcgctctttcgcctggcttccctaccctgcccacacagggaagcctacacactcttaaatcatgcacttggaacaaaaagtgcaagcattaaactttatttaaacattcaagagccgctcctctatttaccattgaaattttatttcaaatagagaggtcttttcagattatattatacctttaagtggcttagaaatagttagacagtgtatttatggataagtaattaatttaactaaaaaatacaaacagaagaattcttttacaataatttcaaactactaatttctacatccctttctcgctccgtgcatcaaatgcatccacatctcacgtgcgtcggcagcgttctgcgacgtttctttgtcgctcggtttttgtgtagcacttggcc

SEQ ID NO: 22244 - DNA, 1936 bp, DROSOPHILA
caagcaagacgtcagtgcgcgcgtgctgcgatatcgaaatcgaaataaacttaaaagatatcgtaatttcagaaatcgagcagaattcatacgatccaggaaaagaaccagctaatattggaatataaaacctacccagtgatcaaatcggcggtgcttcaatgtgcgcgtagtggtccgtaaccgtatgatgagcctgactgtgctctcgccaccgcaacgttttaagcgaatcctgcaagccatgatgttagccgtcgccgtcgtctatatgaccctactgctctaccagagcgcctacggatatccgggcatccaagtgccgcacagccaggtggatgcccttgccagcgaagccgtgaccacacatcgcgaccagctgctccaggactacgtgcagtcctccacgcccacccagccgggggctggagctccggccgcctcccccaccaccgtcataatccgcaaggatatacgcagcttcaatttcagcgacatcgaggtcagtgagcggcccacggccacgctgctaacagaattggccagaaggagccggaatggggaactgctccgcgatctgtcccaaagagcggtgacggcgacaccacagccgccggtcaccgagttggatgacattttcatcagcgtaaagacgacgaagaactatcacgacacccggctggcgttgatcatcaagacctggttccaattggcccgcgatcagacctggttcttcacggacaccgatgatcactactaccaggagaagacaaagggccatctcatcaacacgaaatgctcacagggccattttcgcaaggcgctttgctgcaaaatgtccgctgaattggatgtcttcctggagagtggcaaaaagtggttctgtcacttcgacgatgacaactatgtcaatgtgccgaggctggtcaaactgctggacgagtatagccccagtgtggattggtatctgggcaagccgagcatctcgtcgccgctggagatccacttggacagcaagaacacgacaacaaacaagaagataaccttctggttcgccactggcggcgctggcttctgcctcagtcgagccctgactttaaaaatgctacccatagcaggtggtggcaagtttatcagcattggcgacaagatacgttttccggatgatgtcacaatgggttttattattgaacaccttctgaaagttcctctaaccgtggtggacaacttccactcgcatttggagcccatggagttcatacgccaggatacgttccaggaccaggtgtccttcagctatgcccacatgaaaaaccagtggaacgtgatcaaggtggacggcttcgatatgaaaaccgatcccaagcgcttctactccctgcactgccagcttttcccctacttcagcttctgcccgcccagatgaactggttgatcccgatccgaggtccctggggatcctatttggctgttgcaggcgcacgtctgcactgggtcggttgtgaaccgctggggcaggcgtcaaaatcaaatctcgccactgtgatttaacattaagtttatagtatacgagcaacgaaaggttctttgtatatatatatgtagcaatacgctggacagatgtgcttcctaatggtataagtaatactgtagctgtaggtcttgcaattccaacacttccaagtgcttccctatagcgttacacgcgattcttccaatcggcttagtgcgtagttaaattaatggtctagtctacgtttaagttatcttagattcagagagaccgcttgaccctctgctgtgtaatactgtaatgcagtctaatgtttgcctaatctagcaatatgcatgtatatagtagattaattaactaagcaatgtttaaaccattttgttaatttttagtttgcttgaataaaacagaatattttattga

SEQ ID NO: 22245 - protein, 411 aa, DROSOPHILA
MSLTVLSPPQRFKRILQAMMLAVAVVYMTLLLYQSAYGYPGIQVPHSQVDALASEAVTTHRDQLLQDYVQSSTPTQPGAGAPAASPTTVIIRKDIRSFNFSDIEVSERPTATLLTELARRSRNGELLRDLSQRAVTATPQPPVTELDDIFISVKTTKNYHDTRLALIIKTWFQLARDQTWFFTDTDDHYYQEKTKGHLINTKCSQGHFRKALCCKMSAELDVFLESGKKWFCHFDDDNYVNVPRLVKLLDEYSPSVDWYLGKPSISSPLEIHLDSKNTTTNKKITFWFATGGAGFCLSRALTLKMLPIAGGGKFISIGDKIRFPDDVTMGFIIEHLLKVPLTVVDNFHSHLEPMEFIRQDTFQDQVSFSYAHMKNQWNVIKVDGFDMKTDPKRFYSLHCQLFPYFSFCPPR

SEQ ID NO: 22246 - DNA, 2524 bp, DROSOPHILA
gcggatgagccgtggtgcgaggcctactggcactcgaggggcacgcccaccgccgaactggagcgccagaagctctttgccaccagtcatcacggcagttcctctttggctctcgctcctgacgaatatcttcgaaagcttctgccctacgacgagcatgtgcagacggtagccccagcagctgcttctgctgccgcccaagtacttcccgtctacaacaaggccatgcttaagtctatgccgctgctggaacagcttacagtgctactgagagatgcgcggatgctctcgttcagcgacgtcattagtattctcgcggagcacgtggatccgcatgtggctgccgacaaggtgctggctttgctgccccaggtgggcatcctactgcacggcaactgggtgccgaaatccgaggtggtctttcccgagaaggtgctttcccatgcgaacggtgtgtccgcagagcagatgattcgcgccagagattatatagtgagttatagtatgggtgtagcgatcacttatcttgtactaatctcctcaaatccatccgcagctctttcgtttctcccgcacgccctacctgttccgagctcaggtaatggccgccacccagttacctcctgcggaaacacttgacgttttgaagactgtggcccgggtgaataacacaaaacggtgggagctgctactgccacccgacaaggagttcgagcaaaagtacccggaactggtcagccgacaggagtaccactggaccgcttccgagcagcactacaatgaaatggactgggctagggaaaccaaacgtgttcggaaacgttcgacgaggaagagcgaatcccagtcactgacttcagccatgccgccgcccgcaatgaatcactcaacaactggctccgtggatgcgtagcatcggatgatgatctcccagcggcggagaatcggcagcacgattatacatctaggcactattaaaaagaccaacaattttactttgttaaagaagtgcttttgtaatctcttctgtaatctctccagccaaggcgttcctattgaatttggtcacctggtaaatcttggatcctgctgactttctcagctgctccaccaaagccaatgttgatttctcgggtatggtgaccaatagggcccgctttttcttcaggagatcagccatggccgactcaaatcgcttgctaagcagctccattttgcccacttcatccacgaccaggagatccggctctggttgggaatcctgtgtgccaagtactggcagagcgagactgtcgaagtcctgcacaaacaccgaatactctcccactttgggtcgtcgcagctggtccccgggattcttgcgagataggattgctcgttttccggctaacgtgaccacgtcgaagccgattctttggctggtgccctcacctcgcatttcctctgtgtagaatccttgaagaatgcgtcctctatcctgcagagccgagcatattttgtggaccagtgtagttttacccactcctgaaaatcatgattacatacataataaacaaatagcaaatattttcccagctaaatttgcacctggtggcccagttagtataatggttatatttttttggttcttcatgtcggcttattattacaataccaattttatagaatatttttgtggtgaactagatcaaccaggaatggatcattggcagttccaaaataaatcttaattaatgcacacatatttagatttaatgagttttaaatttatcaaagaaagaaaatgcttatgtataataatgagcataaacttaagattgtttatgcccttcttaaataagatgaaaacaacaatatattttaaaataaaacggtcgtcttaaaatgccacatttgatgcggtatattttttgaatacgatagcgtattttgagttgcatgctctatggtcacactgcggtgccccccagcacgtccacactgtttccaaacgtcgaacgacgagtgcgtcgtgtttttcgtcgcgcgtgaattgaaaatccgtaattccgagaatattcgtaatccccctccgatccgcaccaactgttgctcgcgattcgaagtgctggctctgaagtataatatacgaaggtcattcaattacaatacgagtgaagtttcaactcgcagcaagctgcattttcagttcttattgtgagattcaaagtggttctgcctgtttcgctgttttatcaccctctccaccaccttccctcattcgcgcgagtgcgtgtgcgtggcggggctataatgttttggccacaaaagcacatcgattaggagtgcagccgatccccgctaaggttataaacaaaacatgtccgaggccgatctgaagaatctatcccagaactcggatggcgaccaggaattgctgctgcatcagaccacgcagtccctgctgatggccagctccataatgtttgtgggaaaccaaggagggccgggcggttccgctgggggtgtcgccccacctggaccc

SEQ ID NO: 22247 - DNA, 524 bp, DROSOPHILA
gagtgggtaaaactacactggtccacaaaatatgctcggctctgcaggatagaggacgcattcttcaaggattctacacagaggaaatgcgaggtgagggcaccagccaaagaatcggcttcgacgtggtcacgttagccggaaaacgagcaatcctatctcgcaagaatcccggggaccagctgcgacgacccaaagtgggagagtattcggtgtttgtgcaggacttcgacagtctcgctctgccagtacttggcacacaggattcccaaccagagccggatctcctggtcgtggatgaagtgggcaaaatggagctgcttagcaagcgatttgagtcggccatggctgatctcctgaagaaaaagcgggccctattggtcaccatacccgagaaatcaacattggctttggtggagcagctgagaaagtcagcaggatccaagatttaccaggtgaccaaattcaataggaacgccttggctggagagattacagaagagattacaaaagcacttctttaa

SEQ ID NO: 22248 - protein, 145 aa, DROSOPHILA
MRGEGTSQRIGFDVVTLAGKRAILSRKNPGDQLRRPKVGEYSVFVQDFDSLALPVLGTQDSQPEPDLLVVDEVGKMELLSKRFESAMADLLKKKRALLVTIPEKSTLALVEQLRKSAGSKIYQVTKFNRNALAGEITEEITKALL

SEQ ID NO: 22249 - DNA, 2825 bp, DROSOPHILA
cggaggaggaatgggagtgccgtaatatccttaatgcgggtagcctgctgggcaaatcctgccaagcttcgctaaagctggccggacagagtgaggaactgcagcgacatgcttaccgctttggcaaacatttggcgctcgcttggcaggcttgcttggatgccgaaccttttcagtgcccccaactgccgctagatgttactttcagtctggttagtgctccagtcctattccacttggagcacgaccctggcatgtattctcaattggaggctggcaagcagtcggtcgataacatcgactacgacaagatccacaaggccattctggccgggccggctttggccaaaaccaaggaactgcagcggaagcacacagccgctgccctggccgttctgcaacatttcccggcgacggacgctcgacaggctctggagaacatcattctggccatgcaggatctttgatcccgagcagcagttactgatttttcacgggttcagggcttaggttagttgtatttattccgttgggtaatttttcagtaaagcagacgttgttgactaatctttaatgattcatttaaagtaaagtttaaatgctttatttttctgaacttcaagtaatacttggtgcaaggtcacaaaaatatattttgtaaatcgtcttgtatcgcaaaagttcatttttattataagggaaaatatagttcgtcataaaaaaggttgtatgttcatatttacataacatagaattggaggatttggaaacattcgagactgtaagatttttttcgcagccttgaaatacaaggcaagagtcccaatttgcagccaataattttccaaaaaaaatatcgtcacaatcaatgttattagtttaattccggtgatatctcaacctaacgtaacaaagccataatttaactaaattattaaggtacatcgaggggccatttgaatctaagaagcggaacgtctttatgtgtgatttacgcattttaacgactgatgatcttcatcagaaccagttgcttgcagcgatcgtactcgaaatactgggggaaatccagaggcaggtgctccatgatccacggcttgttcaccgtctgccggatgaggtactcatacatgggagccaccgaatcgcaatcctccagtgtgaacacatagcgcttctccagtgccatgtatatcgttttgggtctcccagtttggcgacctcgatccaggaggttatccaagacgcagatgaaggcatcggttagcgtatcacagtagatgacatcggcagctaggattatatcgctattgtctatggcctccagcagatcctgcgagtgatcctcttttgaggcgagaaaatcaaactccagaactgatatcgtagcgcggaggagttttgaatttctttggacattgccgcggatcagcttcagtatgcatcccaggtccacatccgtgcaatagatccttccgttattgtgtattccggcggcaatgctggtcaggccgacaccagctcccagttccattagggttttctgggaaaactcatcctttttggagaaaaggtagtctgccagaagaagggctcctcgccacacctgcaagcccaccagccggagctccgtggcctcggaatgttccaattcgatcacgccacgtttcggccttggcacctcaaggtcgccgtctttatccgtcctaatccccgccagcttctcctccggatagacgaaacggaacttcgacaacaccttacctccatcgcgggtcgtctggtagttgttctctccgtagatctccgacgtgaccgtgaacatgatccggttatgtatgcggccaagagcatagggtatatgaatttaatgctgcggtcggtcgagacatcttccccgggcgtcgtggtcgattacaaaatcggtatcgccaatcggtaggcggaaattgtgtttgcattctgtctttgcacagtggatggggacacatatattttaataatttgaaattatttaaatttagtgtttattatttatgcaccgaagaacttttgaaaatgtttaatataaactataaactcgtttcgcttaatttaaggcaagcatatataatcacagtacttaatcgtatctcacggctaagttctaataatttgtgcacatcttaagattagaaccagagctctatatacatatatgtattgaaattatttattatatttaatatacaacttagtcttcttaaaagggaatcactttaaattactatgactttttgatgtttttcatagtgaaaatgtattattcaatctcgagcctaatgagagatagttcgagtgattgtataccactgtgccgatcagctgtttgcagagctggctaccgaaggaaggcaacctggtcacactggatatttaggcgtgcaccgtcggcagacaaaactatcaaatcgaaatttaaattatggaagacgaggacgatcccgtcgtggaggaggtgagtatgtgagtggcactattattaccatgagaacaatgcccgcccatccccaccagattcccgtattcctgtcgaagaacctgagggacagcctgtatctctttcaataccccacgaaaacggagctccccaaccacgatgactccgtgattgtcaattgttgtgtaaaaccaatcgcccaggaggtgaaggtggacttcggcctggacattgagtcggcccacttcgatcgcttcaagggcgagcaatttgcggtggccgccgacggaaagaacacctatggagcagttccaccaaagggtcaggagcgacccacctacaaacg

SEQ ID NO: 22250 - DNA, 825 bp, DROSOPHILA
atgttcacggtcacgtcggagatctacggagagaacaactaccagacgacccgcgatggaggtaaggtgttgtcgaagttccgtttcgtctatccggaggagaagctggcggggattaggacggataaagacggcgaccttgaggtgccaaggccgaaacgtggcgtgatcgaattggaacattccgaggccacggagctccggctggtgggcttgcaggtgtggcgaggagcccttcttctggcagactaccttttctccaaaaaggatgagttttcccagaaaaccctaatggaactgggagctggtgtcggcctgaccagcattgccgccggaatacacaataacggaaggatctattgcacggatgtggacctgggatgcatactgaagctgatccgcggcaatgtccaaagaaattcaaaactcctccgcgctacgatatcagttctggagtttgattttctcgcctcaaaagaggatcactcgcaggatctgctggaggccatagacaatagcgatataatcctagctgccgatgtcatctactgtgatacgctaaccgatgccttcatctgcgtcttggataacctcctggatcgaggtcgccaaactgggagacccaaaacgatatacatggcactggagaagcgctatgtgttcacactggaggattgcgattcggtggctcccatgtatgagtacctcatccggcagacggtgaacaagccgtggatcatggagcacctgcctctggatttcccccagtatttcgagtacgatcgctgcaagcaactggttctgatgaagatcatcagtcgttaa

SEQ ID NO: 22251 - protein, 274 aa, DROSOPHILA
MFTVTSEIYGENNYQTTRDGGKVLSKFRFVYPEEKLAGIRTDKDGDLEVPRPKRGVIELEHSEATELRLVGLQVWRGALLLADYLFSKKDEFSQKTLMELGAGVGLTSIAAGIHNNGRIYCTDVDLGCILKLIRGNVQRNSKLLRATISVLEFDFLASKEDHSQDLLEAIDNSDIILAADVIYCDTLTDAFICVLDNLLDRGRQTGRPKTIYMALEKRYVFTLEDCDSVAPMYEYLIRQTVNKPWIMEHLPLDFPQYFEYDRCKQLVLMKIISR

SEQ ID NO: 22252 - DNA, 3709 bp, DROSOPHILA
gccgcggatcagcttcagtatgcatcccaggtccacatccgtgcaatagatccttccgttattgtgtattccggcggcaatgctggtcaggccgacaccagctcccagttccattagggttttctgggaaaactcatcctttttggagaaaaggtagtctgccagaagaagggctcctcgccacacctgcaagcccaccagccggagctccgtggcctcggaatgttccaattcgatcacgccacgtttcggccttggcacctcaaggtcgccgtctttatccgtcctaatccccgccagcttctcctccggatagacgaaacggaacttcgacaacaccttacctccatcgcgggtcgtctggtagttgttctctccgtagatctccgacgtgaccgtgaacatgatccggttatgtatgcggccaagagcatagggtatatgaatttaatgctgcggtcggtcgagacatcttccccgggcgtcgtggtcgattacaaaatcggtatcgccaatcggtaggcggaaattgtgtttgcattctgtctttgcacagtggatggggacacatatattttaataatttgaaattatttaaatttagtgtttattatttatgcaccgaagaacttttgaaaatgtttaatataaactataaactcgtttcgcttaatttaaggcaagcatatataatcacagtacttaatcgtatctcacggctaagttctaataatttgtgcacatcttaagattagaaccagagctctatatacatatatgtattgaaattatttattatatttaatatacaacttagtcttcttaaaagggaatcactttaaattactatgactttttgatgtttttcatagtgaaaatgtattattcaatctcgagcctaatgagagatagttcgagtgattgtataccactgtgccgatcagctgtttgcagagctggctaccgaaggaaggcaacctggtcacactggatatttaggcgtgcaccgtcggcagacaaaactatcaaatcgaaatttaaattatggaagacgaggacgatcccgtcgtggaggaggtgagtatgtgagtggcactattattaccatgagaacaatgcccgcccatccccaccagattcccgtattcctgtcgaagaacctgagggacagcctgtatctctttcaataccccacgaaaacggagctccccaaccacgatgactccgtgattgtcaattgttgtgtaaaaccaatcgcccaggaggtgaaggtggacttcggcctggacattgagtcggcccacttcgatcgcttcaagggcgagcaatttgcggtggccgccgacggaaagaacacctatggagcagttccaccaaagggtcaggagcgacccacctacaaacgtggcatcatggacaaacaggccttcacaagctcgcgttccataaccgatgtggccaagtacatagtgggcatctttacggatcgggaggtgcatctgtcgccacttacatccatagtccaaatgcgacccgttctcagtcacttcgataaggacgacaagcgcaagaaggcggaactgaaggctcaaacggaggacacggacgatgacgaggtgctgcagcaggtcacggttaaatttgcacgaggaaatgccaaaaacagcggaaaggagcaacgtgtcggcacctacgacagtttcgtccagcgaattgcggatgagccgtggtgcgaggcctactggcactcgaggggcacgcccaccgccgaactggagcgccagaagctctttgccaccagtcatcacggcagttcctctttggctctcgctcctgacgaatatcttcgaaagcttctgccctacgacgagcatgtgcagacggtagccccagcagctgcttctgctgccgcccaagtacttcccgtctacaacaaggccatgcttaagtctatgccgctgctggaacagcttacagtgctactgagagatgcgcggatgctctcgttcagcgacgtcattagtattctcgcggagcacgtggatccgcatgtggctgccgacaaggtgctggctttgctgccccaggtgggcatcctactgcacggcaactgggtgccgaaatccgaggtggtctttcccgagaaggtgctttcccatgcgaacggtgtgtccgcagagcagatgattcgcgccagagattatatagtgagttatagtatgggtgtagcgatcacttatcttgtactaatctcctcaaatccatccgcagctctttcgtttctcccgcacgccctacctgttccgagctcaggtaatggccgccacccagttacctcctgcggaaacacttgacgttttgaagactgtggcccgggtgaataacacaaaacggtgggagctgctactgccacccgacaaggagttcgagcaaaagtacccggaactggtcagccgacaggagtaccactggaccgcttccgagcagcactacaatgaaatggactgggctagggaaaccaaacgtgttcggaaacgttcgacgaggaagagcgaatcccagtcactgacttcagccatgccgccgcccgcaatgaatcactcaacaactggctccgtggatgcgtagcatcggatgatgatctcccagcggcggagaatcggcagcacgattatacatctaggcactattaaaaagaccaacaattttactttgttaaagaagtgcttttgtaatctcttctgtaatctctccagccaaggcgttcctattgaatttggtcacctggtaaatcttggatcctgctgactttctcagctgctccaccaaagccaatgttgatttctcgggtatggtgaccaatagggcccgctttttcttcaggagatcagccatggccgactcaaatcgcttgctaagcagctccattttgcccacttcatccacgaccaggagatccggctctggttgggaatcctgtgtgccaagtactggcagagcgagactgtcgaagtcctgcacaaacaccgaatactctcccactttgggtcgtcgcagctggtccccgggattcttgcgagataggattgctcgttttccggctaacgtgaccacgtcgaagccgattctttggctggtgccctcacctcgcatttcctctgtgtagaatccttgaagaatgcgtcctctatcctgcagagccgagcatattttgtggaccagtgtagttttacccactcctgaaaatcatgattacatacataataaacaaatagcaaatattttcccagctaaatttgcacctggtggcccagttagtataatggttatatttttttggttcttcatgtcggcttattattacaataccaattttatagaatatttttgtggtgaactagatcaaccaggaatggatcattggcagttccaaaataaatcttaattaatgcacacatatttagatttaatgagttttaaatttatcaaagaaagaaaatgcttatgtataataatgagcataaacttaagattgtttatgcccttcttaaataagatgaaaacaacaatatattttaaaataaaacggtcgtcttaaaatgccacatttgatgcggtatattttttgaatacgatagcgtattttgagttgcatgctctatggtcacactgcggtgccccccagcacgtccacactgtttccaaacgt

SEQ ID NO: 22253 - DNA, 1586 bp, DROSOPHILA
cgtgcaccgtcggcagacaaaactatcaaatcgaaatttaaattatggaagacgaggacgatcccgtcgtggaggagattcccgtattcctgtcgaagaacctgagggacagcctgtatctctttcaataccccacgaaaacggagctccccaaccacgatgactccgtgattgtcaattgttgtgtaaaaccaatcgcccaggaggtgaaggtggacttcggcctggacattgagtcggcccacttcgatcgcttcaagggcgagcaatttgcggtggccgccgacggaaagaacacctatggagcagttccaccaaagggtcaggagcgacccacctacaaacgtggcatcatggacaaacaggccttcacaagctcgcgttccataaccgatgtggccaagtacatagtgggcatctttacggatcgggaggtgcatctgtcgccacttacatccatagtccaaatgcgacccgttctcagtcacttcgataaggacgacaagcgcaagaaggcggaactgaaggctcaaacggaggacacggacgatgacgaggtgctgcagcaggtcacggttaaatttgcacgaggaaatgccaaaaacagcggaaaggagcaacgtgtcggcacctacgacagtttcgtccagcgaattgcggatgagccgtggtgcgaggcctactggcactcgaggggcacgcccaccgccgaactggagcgccagaagctctttgccaccagtcatcacggcagttcctctttggctctcgctcctgacgaatatcttcgaaagcttctgccctacgacgagcatgtgcagacggtagccccagcagctgcttctgctgccgcccaagtacttcccgtctacaacaaggccatgcttaagtctatgccgctgctggaacagcttacagtgctactgagagatgcgcggatgctctcgttcagcgacgtcattagtattctcgcggagcacgtggatccgcatgtggctgccgacaaggtgctggctttgctgccccaggtgggcatcctactgcacggcaactgggtgccgaaatccgaggtggtctttcccgagaaggtgctttcccatgcgaacggtgtgtccgcagagcagatgattcgcgccagagattatatactctttcgtttctcccgcacgccctacctgttccgagctcaggtaatggccgccacccagttacctcctgcggaaacacttgacgttttgaagactgtggcccgggtgaataacacaaaacggtgggagctgctactgccacccgacaaggagttcgagcaaaagtacccggaactggtcagccgacaggagtaccactggaccgcttccgagcagcactacaatgaaatggactgggctagggaaaccaaacgtgttcggaaacgttcgacgaggaagagcgaatcccagtcactgacttcagccatgccgccgcccgcaatgaatcactcaacaactggctccgtggatgcgtagcatcggatgatgatctcccagcggcggagaatcggcagcacgattatacatctaggcactattaaaaagaccaacaatttt

SEQ ID NO: 22254 - protein, 486 aa, DROSOPHILA
MEDEDDPVVEEIPVFLSKNLRDSLYLFQYPTKTELPNHDDSVIVNCCVKPIAQEVKVDFGLDIESAHFDRFKGEQFAVAADGKNTYGAVPPKGQERPTYKRGIMDKQAFTSSRSITDVAKYIVGIFTDREVHLSPLTSIVQMRPVLSHFDKDDKRKKAELKAQTEDTDDDEVLQQVTVKFARGNAKNSGKEQRVGTYDSFVQRIADEPWCEAYWHSRGTPTAELERQKLFATSHHGSSSLALAPDEYLRKLLPYDEHVQTVAPAAASAAAQVLPVYNKAMLKSMPLLEQLTVLLRDARMLSFSDVISILAEHVDPHVAADKVLALLPQVGILLHGNWVPKSEVVFPEKVLSHANGVSAEQMIRARDYILFRFSRTPYLFRAQVMAATQLPPAETLDVLKTVARVNNTKRWELLLPPDKEFEQKYPELVSRQEYHWTASEQHYNEMDWARETKRVRKRSTRKSESQSLTSAMPPPAMNHSTTGSVDA

SEQ ID NO: 22255 - DNA, 3942 bp, DROSOPHILA
ttctttcaatcacacacacactacataggcacaccgccggggcagcgaccgctagagcaattaaaaaccattaaacatttccgctgccaatgcttaaacacgtcttgaaaatcatttaatgattttgcgccacaattatttgtcaaacaacggcacttgggcattattatttatatttaatttgctgcacctcttgcacgcatacacgcatacagcacacacgcacaccctctcacttctcgggcaatcgcttttgcatttgcatttttgatcacttttctacgttttaatcgccgtttttgatgttctttccgactaccgatgtaaacttgtcttgaatctttacattttgtgccactttatctatcgcattcgcatacggaaaaatctgcgatcgatttttataacaattcgcaacaaatatgagggaaaacttgccgtcggcggcagagccagtgttgccagctagcacagacagaaaactactaaagaggtggcacaaaagcactaataaataccacagaacactaagtcttcacaatgggaagttcaaaatatacaacaaattaatacttcttaatttagaatggtatattttttaaattatttgttctatgtcttcaaaggtattacacatcttatatataaataaataaaggatctcttaaatttaatttaataacggttatagaaaccttttaatgaaatggtttaagtggtgcgaatgcgtaaagtgattggaatgaagtgtaaaataaaagatatttttattctgtttgaatcaattccgtcaactgattgtttgatccttcttaaaacaaatttttttaaaggtgaatacaaactataataaattgtacaatagaagaatttgtaatctattaaaatggaaacaaataagtgttttgtcaccactagcatccaattgcatcgctaacaccagccacttgtgttcccatccctaagagtgaccgtactccccatggccaaaaagtgtgcaccgaagcggcgctgccgtgcgaaaacctgttcccgctcaagaccgccgttacacaccccctgcgccgcctcctcggaattccatgacactgcgtggggcaataaaaacaaacagaacgcttggcggccacctgagagcggagcagcgaccaactgtaaaagtgggccgcccgggaagaagaagaagcagcgtaggcagcaggtgacgccgacagcgacgtcggcagagacgcaagcagcgacggacctcgaagatttcacttttcgacgaacgatttaactgagcggagctaagaaacgcgattttcatacaagcaattgaaaaaaatagtcgtgttgtaggcgaaaataactagaaaatggccatgtaccgcgccagtgggttaaggattatgcaacagatgcgacgcaggattcccgtcgaactgcagccactccaagtggccaaagctgcgcctgcgctgcaaactttcacttctcagcgctggacttcgacgacgacgaccagtggaaagcatgccagtccacaggttacgaccccgcccccgagacacgactggaatagggcggtcagcgaggcggagcgcatcgtcggctatcccacatccttcctcagtctgcgctggctgctcagcgacgagatcgccaatgtggcgctgcacctgcgcaaactggtgggcagcgcccatccgctgatgaagacggccaagtgagtggtgctgaagggcttatagggcgttgaaatttatgtgaatcttccgcttcaggcacctgctctacaatggcaagaacacgatgcaagcctggggattgatagtgctcctggtgtccaaggccgcaggacatgcacccagtgttccagacgtggagcaggacaagagtgccggagtgctgcactcccaaagggctttggccgaggtcaccgagatgatacggatatctcatctggtgcacaatgtaagtttttgatcaaatgcattcgaaagttactcgtaaactgaaagtggtttgtatgcaaatgagtttaactttcctcaaatttagttgacgaaactcaagaaacgaacatcaatatgtcattggtcgagctgatgcctcatagattataaaaatatttacacttggtcccattttagagcgtggttaatctgcaatcgagcacgcaggctgggcaggatgtggacacctacgacgacatgtcgtttggcaacaagatcggcctgctgaccggcgactatcttctgggccattccagtgcggagctggctaatctgcgcaaccaggaggtggtggagctgatctcgtcggcggtgcgagatttttccgagtcggaattcattggagagcgtgatgaacagaacaacccgctgccttataagccaggaaccttccagcgaccatctctcagcgttggagtggatttcaacgagcacgacgtgatgacgccaatgccgattgcccaggttctcggcaatccggaggaggaatgggagtgccgtaatatccttaatgcgggtagcctgctgggcaaatcctgccaagcttcgctaaagctggccggacagagtgaggaactgcagcgacatgcttaccgctttggcaaacatttggcgctcgcttggcaggcttgcttggatgccgaaccttttcagtgcccccaactgccgctagatgttactttcagtctggttagtgctccagtcctattccacttggagcacgaccctggcatgtattctcaattggaggctggcaagcagtcggtcgataacatcgactacgacaagatccacaaggccattctggccgggccggctttggccaaaaccaaggaactgcagcggaagcacacagccgctgccctggccgttctgcaacatttcccggcgacggacgctcgacaggctctggagaacatcattctggccatgcaggatctttgatcccgagcagcagttactgatttttcacgggttcagggcttaggttagttgtatttattccgttgggtaatttttcagtaaagcagacgttgttgactaatctttaatgattcatttaaagtaaagtttaaatgctttatttttctgaacttcaagtaatacttggtgcaaggtcacaaaaatatattttgtaaatcgtcttgtatcgcaaaagttcatttttattataagggaaaatatagttcgtcataaaaaaggttgtatgttcatatttacataacatagaattggaggatttggaaacattcgagactgtaagatttttttcgcagccttgaaatacaaggcaagagtcccaatttgcagccaataattttccaaaaaaaatatcgtcacaatcaatgttattagtttaattccggtgatatctcaacctaacgtaacaaagccataatttaactaaattattaaggtacatcgaggggccatttgaatctaagaagcggaacgtctttatgtgtgatttacgcattttaacgactgatgatcttcatcagaaccagttgcttgcagcgatcgtactcgaaatactgggggaaatccagaggcaggtgctccatgatccacggcttgttcaccgtctgccggatgaggtactcatacatgggagccaccgaatcgcaatcctccagtgtgaacacatagcgcttctccagtgccatgtatatcgttttgggtctcccagtttggcgacctcgatccaggaggttatccaagacgcagatgaaggcatcggttagcgtatcacagtagatgacatcggcagctaggattatatcgctattgtctatggcctccagcagatcctgcgagtgatcctcttttgaggcgagaaaatcaaactccagaactgatatcgtagcgcggaggagttttgaatttctttggacattgccgcggatcagcttcagtatgcatcccaggtccacatccgtgcaat

SEQ ID NO: 22256 - DNA, 1705 bp, DROSOPHILA
ccgaagcggcgctgccgtgcgaaaacctgttcccgctcaagaccgccgttacacaccccctgcgccgcctcctcggaattccatgacactgcgtggggcaataaaaacaaacagaacgcttggcggccacctgagagcggagcagcgaccaactgtaaaagtgggccgcccgggaagaagaagaagcagcgtaggcagcaggtgacgccgacagcgacgtcggcagagacgcaagcagcgacggacctcgaagatttcacttttcgacgaacgatttaactgagcggagctaagaaacgcgattttcatacaagcaattgaaaaaaatagtcgtgttgtaggcgaaaataactagaaaatggccatgtaccgcgccagtgggttaaggattatgcaacagatgcgacgcaggattcccgtcgaactgcagccactccaagtggccaaagctgcgcctgcgctgcaaactttcacttctcagcgctggacttcgacgacgacgaccagtggaaagcatgccagtccacaggttacgaccccgcccccgagacacgactggaatagggcggtcagcgaggcggagcgcatcgtcggctatcccacatccttcctcagtctgcgctggctgctcagcgacgagatcgccaatgtggcgctgcacctgcgcaaactggtgggcagcgcccatccgctgatgaagacggccaagcacctgctctacaatggcaagaacacgatgcaagcctggggattgatagtgctcctggtgtccaaggccgcaggacatgcacccagtgttccagacgtggagcaggacaagagtgccggagtgctgcactcccaaagggctttggccgaggtcaccgagatgatacggatatctcatctggtgcacaatagcgtggttaatctgcaatcgagcacgcaggctgggcaggatgtggacacctacgacgacatgtcgtttggcaacaagatcggcctgctgaccggcgactatcttctgggccattccagtgcggagctggctaatctgcgcaaccaggaggtggtggagctgatctcgtcggcggtgcgagatttttccgagtcggaattcattggagagcgtgatgaacagaacaacccgctgccttataagccaggaaccttccagcgaccatctctcagcgttggagtggatttcaacgagcacgacgtgatgacgccaatgccgattgcccaggttctcggcaatccggaggaggaatgggagtgccgtaatatccttaatgcgggtagcctgctgggcaaatcctgccaagcttcgctaaagctggccggacagagtgaggaactgcagcgacatgcttaccgctttggcaaacatttggcgctcgcttggcaggcttgcttggatgccgaaccttttcagtgcccccaactgccgctagatgttactttcagtctggttagtgctccagtcctattccacttggagcacgaccctggcatgtattctcaattggaggctggcaagcagtcggtcgataacatcgactacgacaagatccacaaggccattctggccgggccggctttggccaaaaccaaggaactgcagcggaagcacacagccgctgccctggccgttctgcaacatttcccggcgacggacgctcgacaggctctggagaacatcattctggccatgcaggatctttga

SEQ ID NO: 22257 - protein, 448 aa, DROSOPHILA
MAMYRASGLRIMQQMRRRIPVELQPLQVAKAAPALQTFTSQRWTSTTTTSGKHASPQVTTPPPRHDWNRAVSEAERIVGYPTSFLSLRWLLSDEIANVALHLRKLVGSAHPLMKTAKHLLYNGKNTMQAWGLIVLLVSKAAGHAPSVPDVEQDKSAGVLHSQRALAEVTEMIRISHLVHNSVVNLQSSTQAGQDVDTYDDMSFGNKIGLLTGDYLLGHSSAELANLRNQEVVELISSAVRDFSESEFIGERDEQNNPLPYKPGTFQRPSLSVGVDFNEHDVMTPMPIAQVLGNPEEEWECRNILNAGSLLGKSCQASLKLAGQSEELQRHAYRFGKHLALAWQACLDAEPFQCPQLPLDVTFSLVSAPVLFHLEHDPGMYSQLEAGKQSVDNIDYDKIHKAILAGPALAKTKELQRKHTAAALAVLQHFPATDARQALENIILAMQDL

SEQ ID NO: 22258 - DNA, 4304 bp, DROSOPHILA
cgaggccgtaacacaaaaaaagaaaaacacacgcatattacgcatacgccgcgcgctcggcgattagatggctgggaagaaaagaagttattgggttgggcctaattaacgaatgtgtgtcataatgcgacaggcgttagtaggtcaagtagatgcgatgctgggcgattggaggtcgccgcaggttcggtgggggaaaagctctggccaaaagggcaacccgaggacgaggatgggaacgaggtgagatgagtcgcgtttttggagagcaaactgggcgacaagcccgagtacgagtgcgagtaaataaatatatgggcgtttctgggcattcaggcattattgcacattcgccccgtggacgagggtttagcctaatccccactcgcatttcaattatattgcatttttataaattctcaatgtttccttcactcaatatctttctctctgactgtcgtttgcaccacactttcacttttttactttacctcacccacattgcgatttgtactcgaattaatgtttttcactccctactcttgcacaggcaaatgtaagaatgaatctgtactctgtatctggcatgattccaactaaggaaaacgaaaactctaacctaaatcaattaatctaaatagttctcaaacggtttaaagttccaacaacacaatgtacaaagtctaaacatgtttaaaacttctacttaaaactaaaaacttaaccgaaatcaaggacacttcagttaaagtgctaaatccataaggaaacatcactcaatcttccaaataaactaagaaaaggtaagtgccttggaatttcttcctaatatataaatgtttagtttatttttactattctgagtgttacatttagcgtttaatgcaaactttgagcaccactttccacttgaatgaagtagttcaattaaattaaattattgtacacagttccatacgcaaaactttgcttagggagatcgactccacgacgaaatgagctataaaggcagcttttccacggccaaattccatgcgggaagtccgcggcacacgtaaatgcagcagttgtagatattcggctccacttttccttgctgtacgagagataggatagagcacaggctgcccagatggtagttgggttgatcgttcatggtgggcgtggtttcatcttttcctaaatttaaaagaattccttaaatatgtaacttaataatataaataagacattaccttttataatgccatttttgagccaaggcacccgatcaatatgtgtccacggaatcactttgttatcccccggggccaaccaacgactcaatattgtcaccgaaacagtatccatattaccatccaaggcgggcatgagagtaccaactatcgaaggacacagagctccatggtaataatcatgggctccatacaatgcgctgtacaggcccgtgcccaacatgcgtgtagaatcgcagccgaatagaaaaacaacgctgcgtacccgagcccggcaaattatgcgaccattgacgtactgcagcccagaaccgtgacctgcgtatctaaaatttaaggcaaaagtattagaatgccattgttcgcttgcaatcatatcttacacaaagcaatccgcctgtagcgcctgtttcaccatcacctcctcattgggcacggtttcaaaaagatgctgccactgggagagccagtactcaaaaaagctacgcagcctgcggccggagttgaccaaatccgcatctgggtttattacacacatgccacgtttaatatttgttgtgtagtagccatgctttatgtttgatttgtgattctggaacaagcgccataggcaatgcagtgatttgacgcgggagaattcctgcacggtgactagttgttcccaatggaggtggtctagacgctacataaataatatagtagtatgtattatagtatagaaattcagatgaactacctcatcgactaccaggatgatgggaaatcttctgctcgccaggggctgacgctcctccacttccgcccagtcgctggccaaacccttaagcaattcgtatgccgactggatctcattttcgttgctcgacagctcatagcagatgagtttgagatctgcgatttccagtcgattggcatgcgaggccgcttgggaaagtaaaacacgttggtgggtaccccattgattaagcagacagaaatcgtcaacacgagtataggtggctttgatttgtttttgaacaacagtgcagtcatatcttttgccaaagaacagaaaggaatatggagatattatgtcccgaaagtcggcaagtagtttctagaagaggtaaagtaatgctaataagatacattgatattaatgtgtagtacttacttgctgaaaagtgtcaaaaccattcagctcctcccaatacttctgcttagcctctttacctttcatgttgagtggatccacggttaccactcgcctaaatctttccaccagagtgctatactctcgaaagagatttgccgtattttcgttggaaattttcaggcaaatcggtcccagttgggaacttctacagtgtcggagcagagtgagatatattgctccatcgctggcaatgatctcattgaaaacggagtaggtggtggcgggattaaagctcttgcagagctggaggacacaccattcttggggcagactattgcatttctctgaaatgcgagttagaccctctgtaggatcctggacatcatccaggaagtctagatactctggtatttcgttgattggcttctttggctgtttctcctgctccatttgctggaggtacttgatgatgttctgcagaaattttttgctaagaataatgttggtaatgtttgtttgagttttaaaagagtttagttagtttatatatcaccttttgtagtcctttttctccagtttagtggctgatttgatcagctcctctgcggtgggacgctgattttccagttccgccgattcggtaaggtaacgcagatcggtggactggaactgggctttaacctggtagtaaattgagtgctccacattgccattgcggtattcctcatcggcgcgcagtaaattatattctgcagaagaaacatgaacattaacatattattgcgaagatgcagtgggaatttcgaagtttctgggtctgcttatatagttacccttcgcctcggggccaacatctgaactggtgaaaccggccagcatctcagcctcgtcaccggtttccagcatttcctattatttattatttacttaattgcttattttcaaactcgagtccgcaaattgcttcctcctcttcggacgatatcgatagatgccttgtagcctttaccaacactgagctatcgatgggcgatgtgcgataggaaactagctcattttgtggtattttctagtactttttttgaatttcgcggttattattgtgaaaagcattgtacttaatattagtcaaattcgtaagctttaacaaaaatgaaacttaattaaaaatatgaatattaatatttacttttctgcaagcaattcgggtacgccatattactgtattaattacagataacttgtaatttttacgatcatagttatgtagttttaaagtaattaagaattttataacatcctatgcccaataaactataatcgtacgatttaaggcattatagcttttagtacacccgtttttgttgttttgctgtcagcaaaaagctttccctcttgttgatgtttgcggccgttcattcataaaaacatgaatcgagatgaaaaggtgcaagagattgcaggttggccggaaaacagatgttagggttgccacgccacctaaataaggatgagcagcggaagctgcgcagcaaccacaccctctcaaaatggagccttaacatcaattaaatatttgttcaagtgttttagtgtctgattaaaatatattagcgctattttcccatcaaatgcagttcatattcatttccgagggtcaacccttagcctttaaagccttttagtttttggcaaccctaaaccacaccctctagttgccctaaaaaccttacgcaacaacaaaagccaagtacacacatatgtacataccgtacatataggcggccaattaatgcatatgcgagccgagatacaatattttattttttgacttttggttaacttttaagctggcttttttgttgatttttaaatatgtactttttccaagactttgtgacgtgcgtctggagctctgctgccgcctctgccga

SEQ ID NO: 22259 - DNA, 1933 bp, DROSOPHILA
caattaagtaaataataaataataggaaatgctggaaaccggtgacgaggctgagatgctggccggtttcaccagttcagatgttggccccgaggcgaaggaatataatttactgcgcgccgatgaggaataccgcaatggcaatgtggagcactcaatttactaccaggttaaagcccagttccagtccaccgatctgcgttaccttaccgaatcggcggaactggaaaatcagcgtcccaccgcagaggagctgatcaaatcagccactaaactggagaaaaaggactacaaaagcaaaaaatttctgcagaacatcatcaagtacctccagcaaatggagcaggagaaacagccaaagaagccaatcaacgaaataccagagtatctagacttcctggatgatgtccaggatcctacagagggtctaactcgcatttcagagaaatgcaatagtctgccccaagaatggtgtgtcctccagctctgcaagagctttaatcccgccaccacctactccgttttcaatgagatcattgccagcgatggagcaatatatctcactctgctccgacactgtagaagttcccaactgggaccgatttgcctgaaaatttccaacgaaaatacggcaaatctctttcgagagtatagcactctggtggaaagatttaggcgagtggtaaccgtggatccactcaacatgaaaggtaaagaggctaagcagaagtattgggaggagctgaatggttttgacacttttcagcaaaaactacttgccgactttcgggacataatatctccatattcctttctgttctttggcaaaagatatgactgcactgttgttcaaaaacaaatcaaagccacctatactcgtgttgacgatttctgtctgcttaatcaatggggtacccaccaacgtgttttactttcccaagcggcctcgcatgccaatcgactggaaatcgcagatctcaaactcatctgctatgagctgtcgagcaacgaaaatgagatccagtcggcatacgaattgcttaagggtttggccagcgactgggcggaagtggaggagcgtcagcccctggcgagcagaagatttcccatcatcctggtagtcgatgagcgtctagaccacctccattgggaacaactagtcaccgtgcaggaattctcccgcgtcaaatcactgcattgcctatggcgcttgttccagaatcacaaatcaaacataaagcatggctactacacaacaaatattaaacgtggcatgtgtgtaataaacccagatgcggatttggtcaactccggccgcaggctgcgtagcttttttgagtactggctctcccagtggcagcatctttttgaaaccgtgcccaatgaggaggtgatggtgaaacaggcgctacaggcggattgctttgtatacgcaggtcacggttctgggctgcagtacgtcaatggtcgcataatttgccgggctcgggtacgcagcgttgtttttctattcggctgcgattctacacgcatgttgggcacgggcctgtacagcgcattgtatggagcccatgattattaccatggagctctgtgtccttcgatagttggtactctcatgcccgccttggatggtaatatggatactgtttcggtgacaatattgagtcgttggttggccccgggggataacaaagtgattccgtggacacatattgatcgggtgccttggctcaaaaatggcattataaaaggaaaagatgaaaccacgcccaccatgaacgatcaacccaactaccatctgggcagcctgtgctctatcctatctctcgtacagcaaggaaaagtggagccgaatatctacaactgctgcatttacgtgtgccgcggacttcccgcatggaatttggccgtggaaaagctgcctttatag

SEQ ID NO: 22260 - protein, 634 aa, DROSOPHILA
MLETGDEAEMLAGFTSSDVGPEAKEYNLLRADEEYRNGNVEHSIYYQVKAQFQSTDLRYLTESAELENQRPTAEELIKSATKLEKKDYKSKKFLQNIIKYLQQMEQEKQPKKPINEIPEYLDFLDDVQDPTEGLTRISEKCNSLPQEWCVLQLCKSFNPATTYSVFNEIIASDGAIYLTLLRHCRSSQLGPICLKISNENTANLFREYSTLVERFRRVVTVDPLNMKGKEAKQKYWEELNGFDTFQQKLLADFRDIISPYSFLFFGKRYDCTVVQKQIKATYTRVDDFCLLNQWGTHQRVLLSQAASHANRLEIADLKLICYELSSNENEIQSAYELLKGLASDWAEVEERQPLASRRFPIILVVDERLDHLHWEQLVTVQEFSRVKSLHCLWRLFQNHKSNIKHGYYTTNIKRGMCVINPDADLVNSGRRLRSFFEYWLSQWQHLFETVPNEEVMVKQALQADCFVYAGHGSGLQYVNGRIICRARVRSVVFLFGCDSTRMLGTGLYSALYGAHDYYHGALCPSIVGTLMPALDGNMDTVSVTILSRWLAPGDNKVIPWTHIDRVPWLKNGIIKGKDETTPTMNDQPNYHLGSLCSILSLVQQGKVEPNIYNCCIYVCRGLPAWNLAVEKLPL

SEQ ID NO: 22261 - DNA, 2941 bp, DROSOPHILA
cagtgcgcattacatgggagaaggacgagaattatatgcaagtgaaaatgccatttaaaagcagataaataaacttaatgcgaaacagcgccgcaggaaaggatgagaagtgtcacttgtgtggatatttatgtcggttatgggggcattccataaagttcagtgaggaatatcctgtggcgcagatggaaggagagtccgcctccacatcacaactaacatggccaactctattattaggcccagctgagaaccgttaagacacagtctacctgtggccccaccaaattgggccttgcgtgccacaaaacagcgtctgggccatcgccatcagatctccgcctttaaatgctgcgtttgcgaagcgcaaaggaagctataaataacaattaattgtattattaaactaattcgaaaatgcagctacaagaggacgaaaggcagtcagtcatgcgatctcaaaacctgccacatcaatttttggtagccccactttttagcgaactcggtcgactaatttacatttcgctgttctgtccagggcaaaagtaaaagtactcaagtcgtcgaacgtcgtttctaaaaaattgtgccctacggccagaagacacagcctcagtttttgggtcccatcatcccgagaccaatcaattatggaatcggtcaacgatcagcaaggagctgccgactcccgcctgcacgcaatagcccaaaggagtcgagtcggatggtcactcgctggccagtggatcgtggtcgcgaaagttccaacaacttactcataatcaaaagtctctcagaatcaaatatcgaaatttgtaatttaacaaagaagagtagagtgaaaatcattttaaacaaaatcttttattcgataggtaggcataatttatatgacgatgtaaatttatcatttttatacaaccctaaaaatcctacgaaatataatacaaaagccaaaataatattgcagtatcttaatgcaaaaagtttatttcagttacctggaacgggagagcaaagctttgatgccttttacaataaatggctttacgtaatgaacatccgtatagacaccgggataacgcctgctcgcacatccgatcccaaaggacacaatgccgcagacttgtttttcgtaaaccaagggacctcctgagtcgtaggtgcaagcatccttttttcccaaaactgaggcacaaaacatgctatccgatatggagactgcattgaaggaatgcgacttttagaatatattaacgcacttttaagttaagtatataaataacgtgcgaatgtactttcatttcatggagttacattgcaagcgttctcacctgattcccgataggcttcgcggcatattcttttttcaatcacaggtactgataccgtgcggagcatatgccccggaccctcgtcatccggatttgtcattccccagccggatacgtccattgtctgtcccggagtcaaggccgtactgcacaaggatagagttccgatgttttttccaaccatcggtcgattcagtagcaccacagccacgtccatgttcatggtgaccattttaaactgggccgacttaatgaagcgcttaacttgacgacgaatgcctttttcgctgagtctggagatgccaccatccacgctccaggcttccttttctgctcggtcctcaaaacagtgcgccgccgtgaggacaatgagctcatggattaaagtaccgccgcagatgaaattattgaagtaccgcattgccaccaggtatccgcccaatttcgcgttggtggtcacccgaccaccaataacacgggtttgataagccggaggcagcactattttggccaactttttcaagtcaatggtctcgttgtgctgcagggcatgattgtttattaaaataccagcaagcagaaagagaaatagaagacgtttcatgccgagcactgaatggattttaacaacagcttcgtttctgaccgtataaaagtggctttaggaaaactaatcggtgtaaaataatttgattagaattacgattgtataaattaatggcaacaactcgatgctcttctaactagttagtggattcccttaaaatatctccgttcgtatgctgtcagaaaaatcccttcataatgtacatcgaatatatatattttttaaaaatttttcgttttgttcaaagcatgtgtttcaggccacgcctcggtctaagaagaattacaaaacaagttcaaaaatggcttaatcgacaacaatatccaatgagtacggcctcagttgtggtccaatatcacgaagaaccagacaaatcagatggtgacagcaaactttaccgtgccttgaccttatcaaatggattacgtgctatgctaatatcggattcttatattgacgagccgtcaattcatcgtgcgtccagagaaagtttgaattcctccaccgagaattttaatgggaaattggcggcatgtgcagtacttgttggcgttggatcatttagtgaaccgcaacaatatcagggattagcacactttgtggaacacatgatatttatggggtctgagaaattccccgtagagaacgaattcgattcgtttgtgaccaaaagcggcggtttcagtaatgcgcatactgaaaacgaggagacttgcttctactttgagttggatcaaactcacctggataggggtatggatctattcatgaacctaatgaaggctccactaatgcttcccgatgccatgagtcgcgaacgctctgccgtccagtcggagttcgaacagacccatatgagagatgaggtgcggagagatcagatcctggcgagcttagccagtgagggatatccacatggcactttcagttggggaaattataagacccttaaagagggcgtcgatgatagcagcctgcacaaagagcttcacaagtt

SEQ ID NO: 22262 - DNA, 828 bp, DROSOPHILA
atgaaacgtcttctatttctctttctgcttgctggtattttaataaacaatcatgccctgcagcacaacgagaccattgacttgaaaaagttggccaaaatagtgctgcctccggcttatcaaacccgtgttattggtggtcgggtgaccaccaacgcgaaattgggcggatacctggtggcaatgcggtacttcaataatttcatctgcggcggtactttaatccatgagctcattgtcctcacggcggcgcactgttttgaggaccgagcagaaaaggaagcctggagcgtggatggtggcatctccagactcagcgaaaaaggcattcgtcgtcaagttaagcgcttcattaagtcggcccagtttaaaatggtcaccatgaacatggacgtggctgtggtgctactgaatcgaccgatggttggaaaaaacatcggaactctatccttgtgcagtacggccttgactccgggacagacaatggacgtatccggctggggaatgacaaatccggatgacgagggtccggggcatatgctccgcacggtatcagtacctgtgattgaaaaaagaatatgccgcgaagcctatcgggaatcagtctccatatcggatagcatgttttgtgcctcagttttgggaaaaaaggatgcttgcacctacgactcaggaggtcccttggtttacgaaaaacaagtctgcggcattgtgtcctttgggatcggatgtgcgagcaggcgttatcccggtgtctatacggatgttcattacgtaaagccatttattgtaaaaggcatcaaagctttgctctcccgttccaggtaa

SEQ ID NO: 22263 - protein, 275 aa, DROSOPHILA
MKRLLFLFLLAGILINNHALQHNETIDLKKLAKIVLPPAYQTRVIGGRVTTNAKLGGYLVAMRYFNNFICGGTLIHELIVLTAAHCFEDRAEKEAWSVDGGISRLSEKGIRRQVKRFIKSAQFKMVTMNMDVAVVLLNRPMVGKNIGTLSLCSTALTPGQTMDVSGWGMTNPDDEGPGHMLRTVSVPVIEKRICREAYRESVSISDSMFCASVLGKKDACTYDSGGPLVYEKQVCGIVSFGIGCASRRYPGVYTDVHYVKPFIVKGIKALLSRSR

SEQ ID NO: 22264 - DNA, 2984 bp, DROSOPHILA
tttgaacaccaacggcccacctgagtcaaaggtgcacgcatccttacgtcccagcactgcagcacatatcatactgtcggttattttagctgttaaagcaaataaaataaacagtacaagaccgtcgtgtggagtaagccctatttaagttccatacgaacttacccgtgggctgataggcagcgcgacagttctttttgtgaataattggcactgtcaccgtacgtagtaagttgtggggcccacgtcctcggggagcggtcatgccccatccggaaaccaccagttctacgcctggcttaaggctcaccgaacataagctcagtgttccgatgtttttagccttcaatggagttttcagcagtaccactgctacatccatattcatgtcgtcctctcgaaattgctcggacaggatgaagtccttaacatggcgtcgaatacccttttgattgagattcgaaatgccggcagccacaatccattcgctcgccttcattcgacccagaaaacagtgagccgccgtcaggacgatgttttcgttgagcaatgtaccgccacaaacaaaatcgtcttcataaagcaaggctgttaggtatcctcccaacttggcatttgtggtcacatggccgccaattacgcgagtttcatgtggtgatggaagaactatcttggccagctgtgccacatcgagagtgagatttttgcccggttgaccactttcatccggcagggaaagcacaattttctcctgttcttggccatatacttgggtcgaaactaaagtgcaagccagcacgcagcaaacgagatgccattccattgttcacagggagtggagtggaatggcacttgcccaatagaccttccacccaagtcattttacaatataagcgtggcgaatgcagctaatccgagacaaataccacttacatattacatacatgcgacacagtccaataagtatcagataatctctttctttaattttgaaatttaatcatcgttttgccagcaacaccttaatgctctgctcgataaagggcttcacatacattatgtccgtgtagacaccgtagtatctcttactggcacatcctatgccaaaggacacgatgccacatacttgattcttgtacaccaagggaccgccggagtcaaaggtgcatgcatctttttttcccagcactccggcgcaaaacatactgtctgttaaatgaactgaaaacaaataatgtgttttcggaaaggttcttaagacaaaagtagtgtatgctaaataccttttaaaaataaatcaaagtgcttatgactttcccaatctaaagttaccaaagttattaaccccatattgccgtgcaatattccactcacccgtcggcagataggaagcacgacactttttcttatccacgactggcactgtcaccgtacgcaatagtttctgtgggccaaactcactgttctcggtgagaccccaaccggaaacgcggagttccgtgcctggcattagctgttttttgcacaatatcagctgtccgagagacttgcccttcatgggtttctttagccgtaatatggccacatccatgttcatgtcatcctcgcgaaattcggccgacttgataacttccttgacttgacgctggatacctctatcattgagcttggaggcgccgccgacggccaaccaatcgctgatcttcacccgtcccagaaagcaatgcgctgccgtcaggacgataaggtcgtgaagcagggtgcctccgcaaacgaagttcatttcgtagcgcagtgcgattagatagccaccgagctgtgcattcgtagtgacatcaccaccgacgacccgggtctggaatccaggccgttgcacaatctttgccaacttgttcacatcgatggtctggttgaggtcctgggcaaggacttctatgctggctaagggggcagtcagtagacagtaaagcaaaagaccttgcattgcagacgaggggtggagagcaaaaaccacagactgtttctaacgcactccactaattgaagcgtgaagaaacaacttaagctaaaccaatggaaataattcaagacttcgttgtacggcaattgagtttaattgctggtaattggaaagtgtacgctgtggtctgtgtttgtttggtagttgttggttgagcagcgttcgcggatctaggagaagctcaatggtctgatctcctgaaggagctggggaatatagtacatctggttggcatcgcgattacggatatccgtggcttgtgaatacatggagttctaggagaagctcaatggtctgatctcctgaaggagctggcgaatatagtacatctggttggcatcgcgattacgcatatccgtggcttgtggatacatagagttgataagctgatgcagatccgagtaggtctgttgggtaaagacattaagtacattttattacaatactgtttacattcagagtttacccccatattgcgccaagtacttttataattaagttttattactttggtatcgtccgaacagagctccgaaacatccacaaaggtcgaaacctcgggcgttacccggaccgtgacctccgacccatcgtgtatatcccgggtattttgtagacaaagcacgagatcacgatcctttgctaggcgattccactggctgcggctaaacttcatcagcttaccgtgcacggcgatggcatcgtagatgtgcaactcagctgccaggtgcttctgcgagaaatagccctgatcgatgtagaaacatgcgtcgagctccgcaaacacgttcaggttcatgtcctgaaggcgctgtaatgggacgtacaaacgcaaggaattctctctgaagattagacatatttaaccttgcgaagctcgacgaagtccgagatgggtttatcgatatctatatatttgaacggtctatgaacgtactccttgggtatatcaatcgcatggcac

SEQ ID NO: 22265 - DNA, 831 bp, DROSOPHILA
atgcaaggtcttttgctttactgtctactgactgcccccttagccagcatagaagtccttgcccaggacctcaaccagaccatcgatgtgaacaagttggcaaagattgtgcaacggcctggattccagacccgggtcgtcggtggtgatgtcactacgaatgcacagctcggtggctatctaatcgcactgcgctacgaaatgaacttcgtttgcggaggcaccctgcttcacgaccttatcgtcctgacggcagcgcattgctttctgggacgggtgaagatcagcgattggttggccgtcggcggcgcctccaagctcaatgatagaggtatccagcgtcaagtcaaggaagttatcaagtcggccgaatttcgcgaggatgacatgaacatggatgtggccatattacggctaaagaaacccatgaagggcaagtctctcggacagctgatattgtgcaaaaaacagctaatgccaggcacggaactccgcgtttccggttggggtctcaccgagaacagtgagtttggcccacagaaactattgcgtacggtgacagtgccagtcgtggataagaaaaagtgtcgtgcttcctatctgccgacggttcatttaacagacagtatgttttgcgccggagtgctgggaaaaaaagatgcatgcacctttgactccggcggtcccttggtgtacaagaatcaagtatgtggcatcgtgtcctttggcataggatgtgccagtaagagatactacggtgtctacacggacataatgtatgtgaagccctttatcgagcagagcattaaggtgttgctggcaaaacgatga

SEQ ID NO: 22266 - protein, 276 aa, DROSOPHILA
MQGLLLYCLLTAPLASIEVLAQDLNQTIDVNKLAKIVQRPGFQTRVVGGDVTTNAQLGGYLIALRYEMNFVCGGTLLHDLIVLTAAHCFLGRVKISDWLAVGGASKLNDRGIQRQVKEVIKSAEFREDDMNMDVAILRLKKPMKGKSLGQLILCKKQLMPGTELRVSGWGLTENSEFGPQKLLRTVTVPVVDKKKCRASYLPTVHLTDSMFCAGVLGKKDACTFDSGGPLVYKNQVCGIVSFGIGCASKRYYGVYTDIMYVKPFIEQSIKVLLAKR

SEQ ID NO: 22267 - DNA, 5177 bp, DROSOPHILA
tgaggcacaaaacatgctatccgatatggagactgcattgaaggaatgcgacttttagaatatattaacgcacttttaagttaagtatataaataacgtgcgaatgtactttcatttcatggagttacattgcaagcgttctcacctgattcccgataggcttcgcggcatattcttttttcaatcacaggtactgataccgtgcggagcatatgccccggaccctcgtcatccggatttgtcattccccagccggatacgtccattgtctgtcccggagtcaaggccgtactgcacaaggatagagttccgatgttttttccaaccatcggtcgattcagtagcaccacagccacgtccatgttcatggtgaccattttaaactgggccgacttaatgaagcgcttaacttgacgacgaatgcctttttcgctgagtctggagatgccaccatccacgctccaggcttccttttctgctcggtcctcaaaacagtgcgccgccgtgaggacaatgagctcatggattaaagtaccgccgcagatgaaattattgaagtaccgcattgccaccaggtatccgcccaatttcgcgttggtggtcacccgaccaccaataacacgggtttgataagccggaggcagcactattttggccaactttttcaagtcaatggtctcgttgtgctgcagggcatgattgtttattaaaataccagcaagcagaaagagaaatagaagacgtttcatgccgagcactgaatggattttaacaacagcttcgtttctgaccgtataaaagtggctttaggaaaactaatcggtgtaaaataatttgattagaattacgattgtataaattaatggcaacaactcgatgctcttctaactagttagtggattcccttaaaatatctccgttcgtatgctgtcagaaaaatcccttcataatgtacatcgaatatatatattttttaaaaatttttcgttttgttcaaagcatgtgtttcaggccacgcctcggtctaagaagaattacaaaacaagttcaaaaatggcttaatcgacaacaatatccaatgagtacggcctcagttgtggtccaatatcacgaagaaccagacaaatcagatggtgacagcaaactttaccgtgccttgaccttatcaaatggattacgtgctatgctaatatcggattcttatattgacgagccgtcaattcatcgtgcgtccagagaaagtttgaattcctccaccgagaattttaatgggaaattggcggcatgtgcagtacttgttggcgttggatcatttagtgaaccgcaacaatatcagggattagcacactttgtggaacacatgatatttatggggtctgagaaattccccgtagagaacgaattcgattcgtttgtgaccaaaagcggcggtttcagtaatgcgcatactgaaaacgaggagacttgcttctactttgagttggatcaaactcacctggataggggtatggatctattcatgaacctaatgaaggctccactaatgcttcccgatgccatgagtcgcgaacgctctgccgtccagtcggagttcgaacagacccatatgagagatgaggtgcggagagatcagatcctggcgagcttagccagtgagggatatccacatggcactttcagttggggaaattataagacccttaaagagggcgtcgatgatagcagcctgcacaaagagcttcacaagttttaccgagatcactacggctccaaccgaatggttgttgcactccaagcccagctttcgttggatgagttggaggaattgctggtccgtcattgtgcagatattcctactagccagcaaaattccattgacgtatcccagttaaattaccaaaaagcctttcgagaccaattctacaaggatgtattcctagttcagcccgttgaagatgtgtgcaagctggagcttacttgggtgctacccccaatgaagaacttttaccgcagcaagccggatatgtttatttcccaactcattggttatgagggagttggaagtctatgtgcatacctacgtcatcacctttggtgcattagcgttgtggcaggagttgctgaaagtagtttcgattccaactcaatttactccttgttcaatatatgcatttatctgtctgacgatggcttcgatcacatagacgaggtgttggaagccacatttgcgtgggttaagcttataattaatagcgatcaacttcaggattcctataaggaatctcaacaaattgaaaacaataattttcgatttcaaatcgagccgcctcctattgaccatgttcaaagcattgttgagagctttaactacctgccatcaaaagatgtacttactggacctcagctctattttcagtacgaagaatcggctattgagcttctaagacagcatatgaataaatttaattttaatataatgatctcatcctatataccatatgagaaaaatgaatacgatcagagagaaccttggttcggaactcagttcaaaaccatctctatgcccccaaaatggcaaactatgtgggaacagtcagcgactataaaagagttgcactatccgcaaccaaatccctttgtaaccacggattttaaaatacattgggtagaatcgggaaaaccacatgtttccagaagtccgaaggctttgatcagaaatgatttatgcgaactctggtttcgccaggataacattttcaaacttccagatgggtatataaacctgtattttatcactccactagttcgtgaaagtgtcaagcaatatatgctgggagtcctatttacctatttagtggaattcagaatggcagagcaattatacccagccttggaggcaggtctaacttatggcctatacatcggtgataaaggattggttatgagagtcagtgggtacaatgaaaagctgcccctgttggtagaaattatattaaacatgatgcaaactattgagctggatataggtcaagtaaatgctttcaaggatcttaagaaacgacaaatttataatgcccttataaacgggaaatctcttaatcttgatttgcgccttagcattttggaaaataagcgtttcagcatgatttcaaaatacgaatctgttgacgatataaccatggatgatataaaatcctttaaggaaaattttcataaaaaaatgtatgttaaaggtttaatacagggcaattttacggaagaccaagccacagatttaatgcaaaaagttcttgacacatataaaagcgaaaagttggacaatttatcggccttggataatcatttactgcaaatcccattgggatcatactatttaagagctaaaacgcttaacgaggatgattcaaatacaattataaccaattactatcaaataggaccgagtgatctgaaaatggaatgcatcatggatctggtggaattaattgtcgaggagccgtttttcaaccaattaaggactcaggagcaattgggctacagcttgggaattcatcaacgaattggatatggtgtgttggcctttcttatcaccataaatactcaggagacaaaacatcgagcagattatgtggagcaacgtattgaagcctttaggtctcgaatggctgaacttgtctcccagatgagtgatacagagtttaagaacatacgagaaactctaattaatggaaaaaagctgggcgacacaagtttggatgaggaagttttgagaaattggagtgagattgtcacaaaagaatacttctttaatcggatagaaacgcaaatacaaatgctgagccatttaacgaaggaggacgtattgaacttccttaatgataatgataaaaacaatttaagaaaactttctgtccaagtggtgggaaaccataatcaaacatcaaattcaacagcccaagccagtcgatccggatctttgagtgacttattagacgatgtacaggacaatatggcaaatgaaacagattcagctaagccaatgaccgataagatcagacttgagtttttgggagagagcgatgatccttcaagcattaaggatatttatgctttcaaaaaggatctatatgtctttcccctgttcaacaccaatcccaatcttgcaaataaatcgtaaaaatataccgtgcaataaatttgattagcactattatttttgctcagcatgttcaactttaagttgtgcctccctcctgagaattgttatgaagccagtacaattacgcggtatatgtccatgcaatgttaccagtggagtcttaccgatcaaaatacgatgtatttctatctcggtatgcctataattaagcaagccaaatccgaaagagcgagaccaaatgagaccagaacatattttataaatgatttctaagtgtagaaagcttttatttatcgttttgctagcaaagctttaatgcttttctcgataaaaggcttcacgtacataacatccgtgtagacgccaggataacggttgctagcacatccaatgccaaaggacactatgccacacacctgctttttgaacaccaacggcccacctgagtcaaaggtgcacgcatccttacgtcccagcactgcagcacatatcatactgtcggttattttagctgttaaagcaaataaaataaacagtacaagaccgtcgtgtggagtaagccctatttaagttccatacgaacttacccgtgggctgataggcagcgcgacagttctttttgtgaataattggcactgtcaccgtacgtagtaagttgtggggcccacgtcctcggggagcggtcatgccccatccggaaaccaccagttctacgcctggcttaaggctcaccgaacataagctcagtgttccgatgtttttagccttcaatggagttttcagcagtaccactgctacatccatattcatgtcgtcctctcgaaattgctcggacaggatgaagtccttaacatggcgtcgaatacccttttgattgagattcgaaatgccggcagccacaatccattcgctcgccttcattcgacccagaaaacagtgagccgccgtcaggacgatgttttcgttgagcaatgtaccgccacaaacaaaatcgtcttcataaagcaaggctgttagg

SEQ ID NO: 22268 - DNA, 2727 bp, DROSOPHILA
atgtgtttcaggccacgcctcggtctaagaagaattacaaaacaagttcaaaaatggcttaatcgacaacaatatccaatgagtacggcctcagttgtggtccaatatcacgaagaaccagacaaatcagatggtgacagcaaactttaccgtgccttgaccttatcaaatggattacgtgctatgctaatatcggattcttatattgacgagccgtcaattcatcgtgcgtccagagaaagtttgaattcctccaccgagaattttaatgggaaattggcggcatgtgcagtacttgttggcgttggatcatttagtgaaccgcaacaatatcagggattagcacactttgtggaacacatgatatttatggggtctgagaaattccccgtagagaacgaattcgattcgtttgtgaccaaaagcggcggtttcagtaatgcgcatactgaaaacgaggagacttgcttctactttgagttggatcaaactcacctggataggggtatggatctattcatgaacctaatgaaggctccactaatgcttcccgatgccatgagtcgcgaacgctctgccgtccagtcggagttcgaacagacccatatgagagatgaggtgcggagagatcagatcctggcgagcttagccagtgagggatatccacatggcactttcagttggggaaattataagacccttaaagagggcgtcgatgatagcagcctgcacaaagagcttcacaagttttaccgagatcactacggctccaaccgaatggttgttgcactccaagcccagctttcgttggatgagttggaggaattgctggtccgtcattgtgcagatattcctactagccagcaaaattccattgacgtatcccagttaaattaccaaaaagcctttcgagaccaattctacaaggatgtattcctagttcagcccgttgaagatgtgtgcaagctggagcttacttgggtgctacccccaatgaagaacttttaccgcagcaagccggatatgtttatttcccaactcattggttatgagggagttggaagtctatgtgcatacctacgtcatcacctttggtgcattagcgttgtggcaggagttgctgaaagtagtttcgattccaactcaatttactccttgttcaatatatgcatttatctgtctgacgatggcttcgatcacatagacgaggtgttggaagccacatttgcgtgggttaagcttataattaatagcgatcaacttcaggattcctataaggaatctcaacaaattgaaaacaataattttcgatttcaaatcgagccgcctcctattgaccatgttcaaagcattgttgagagctttaactacctgccatcaaaagatgtacttactggacctcagctctattttcaaatggcagagcaattatacccagccttggaggcaggtctaacttatggcctatacatcggtgataaaggattggttatgagagtcagtgggtacaatgaaaagctgcccctgttggtagaaattatattaaacatgatgcaaactattgagctggatataggtcaagtaaatgctttcaaggatcttaagaaacgacaaatttataatgcccttataaacgggaaatctcttaatcttgatttgcgccttagcattttggaaaataagcgtttcagcatgatttcaaaatacgaatctgttgacgatataaccatggatgatataaaatcctttaaggaaaattttcataaaaaaatgtatgttaaaggtttaatacagggcaattttacggaagaccaagccacagatttaatgcaaaaagttcttgacacatataaaagcgaaaagttggacaatttatcggccttggataatcatttactgcaaatcccattgggatcatactatttaagagctaaaacgcttaacgaggatgattcaaatacaattataaccaattactatcaaataggaccgagtgatctgaaaatggaatgcatcatggatctggtggaattaattgtcgaggagccgtttttcaaccaattaaggactcaggagcaattgggctacagcttgggaattcatcaacgaattggatatggtgtgttggcctttcttatcaccataaatactcaggagacaaaacatcgagcagattatgtggagcaacgtattgaagcctttaggtctcgaatggctgaacttgtctcccagatgagtgatacagagtttaagaacatacgagaaactctaattaatggaaaaaagctgggcgacacaagtttggatgaggaagttttgagaaattggagtgagattgtcacaaaagaatacttctttaatcggatagaaacgcaaatacaaatgctgagccatttaacgaaggaggacgtattgaacttccttaatgataatgataaaaacaatttaagaaaactttctgtccaagtggtgggaaaccataatcaaacatcaaattcaacagcccaagccagtcgatccggatctttgagtgacttattagacgatgtacaggacaatatggcaaatgaaacagattcagctaagccaatgaccgataagatcagacttgagtttttgggagagagcgatgatccttcaagcattaaggatatttatgctttcaaaaaggatctatatgtctttcccctgttcaacaccaatcccaatcttgcaaataaatcgtaa

SEQ ID NO: 22269 - protein, 908 aa, DROSOPHILA
MCFRPRLGLRRITKQVQKWLNRQQYPMSTASVVVQYHEEPDKSDGDSKLYRALTLSNGLRAMLISDSYIDEPSIHRASRESLNSSTENFNGKLAACAVLVGVGSFSEPQQYQGLAHFVEHMIFMGSEKFPVENEFDSFVTKSGGFSNAHTENEETCFYFELDQTHLDRGMDLFMNLMKAPLMLPDAMSRERSAVQSEFEQTHMRDEVRRDQILASLASEGYPHGTFSWGNYKTLKEGVDDSSLHKELHKFYRDHYGSNRMVVALQAQLSLDELEELLVRHCADIPTSQQNSIDVSQLNYQKAFRDQFYKDVFLVQPVEDVCKLELTWVLPPMKNFYRSKPDMFISQLIGYEGVGSLCAYLRHHLWCISVVAGVAESSFDSNSIYSLFNICIYLSDDGFDHIDEVLEATFAWVKLIINSDQLQDSYKESQQIENNNFRFQIEPPPIDHVQSIVESFNYLPSKDVLTGPQLYFQMAEQLYPALEAGLTYGLYIGDKGLVMRVSGYNEKLPLLVEIILNMMQTIELDIGQVNAFKDLKKRQIYNALINGKSLNLDLRLSILENKRFSMISKYESVDDITMDDIKSFKENFHKKMYVKGLIQGNFTEDQATDLMQKVLDTYKSEKLDNLSALDNHLLQIPLGSYYLRAKTLNEDDSNTIITNYYQIGPSDLKMECIMDLVELIVEEPFFNQLRTQEQLGYSLGIHQRIGYGVLAFLITINTQETKHRADYVEQRIEAFRSRMAELVSQMSDTEFKNIRETLINGKKLGDTSLDEEVLRNWSEIVTKEYFFNRIETQIQMLSHLTKEDVLNFLNDNDKNNLRKLSVQVVGNHNQTSNSTAQASRSGSLSDLLDDVQDNMANETDSAKPMTDKIRLEFLGESDDPSSIKDIYAFKKDLYVFPLFNTNPNLANKS

SEQ ID NO: 22270 - DNA, 2953 bp, DROSOPHILA
tgctcctgattctcttcaacataactatgtttgttctgacggctaaacacataatagattccaagaggactcttcgaaagattgctcgcaatgaaggtagaatacagaagctgaattcggacaaacagaagtatatcaattataatagttgaaaatgtcagtttaagataaatattatcaattcgttacagttacacacaatttctgctgctcttcactgtgatggggatgtcgtggagctttgagatattctcctacttggtgcaacgcgagaaactgtgggtcaatatctttctggtagctgactacttcaactggtcccaaggcgtcattatatttgtgctattcattctgcggcgcaaaactcttgtactattcaagaaacagtaagtcttatagttcatagttcgggtaaccagttccctaaaatgtctcttttcagaatatttcccaaacagagagcctttagtagatctgcaactcaaagtacgattgaatccatttctcaaacaaaaaggcattttaacatgacatagtattttcttctcttcgaattaatcaatttaatagtaaagtataactttttttctcacaaaatgtatgaatatatttcacttcattctacattctatatagaattcatttaatcacaaaatgtatgaatatttttctttatatgacgtgcatcgactatagaaaatcgactatagtgtgccacaatatattttactcatcatttcctaatcaaactattgcaaacttaactttgagccgaggaaaaaccctgtatgtctatcaaaactatgagtcaaaagtatgacgcgatgctgaaagtagttgcctttaaatattgaagtgataaatgtagaaagaagacatttgtatggaaataaactaagtttgtaaatctacattcgctttatttcatgtacaaattttaatttaaaaactttgaaggtaaatagtgctttatcagatgcggattacacggtagcagttatcatcgatgtcgaatcttcttgtttatgtgaccgcttttcttcgctgtcgcactggagttcgtggatagtttgctctttgtattcgaagtgggtgtgccgaggagatccttgttccctccactgttcgtagatccagacaccattccgctcactacgctgccctcattgcgatgcgagggtgaatctgtaaataaaaaggtgtaattaaacatatatacttttctggagaaaagcgctaaagttgaatctcaatgtgctgtgctgccttacccttttcgtctttcggtgtgctcttgattgtcgtggttccgtcgtgggccgttgtggtgttctgattgattgagatctgattgtcgctggagtcttcatttgtgatggaatccgattcgctggcgcgctcagctaaaggcgaataaacatactcatgtatggcaactaaagcgtatcaatttacacccttctgggcataaagcctagatcgattacacaagcgaatgacacagtatgaattatcccccacttacgattgcatatagccatggaggtgatgctggacttggagaacaggcgctcggcctccttgaacttgcgattccgcttgtcggccttggagttggtggccttgttggaggtcagatagcgctcccagcctcggatgatgtttccgcacaactgcgtgtcctctaggtaggagccctcgaaggcgtagatctgtcgctccagattggccagttgttcctgtcatttatgcaacaaaaaaatgataaagtgctgcgatttcgggtttgtttatattgtgtctcaccgatgtttcggccttcttcttgatgaggtccgccaactcggcgcgagtgtccatggagccgcctttcgtattcgagctcgttttggccgacttctttggcttgttcccgttcgtttcgctgacatttttactcgttggcgagctcatattttcagaaaatgctcgaatttcaacaaatttatattttgttttggacaatgtgaccggatattgataaaaagtaattacaattaatcgatttacggatatctgttccgactatcggtttatgtctttgctgaaatatgcatgctagttcttaacctaattgcataggtggcgttgtcgtttttctttaacaagctaatttataaactattagtttgaatgaataagtcttatattatttgtgtatatgttttatagattctttaaatgttagtttctgcacttaaaattcaaagttatttcataataaatccattgaaagtttgttaatactgcatttattcacttttgtaagtgaataggactgccgaaatcaaaaaatagcccaggaaaaaaaaaaactggtcaaagaactcagttacaaaacttgatgaccatttatttttgtaagatttttcttattagatccatatgttttttttcacattttcttagattttatttaacagtgcttgccccttcaccactttgcattttgaagccagtgtggctgccattgacctctcgtcttgttatttttatttatgcgtataccacggacaaaagattcagttcagctgtagcgccatcatcatcgtctttttgatggtgatcttctaatgatctccccgtgggtcttgcatagtttgttgacccaagttcgtttcaaagtttgttgaactgccgaaaaaaagtgaagctaccgttctagctctctatttctttccgaaccctctttcctctttttccgcctttcgctctcttgccgcctactctttctcttttacttggctctattttggctaccgctttttatgggccttcgtcgtcgcgcctatttcactttcgtcatacgcggcgtatgcgtgattttatttctgcagcacatcgcctttcgcgctgactataggaaagcaatataaagtgaggctgcggatgaagacgaactcgattagaaaat

SEQ ID NO: 22271 - DNA, 678 bp, DROSOPHILA
atgagctcgccaacgagtaaaaatgtcagcgaaacgaacgggaacaagccaaagaagtcggccaaaacgagctcgaatacgaaaggcggctccatggacactcgcgccgagttggcggacctcatcaagaagaaggccgaaacatcggaacaactggccaatctggagcgacagatctacgccttcgagggctcctacctagaggacacgcagttgtgcggaaacatcatccgaggctgggagcgctatctgacctccaacaaggccaccaactccaaggccgacaagcggaatcgcaagttcaaggaggccgagcgcctgttctccaagtccagcatcacctccatggctatatgcaatcctgagcgcgccagcgaatcggattccatcacaaatgaagactccagcgacaatcagatctcaatcaatcagaacaccacaacggcccacgacggaaccacgacaatcaagagcacaccgaaagacgaaaaggattcaccctcgcatcgcaatgagggcagcgtagtgagcggaatggtgtctggatctacgaacagtggagggaacaaggatctcctcggcacacccacttcgaatacaaagagcaaactatccacgaactccagtgcgacagcgaagaaaagcggtcacataaacaagaagattcgacatcgatga

SEQ ID NO: 22272 - protein, 225 aa, DROSOPHILA
MSSPTSKNVSETNGNKPKKSAKTSSNTKGGSMDTRAELADLIKKKAETSEQLANLERQIYAFEGSYLEDTQLCGNIIRGWERYLTSNKATNSKADKRNRKFKEAERLFSKSSITSMAICNPERASESDSITNEDSSDNQISINQNTTTAHDGTTTIKSTPKDEKDSPSHRNEGSVVSGMVSGSTNSGGNKDLLGTPTSNTKSKLSTNSSATAKKSGHINKKIRHR

SEQ ID NO: 22273 - DNA, 3450 bp, DROSOPHILA
gtggcgaaccagaaggttatcttcttgtttgttgtcgtgttcttctgcaggtcgaaagaaagtggagaagagggccaagattaacggaagaactggttcatgaatgggtagcccaaaaaaagaggatgactaaaccaaaggctaaacccaaataaatatccttttttttatcttcgtcttatttctggtttttggcaatggcccagagaaaattgactcgaaatgaaaaccgaaaaagaagcttaataccgaaacgtggcttgattaattgaccatgtaaatggacatgtgcgagctggaaacttaatacatgggtctggaccaaaagtaagccgagactcgacaggatctttctcccgcaaatgaagcgtaaagtttggggtttttaattatgcacgctgcagcgatcagggctggattggtttggtgtgccagattttgaatggatttctgagcacgcagtttacctggttgcttttgctcacatccctggcaaacctggctaaaccgataaaactatggcctgtacattcattacgggatcagctcgcggtatatcaaatggatcggactgaaaaacgggttcaaattcggactcaaactgggactcgtatacagactgctgctgctattgctattgctattgctattgctgttactcttttgccgcgccagatcatatcggttattaatgatagcttgcgctggcagctggaagccaaatggcggcatagacaaatggccctggtggtaacataaataacggccacggttcggcttttgggccgggccagaagatggagaaaggcgatcgcagtcaggcttgtaattacgaactatataggaaaatatgcaaaaataactggcatttgcacttacgctgtccaagtggatctccagcggcgacgagatgctcggcttgcccagataccaatccacactggggctatactcgtccagcagtttgaccagcctcggcacattgacatagttgtcatcgtcgaagtgacagaaccacctggaaaacagtatcagagttaaacacattcgaattcgagttcactcaaactaaaattcttatatttcttttactatatttgaacaattaaaaacgtgcaaaaatgccagctcatttggatttaaccctagaggaaatgaccaggattgctttgggtgtgcccgagttaacccacgtaaatgtggctgtactccaaagtcttttgaatgtccttctcaagaaactgaactgtcagaatgatatggtaaggataagtggcttcgagggcaagtgtatggagcgcattctcgagcaatccaaaatatctccactgcccttcgacgtggaggctattgttccaatttccgagcaattggataaagttcaagagttggacaaacgcatcaagcagctggagtgcaagttggagtgtcactttcagcagattcgcatttgcaacaaggccaaggacaagaagtacaagatcaaccaggccgaacagtacgcctctccttgcgaggatctgtgcaccgtttgcgatgaggacaacaagatcgcatgcagtctgctggccaacatggacttcatgaaaaagctaatgcgacgtatagccacacccattctggaccgaatggaagaggtcagccacaagctggagaagttctacctcacacttgaggcttttcttaagcaaaccgaagctttatttaatcgtttggaaatagtcaagcaatgtgtggtggagatcgaaggtctgaggactcttgttcaggaatacaaccttacttttctgggaaccatggaggaactgcaggatatgctcgacagcaagctggataaggtgcatatgcctgctcttaagaagtatatacgcgatcgcttcgatgatatagatcgccggctgagattgattgaggataaggatgcatgtcccagggccgctggatttatcaatacggggctatcttgtctatcctgtaatagtcccaaagtgggtgtcgacgtcggtcctcaaaccatgggactattcccggacgctccggtcaggcacctgcctcccaagttaaccggatcaccggtaaattgtcagaagatcgtggtctgtagatctgtggagaaggaacctaccctaatggtgcgagtaaacaaccttgatctgagtgtcctctcccaacgtcttgctcgtcctgcctctggcaaagtctgcaagttgcccgaagctaatgacgccatctatggcgttcgtaattcctgtatatccggtcaggaccactacccagtataacttacagctagtcgccatccaaatcgattagtttccgcaataaagaatacaactcaaggctgtgtccgttaagccgcatataaaaagtgcactaatttagattgcaattacccgggttgaaggtaagagctatgtctgcaaagcccagagtgcagctgcagtttttatagtgacaaacgatcagccatatccggtagcccacggtggactaatgatggcattaagcggcagctgaaaggtccgcgctgaccatcattatcgtaggcttcgctatgggtgcagttcccctttcgttgaggggatccccttaaagatgatattggtaacgcgggaatttacttggattccgcaaaggggaggctcgataaagagaaatttatacactgcaattccgggtaatcagatttagtacgctttctgcttaaattttggctgcaatattgtggatatctagcggacaggtatctgttaaaataaggacttacattgaatggatattaagggtaactactagaagctaaaaccaataaatggttcaaaagaaatgtatatttctgtacatgtgtagagtatcatcttcttcgacttgccaagtacatttctggggattcgcgactttcgccgagctcgtaagtattcaataaaatcgaatcttggaggattggctggtcttgggtttcttgtcgttgcgtctgttgggtaatttaatataatttttattgcataagactagagtagacaaggaggtggagtttcgtgtgtatgtgtgtggtactcagatagtcagtcgatgctactcccaaagcctggcattcataaattgcctggtcggatgatgttgctgctgttgtctacgactttggctgctgttgcggctgccacatgcgatacctgtgcgaaaaggccgcaactccccgagttttaacaacctctttacccctcctacatctacgactcgcccaccccaacccttagtttctacgtgaggcataaaaatgcgcgtttaatttgcttaattatgcacaaagcacagcccctccgttttttagttccccctctttttagtttttcataggcagctgctttccctgcttccaaattgaaatctagacgctggtttatgttcgatgtcgtttaattaacgccagtccccctctttgatttcatt

SEQ ID NO: 22274 - DNA, 1450 bp, DROSOPHILA
tcgaagtgacagaaccacctggaaaacagtatcagagttaaacacattcgaattcgagttcactcaaactaaaattcttatatttcttttactatatttgaacaattaaaaacgtgcaaaaatgccagctcatttggatttaaccctagaggaaatgaccaggattgctttgggtgtgcccgagttaacccacgtaaatgtggctgtactccaaagtcttttgaatgtccttctcaagaaactgaactgtcagaatgatatggtaaggataagtggcttcgagggcaagtgtatggagcgcattctcgagcaatccaaaatatctccactgcccttcgacgtggaggctattgttccaatttccgagcaattggataaagttcaagagttggacaaacgcatcaagcagctggagtgcaagttggagtgtcactttcagcagattcgcatttgcaacaaggccaaggacaagaagtacaagatcaaccaggccgaacagtacgcctctccttgcgaggatctgtgcaccgtttgcgatgaggacaacaagatcgcatgcagtctgctggccaacatggacttcatgaaaaagctaatgcgacgtatagccacacccattctggaccgaatggaagaggtcagccacaagctggagaagttctacctcacacttgaggcttttcttaagcaaaccgaagctttatttaatcgtttggaaatagtcaagcaatgtgtggtggagatcgaaggtctgaggactcttgttcaggaatacaaccttacttttctgggaaccatggaggaactgcaggatatgctcgacagcaagctggataaggtgcatatgcctgctcttaagaagtatatacgcgatcgcttcgatgatatagatcgccggctgagattgattgaggataaggatgcatgtcccagggccgctggatttatcaatacggggctatcttgtctatcctgtaatagtcccaaagtgggtgtcgacgtcggtcctcaaaccatgggactattcccggacgctccggtcaggcacctgcctcccaagttaaccggatcaccggtaaattgtcagaagatcgtggtctgtagatctgtggagaaggaacctaccctaatggtgcgagtaaacaaccttgatctgagtgtcctctcccaacgtcttgctcgtcctgcctctggcaaagtctgcaagttgcccgaagctaatgacgccatctatggcgttcgtaattcctgtatatccggtcaggaccactacccagtataacttacagctagtcgccatccaaatcgattagtttccgcaataaagaatacaactcaaggctgtgtccgttaagccgcatataaaaagtgcactaatttagattgcaattacccgggttgaaggtaagagctatgtctgcaaagcccagagtgcagctgcagtttttat

SEQ ID NO: 22275 - protein, 386 aa, DROSOPHILA
MPAHLDLTLEEMTRIALGVPELTHVNVAVLQSLLNVLLKKLNCQNDMVRISGFEGKCMERILEQSKISPLPFDVEAIVPISEQLDKVQELDKRIKQLECKLECHFQQIRICNKAKDKKYKINQAEQYASPCEDLCTVCDEDNKIACSLLANMDFMKKLMRRIATPILDRMEEVSHKLEKFYLTLEAFLKQTEALFNRLEIVKQCVVEIEGLRTLVQEYNLTFLGTMEELQDMLDSKLDKVHMPALKKYIRDRFDDIDRRLRLIEDKDACPRAAGFINTGLSCLSCNSPKVGVDVGPQTMGLFPDAPVRHLPPKLTGSPVNCQKIVVCRSVEKEPTLMVRVNNLDLSVLSQRLARPASGKVCKLPEANDAIYGVRNSCISGQDHYPV

SEQ ID NO: 22276 - DNA, 4169 bp, DROSOPHILA
tcgaacatcatcagttaacgacaagaatccgaaaggctttatcaatggtgttgtcatggaataaccccaaagtactccatccatcctgtgctcccaaacgaaaagaaaacgaatggaagtgccagaattggccccctaataaatgggatgataagaccgttgaagttgtttgcctcccagtaattggaaaacaatttgagggtcaatgttaccgagtgaatcaaaaatagtaaaagtgaaacgatctgtgtgttcgctgataatggccaagatgaagggggcttatactgtcataaactttttttttggttttatatattgaatttattattagattatcgactattgctaatcagcacatttcttgcatcgtacataacttaattggcgcaaacaagttcaagtcacattttgttgcagttgcatagattgataagttttctaggcaaacaattcaaataaaatactcgatgtacaccgtatgcaacgtaacatacgcacatatatgacataaaagttatcttcggaaatatatcaaatattttgtgtaagcaagcttcttagtaatttaagtaagtagagaaatgttattttatggaacagtagaaattacaaaaccaaaaattagtgtataggattaattgactcttaaaactagcaaaacgtaaatgcaacagaaagagcttttaattcacaatgttttcccaaattttctcatttgaaacgtctagtcttataattccgaagtaaaccttttaggtgatatatgtagtttgcgtatacatcgttaaactgaatcttttatctttggtgcgaatatattggactggcattcattttcacaccaacatgagaagtgggtaacccaaagagacgaaaagaggagagccaactggagctaaagttgtgaaacagaactaaaactctactcaataaatacaattgttaatcgattaggatgatatacagatctgggggtgggtttgcagtcgcagggctcttagtctattttcacattggaatagattttgcgcacgaagagattcgtgcccacatagccgacggtgccgcagataatgcccaaggcgccgctgaagagtgccatgtagccaaagtagaaggccgtttggaacagaccgaacattctgtaaagtaatgaaatataaatatatggataatatgctagaaaaaggcatcttacttggttttaaagaagaagtaatagaaggaataggcgtacacgtaaatcgacgtggagcccgcagccatgaaactcgtccactgccatcggtaatcttcggcatttagcaggaagtaggtgcacacgatggtgacgcacacggtgaccacagtcaggatgctgaaaaccagcaacatgaagccgtagacgtagtagatcttgtacgcccagaaggaggtgaagatgaagtacatctcaatgaagatggatccaaagggcaagacaccgccaagaagcacaataatcagtggctccatgtaccacttcttttcgggaatgggtcgtggcaccgcgttgacgcggcatggaaagtctggttggccgtccagattgcggcccacgacagtacccaccagagtcaagggcaggatgacaaacaggcagatgcaagtgaccgccaccatggtaccgaagggaatggctctcgacgcgtgatatccaatggcaatgaagttgatcaggaaagccgtgccgcacacagccactggaactgtaaaagcggacaccagcatctgtcggatccacatgcgtccacccaggcgggcatagagcgatcctccaaagtatccattgattggtgaggtggcggcatacacaaatatagccgtggacagcatggagccgcgttccgtgtacaattcaccaactatggcgaacatgatcacacagaatacaaccgaaatcagttggtatccagcgcccaccaacgccgagaagagcagtgtgttgggcggagaacggaagacatcgccatgcacctgcttccagccgtattcatcaccaagatctcgctccatgtcgtcgatttcctcgtccttactgtaccgagcataatccttgcgcagagttcgcatcagaatcatggacaccagacccaccaggaagatgaccatcatgaagctgttgaagatgctgaaccagtggatctagaaaagattaaagaaaagatgatgtcatcaaactttgaccttttcctcttgctatttatatagaatatgattcatttgaaagttgtggagtaaaactagttgaactatacgcaccctgtgctggaagaagttgggatccaggtacttgtcgaatcgattcttgaactccaccttgctgggcttccagttgacctcgtaggagaagttgatgtgggatcccggcttgagttcctcgcggccctcggtggtcagggtgatatccacgatttgctggccattgtagccgatgtcgaacttcttgtgcgtgaagatatagtacttgccatcgcgctcgtcgcgctcaccgacttttccccaaatgggcagtccatcgatgtacatctggtaccagtactcgttcttcacggcataggtgaatgccttggcgctctcctcctgcaaggtgaccatgcagatgaccgatttgggggcgtcgctcttgaactccatctcgtagccactgaactctagctcgactccttgcagcgcctcgctcagcgtctcgtggtagtgcgatatcgaggacttctggccactgcaaaaggggagagagaagtacgcgtacgtctcctgccgattgtggtacgggcccaccgtgttcatccacagtaccacctcctcccggtcattgtactgcgtggcaaagtggatcatgtattcggtgctcgagggatgtggcatccggactcaccttgtgattgtgctcatctgcctgggagagcgacacgtagcagctggcgatcagcagacataaacaaattgcacggaacggcaccgtggtttgcgtggcgctgctgcccattgtgtcttgtgcaggtggtgacctcgtttgcgcgtcttcctggtgacctcgctctgccggcctgattcggttgccctcgctgggattgcgttttcaaacagttttgtggcaaacactcagatttgccgacagcagaaatattttagggttgtatcttagaggtggagaaacatcgatgccaacatcgatgtcatcgatgttttcgaaaaatcaaaaacgtcgatgtttttcgaggaatcgtcgatgttttcagcgcatagaaacagcaaagtgtgtaaattgtaagtctaaattaatttccatattttctaatacaattattaatagcatattgcatatttattgtgactcgccggtggtgtaggctggtgtcttggaagacatggataaatatctgaaatgtaagttttttttttaaagatcaatttatttgttttttgccaaagacatcgaaaacatggatgttcgccaacatcgatgtttctccacttctaatgccaacgaaaacgtgactgggaacgtatcgatgggaaaaacgttacaaaaataccaactatcgcatagcggaatcaccttggcgggctattcgaatgtatctcacaaatagtttttaaggaacctacagtcagtaccaaatacttaaaattccatttatattttattttatgctacagaaaactgataagctgcattacttttgaaaagttaaaaattgtgttttttaaatgatttatttatataaataagcttatgtaatactattgttaatatgtaaaaaaaaaagaataaaagaaaaagaatagtttacctaagcagttgcttgaataatacatacataatttaagttttatacataatttatcaaccctcgctcagtaggaaaaaaagatggctcagaaatgagcaacgaattggaatgtccgataagccttttttatcaaaataataatttttacattcccttttcataacgctttcccagttagtttgtgccaatcgtaaaacagcatccgcaaagtgaagtcgctgctattttgtagtaccactacattcttatttatttaagtaatatttaaagaatgtccagctaactatatgattgctagttcaaaaatgttactttctgcatcgatcctaatatatttcttgctgaatctgc

SEQ ID NO: 22277 - DNA, 1863 bp, DROSOPHILA
ctaagatacaaccctaaaatatttctgctgtcggcaaatctgagtgtttgccacaaaactgtttgaaaacgcaatcccagcgagggcaaccgaatcaggccggcagagcgaggtcaccaggaagacgcgcaaacgaggtcaccacctgcacaagacacaatgggcagcagcgccacgcaaaccacggtgccgttccgtgcaatttgtttatgtctgctgatcgccagctgctacgtgtcgctctcccaggcagatgagcacaatcacaagtacaatgaccgggaggaggtggtactgtggatgaacacggtgggcccgtaccacaatcggcaggagacgtacgcgtacttctctctccccttttgcagtggccagaagtcctcgatatcgcactaccacgagacgctgagcgaggcgctgcaaggagtcgagctagagttcagtggctacgagatggagttcaagagcgacgcccccaaatcggtcatctgcatggtcaccttgcaggaggagagcgccaaggcattcacctatgccgtgaagaacgagtactggtaccagatgtacatcgatggactgcccatttggggaaaagtcggtgagcgcgacgagcgcgatggcaagtactatatcttcacgcacaagaagttcgacatcggctacaatggccagcaaatcgtggatatcaccctgaccaccgagggccgcgaggaactcaagccgggatcccacatcaacttctcctacgaggtcaactggaagcccagcaaggtggagttcaagaatcgattcgacaagtacctggatcccaacttcttccagcacaggatccactggttcagcatcttcaacagcttcatgatggtcatcttcctggtgggtctggtgtccatgattctgatgcgaactctgcgcaaggattatgctcggtacagtaaggacgaggaaatcgacgacatggagcgagatcttggtgatgaatacggctggaagcaggtgcatggcgatgtcttccgttctccgcccaacacactgctcttctcggcgttggtgggcgctggataccaactgatttcggttgtattctgtgtgatcatgttcgccatagttggtgaattgtacacggaacgcggctccatgctgtccacggctatatttgtgtatgccgccacctcaccaatcaatggatactttggaggatcgctctatgcccgcctgggtggacgcatgtggatccgacagatgctggtgtccgcttttacagttccagtggctgtgtgcggcacggctttcctgatcaacttcattgccattggatatcacgcgtcgagagccattcccttcggtaccatggtggcggtcacttgcatctgcctgtttgtcatcctgcccttgactctggtgggtactgtcaagtggtacatggagccactgattattgtgcttcttggcggtgtcttgccctttggatccatcttcattgagatgtacttcatcttcacctccttctgggcgtacaagatctactacgtctacggcttcatgttgctggttttcagcatcctgactgtggtcaccgtgtgcgtcaccatcgtgtgcacctacttcctgctaaatgccgaagattaccgatggcagtggacgagtttcatggctgcgggctccacgtcgatttacgtgtacgcctattccttctattacttcttctttaaaaccaaaatgttcggtctgttccaaacggccttctactttggctacatggcactcttcagcggcgccttgggcattatctgcggcaccgtcggctatgtgggcacgaatctcttcgtgcgcaaaatctattccaatgtgaaaatagactaa

SEQ ID NO: 22278 - protein, 567 aa, DROSOPHILA
MGSSATQTTVPFRAICLCLLIASCYVSLSQADEHNHKYNDREEVVLWMNTVGPYHNRQETYAYFSLPFCSGQKSSISHYHETLSEALQGVELEFSGYEMEFKSDAPKSVICMVTLQEESAKAFTYAVKNEYWYQMYIDGLPIWGKVGERDERDGKYYIFTHKKFDIGYNGQQIVDITLTTEGREELKPGSHINFSYEVNWKPSKVEFKNRFDKYLDPNFFQHRIHWFSIFNSFMMVIFLVGLVSMILMRTLRKDYARYSKDEEIDDMERDLGDEYGWKQVHGDVFRSPPNTLLFSALVGAGYQLISVVFCVIMFAIVGELYTERGSMLSTAIFVYAATSPINGYFGGSLYARLGGRMWIRQMLVSAFTVPVAVCGTAFLINFIAIGYHASRAIPFGTMVAVTCICLFVILPLTLVGTVKWYMEPLIIVLLGGVLPFGSIFIEMYFIFTSFWAYKIYYVYGFMLLVFSILTVVTVCVTIVCTYFLLNAEDYRWQWTSFMAAGSTSIYVYAYSFYYFFFKTKMFGLFQTAFYFGYMALFSGALGIICGTVGYVGTNLFVRKIYSNVKID

SEQ ID NO: 22279 - DNA, 3152 bp, DROSOPHILA
aacaacttaccattttttcgaatgggtacttttccattcgtagattctaagatcttgatagtaggacttgtggagccaaatgaatacgcattggactttgctatgcatggggcattccttccaagaaaaaccacatttaacaaaatatgtacttctgattaaatataaacgttaatgggtgataagtggcttatttttttttttttttgactttgtacagacaaatgacgcaaaaggatggactttaataaaacgactaagaacatgcaatttttacgtctcaaaagaaaatcgaaattcgttacaaagttccattctgtaaaacatattatgtggggtactagtatacaaaacactttttatgcagagctgatcttaaataattaaaaagataaaaaaggattgtttaaatataagagttaatctgattgacaaagttcaaattcttagaaattaaattatcgcttttctgtactgaaaagtgtatccaatgacgttaaacgaattaactctaaaattgtttacccaccgcttcgaaggaattttatttttacaataccaatgacaagttaaatttaatttaagtctatcaaaaattgattaactgtgttatgactgcaactaaattaaaatcatttgtagcaaattaaacttgattccaatcaaatcgattggattgatacctttaattcctattatcgttattgattttcaaaatgttttgatagacttaaaaagcgttaagtactcacgcctattatgcttataaaaaaatttaataggcatcgcaatgttatgacgattgaatttttcttgtgaatctcacgtatttaacgcagattgactgttgacaattgtaattcataattctttgggggattaccctcgaataggtatttctatttttatccgtatttatcttataaataccaagaaatgatatcgtactttgttgacgaagcttgaacgaataacacaagtgccagctctacataacaagtcagacaactaaaagatctatagatgaaagacataaaagagacatcttaatacctctacttccatatcaaatggtcatttatattctttttagacattatcagtacagtttttattaaattattaaactaaatttaatcttaagttttcccttcaaatgatgactgcatattggtttgagttacgcggttggatgagcgtggcatacttctccttcagttcgaccaaagccctctggaagttctccacgctgctctcgagctggttgggactgagctgctggacggactggcccttgagtagaccatcggtgggtcgctctcccaggaggagaatccttctccaatcgctggcatcggagctacctcgcaggaagtccttgcgattgccaaccgcaaacacagtttcctccatattctcgggcaaaattgtgggctgctgggctcccagatcgccgggcgtgggttgagttggtggcacttggactgctggtggtgtgatccccgagagagatgacgatgtgggttgcggtggaggaatgggagcaccggaaccttggttcaccggtgtatcgaacagttcactgggcagattctgcggtcgatcgatctgcaccacctggccatcgggtgaaatgtggaagaactgagcgcgaccagctaatcccgttcctggtcctcctggaatcactataatgttgcccacagcggtggtcaatgcagaggctccaccaaatccgccaccacctggggtggaaatgaaaggagggactggaactcccggtggcggaaaggatctcaaaggtggaggagctgggcatgggaaacaatatccaggaggaccaggcggtcctggtaagcctctaggcccctggatgaaaggcagatttggggggtaaggacctgtgggtggatagccccagtagccagaaccactgccagagagaccgttctgattgccaggaggtccaggcggacctggaggtcctcgttccccctgtggaccaggatcacaagagcatttcaccaacgaagcctgggcggtggagcaaagacctgatggaatatatggtattgtaatattgtagaaaaatttataaatgttttataaacttaccagcaaccagaaaagccaagagtcccaaaaaactcatgatgtacttcggatttctcttcagatcggactgagatccaaaattcgaattcggcttttataagctgaaaaactcgagagctacgttttaatatgcatagaaaatatacaaaataatctctagatcgaacagaaaacacatttcccgcatctctataactgttcttaacccaccatcgaaagggaaatgctaagcgatcaaaaggaaaaatgccatcacccagtcggcgcagtgacaattatgataatttatgcaacaaaatatacacgaacatcattaggcccgacgacaagcctttaaactgggtcagcagggttctcggtttgattcttggccagccagccgcaatcagcgggacaacttcaaaaatacatcaactgtctatcaggtcataaacagtgatcagattgtagagtttatgtgaccaaatgtgggcgatacccatcaaagtgacacccagatttttgaattgccttttcatcaaaacggaaactcttcagggattatcccaagcgcctttacagtttccactgcccagaattagcataaattacgaaatcaatatgtttccaatcagttaccacactaccacggctagaaatgaaaaggctctgtaacatttccgacttatcacagaattccattgacgagacaaagcccaccgaaaacacgcgtcattagtggacgagtgcccactccgtaggtgttcacttccaaactagcgccgttccctggaactatgatgacactgggcctcttgaaagtcccgataagcagagaagtaaatccggatgaagggtggcttgtggcagcagttgaaaccattcgatacacttcaaaatagttgtttactagaaactgctaatctcaaaggtatgtccataggttatcttaccaaacttccgaaactttgaattaaaacgtacttagtgctgaaggaaaattattcagtacttatactgataatatttttgaaagttgcttgtatttgaaacaactt

SEQ ID NO: 22280 - DNA, 924 bp, DROSOPHILA
atgagttttttgggactcttggcttttctggttgctggtctttgctccaccgcccaggcttcgttggtgaaatgctcttgtgatcctggtccacagggggaacgaggacctccaggtccgcctggacctcctggcaatcagaacggtctctctggcagtggttctggctactggggctatccacccacaggtccttaccccccaaatctgcctttcatccaggggcctagaggcttaccaggaccgcctggtcctcctggatattgtttcccatgcccagctcctccacctttgagatcctttccgccaccgggagttccagtccctcctttcatttccaccccaggtggtggcggatttggtggagcctctgcattgaccaccgctgtgggcaacattatagtgattccaggaggaccaggaacgggattagctggtcgcgctcagttcttccacatttcacccgatggccaggtggtgcagatcgatcgaccgcagaatctgcccagtgaactgttcgatacaccggtgaaccaaggttccggtgctcccattcctccaccgcaacccacatcgtcatctctctcggggatcacaccaccagcagtccaagtgccaccaactcaacccacgcccggcgatctgggagcccagcagcccacaattttgcccgagaatatggaggaaactgtgtttgcggttggcaatcgcaaggacttcctgcgaggtagctccgatgccagcgattggagaaggattctcctcctgggagagcgacccaccgatggtctactcaagggccagtccgtccagcagctcagtcccaaccagctcgagagcagcgtggagaacttccagagggctttggtcgaactgaaggagaagtatgccacgctcatccaaccgcatcttttagttgtctga

SEQ ID NO: 22281 - protein, 307 aa, DROSOPHILA
MSFLGLLAFLVAGLCSTAQASLVKCSCDPGPQGERGPPGPPGPPGNQNGLSGSGSGYWGYPPTGPYPPNLPFIQGPRGLPGPPGPPGYCFPCPAPPPLRSFPPPGVPVPPFISTPGGGGFGGASALTTAVGNIIVIPGGPGTGLAGRAQFFHISPDGQVVQIDRPQNLPSELFDTPVNQGSGAPIPPPQPTSSSLSGITPPAVQVPPTQPTPGDLGAQQPTILPENMEETVFAVGNRKDFLRGSSDASDWRRILLLGERPTDGLLKGQSVQQLSPNQLESSVENFQRALVELKEKYATLIQPHLLVV

SEQ ID NO: 22282 - DNA, 4405 bp, DROSOPHILA
gctcatcaccttgccattttgattgagcacctcgcggatcagctccaagttgttcaccaccagacagcgggtgtgtccgaaggtcagggagtatatgtctccgtattgctgtgccaacgccgtgaatcccgcaaagggactatccctgtatcgatccagcagatgaagattaccaatgatgggccatggtcgtggtcctggagcctgggtatatttttgataagcattgtgattgatttcggttgaattctttgttttaacgggctgcagaacgcggcgcttgactccatatataatgcatatgtaggacgtggccagaacactcagtaaaatcgccaaaatagtgtaaatcaaagcagccagcatttttgctgagctcttgaaagtaggaagcacaaaacacaactaacgacggccaaaccaatcaagtagccaggtaaactatagatcaagactttcccagatccttcgggaaaattggtctaccttctgtgggctgtagacattacctgcccattatcttgtttgctacctgtttgttttgcctttaatcgcttgtttttcccatttagatgatgtcatgaataatcaggatgtagctgagactatccaaaatgtcctctggtaatatgggaatttattctcatttagacatttattagagccactttgttcctccttctgtatgactttagtttaacacattattaaacggactgaaagtcccaagtaactgaaacatatactggccaaaatgctgatacagccatttgctggacttatttgcttatttaagttgcggccttcgcgtggccctctaaatatccgtcagcaagaaagactccctccgggatccccaccctctgctgaacaccataagtggaaattgcgagaagtatatttttttatatttaactgaccagaaaaaacataacattttgcatttccccttaactatttactgagtattccttatgagtatgcgactgtagtctggactttattgctcattaatcttgtccttggcaaatggtccaatgttggctgcataagccatcatggctgggatggcactctgctcataattgccggtgaacaggtgctcgaagggaccggaggcaaagacacccacatcctcagcgccgtgggtttcgctgctcaagggaaccgtggcctggaactcaaactctgcgcttgtggtgtccgcatgggaaagatcaatgcgtccatctttagtgctgtaggtatcatcaaatcctggaccattggcatacgacaagatggtaaagggaagctcatcatcagccagattgggagcaagggaaaggatgttctgtcgacggtactgggatagaagatggaaatataaatatataaaaatgttgatttcttgaagtactaataagtttcttaccggatagccgttgatagacatggtgtgcgagtgatccgatgtcaccacaatcagcgtgtcctcctcgtcggtcattttcctagccagttccacggctgccgcgaattcttcggtgtcctccagagccttcatcgccttggtggcgtgatgggccatatcaatgcgtccactctccacgaagaggaagtaaccctcctcgttcttgctgagcatcttgatggccgcttctgtcatgtcggaaagggatggctctgcatcttcataatgggtacggcgacgatcgccatggtagggcagatgggaggtgtcgaagagaccgagaaggtaatccgtcttgctaatatccgtttccttcaggcccttaagtgaccagacgtacttgccctccgctccctgctgtttcttgatctctcgccaatcgctgatcagatcgcgtccatcggttcgcaagcccgaaacgccagtctcatcgtgctgggactgatcccgaaaataggatcgaccgccgcccatgatgacgcgtagttcctgacccactggccactcgaccagctgccgggcaatatcggtgttgacgtcgggactgcatttggagctgatgatttcaccatcgtgctcccaattccgttcggaaacatgggcataaactccggctggagaagcgtgtgtcacccgggcggtggtcaccaaaccggcccacttgccggcctcctgggcccactgaccaatgctctggacatggctactcgaattggtcacacagtcgcccctctgcacctgggcattgactccaatggtgccatagttggccttgactccggtcaaataggccgtagcagtgttggccgagtccggagtacgctcgttgacggcatacgtcttggacagacccaagtaggggaacttctcgaagaagacctgcttgttgctatcgcccatgaaagcacgtgtggccgcgatcgtgtgaacggacatgccatcgcccaaaaataggatcacgttcttggcgcgattctcgttgagctttttatggccggccagcttatcggccagaatcgattgggccttatcgtgccagaatcgtgtgtccagctcctcgtcgagggcctcgaagtcgcgtgatgattgcagacggggatgttgggctgtaaagtacggactttgggttagcaactaatcggcgggaaaatcggtctaataaaactacttcttgaagtggtaaacaagttttcagcctatctcgagcagatctataaatcagttttaattataagcatttatggccatttggctggatttcctatcgctggaaattcacatttgattgaggcttaataaaacgtgttgaaaacgttttagcttattatggtgctttgtcatcattacactttcgtttgaaatacttagacatatactttgaggaaatgttttctttctgtactgtacaagcttagaaaaaacgcctaaaattaaattgattcttgtttagttcataattattatagcttattattaataaataataattatacccatttgaagcttatagttagaatcgttagtaacacttgatttaatctaagaatttagccatttttgttaaacataaatctatttataggaatgtcaccctatctttaatttgccttcacgtgaacaattgagtcgtaaactattatatagctagtcgatgactgagtgctgtttaaaatagatctagattagccaagtctaattggccatcaagatctctctacgataagccgagagagcttttcaattggctgtagataagctgggtcgcggccaatcggattcgttcggcagttcaccacgcaatgccgttcggttccacttaccgtgctcttggtcatcggctagatcactccgggcctggatgaccaggagagcgaagaagcacaagatcaggcaactctttaccattttggggtaggggcggtaactttaaactgaggaatgctccgtttgggagtaaccgcgagactggccaaaactgacgaaatggcccggttatatagcctccgatttatcgaagcggtcttcctgtaatatacatacgcgttatgggtgattgtttttgtgatttgagcaatctaaagtggcgatcgattaattatctcgagtgcctaaaaacgtgagtatcacggtctggctaagaaggtgtcgtaaattacccgatccccaccaaactgccctatcgactcctcacacgagctgcacctgatggtatattaatgggtcgcatggaactacggagtacagtattcacttggctggcacggtgaaagtatctcgaaaatgctgagtcttaagttctggattcgcctcggtctgctgaccgtcgtttggggtgcagcggttcctggaagagcccccgtggacgaggagcgaatgcatccacatctgcccactagtcccaggctgcgtacgatttccggcgaggaaacccaggagttctggcactcggccagcaaaaaactcatccgcgaaaagttggagttcgtgaggaacaccaagaaggccaagaacattatactgtttttgggcgatggcatgggactggctactctggctgctgccaggagttacattggaggcgaggagttgaagctctccttcgaagaattcccctttaccggactatcgaaaacctattcggtggacaaaatagtccccgatagcgcctgtacctcaacctcatatctctgcggagtgaaggcgaactacggaaccatcggcgtaaatgcgcatgtgaagcgaggcgactgtgcggcgatggccaatgaaacgaaccatgtcttctccctgggtaaatgggccatggatgcgggcaaagctgctggactagtgaccaccacccgagtgacccacgcctcgccatccggagtctacgcccatgtcgccgatcgtgaatgggagaataacgctgttctcgaggaggcctgcggtgagttgtcagatggactccag

SEQ ID NO: 22283 - DNA, 1622 bp, DROSOPHILA
cccaaacggagcattcctcagtttaaagttaccgcccctaccccaaaatggtaaagagttgcctgatcttgtgcttcttcgctctcctggtcatccaggcccggagtgatctagccgatgaccaagagcacgcccaacatccccgtctgcaatcatcacgcgacttcgaggccctcgacgaggagctggacacacgattctggcacgataaggcccaatcgattctggccgataagctggccggccataaaaagctcaacgagaatcgcgccaagaacgtgatcctatttttgggcgatggcatgtccgttcacacgatcgcggccacacgtgctttcatgggcgatagcaacaagcaggtcttcttcgagaagttcccctacttgggtctgtccaagacgtatgccgtcaacgagcgtactccggactcggccaacactgctacggcctatttgaccggagtcaaggccaactatggcaccattggagtcaatgcccaggtgcagaggggcgactgtgtgaccaattcgagtagccatgtccagagcattggtcagtgggcccaggaggccggcaagtgggccggtttggtgaccaccgcccgggtgacacacgcttctccagccggagtttatgcccatgtttccgaacggaattgggagcacgatggtgaaatcatcagctccaaatgcagtcccgacgtcaacaccgatattgcccggcagctggtcgagtggccagtgggtcaggaactacgcgtcatcatgggcggcggtcgatcctattttcgggatcagtcccagcacgatgagactggcgtttcgggcttgcgaaccgatggacgcgatctgatcagcgattggcgagagatcaagaaacagcagggagcggagggcaagtacgtctggtcacttaagggcctgaaggaaacggatattagcaagacggattaccttctcggtctcttcgacacctcccatctgccctaccatggcgatcgtcgccgtacccattatgaagatgcagagccatccctttccgacatgacagaagcggccatcaagatgctcagcaagaacgaggagggttacttcctcttcgtggagagtggacgcattgatatggcccatcacgccaccaaggcgatgaaggctctggaggacaccgaagaattcgcggcagccgtggaactggctaggaaaatgaccgacgaggaggacacgctgattgtggtgacatcggatcactcgcacaccatgtctatcaacggctatccgtaccgtcgacagaacatcctttcccttgctcccaatctggctgatgatgagcttccctttaccatcttgtcgtatgccaatggtccaggatttgatgatacctacagcactaaagatggacgcattgatctttcccatgcggacaccacaagcgcagagtttgagttccaggccacggttcccttgagcagcgaaacccacggcgctgaggatgtgggtgtctttgcctccggtcccttcgagcacctgttcaccggcaattatgagcagagtgccatcccagccatgatggcttatgcagccaacattggaccatttgccaaggacaagattaatgagcaataa

SEQ ID NO: 22284 - protein, 524 aa, DROSOPHILA
MVKSCLILCFFALLVIQARSDLADDQEHAQHPRLQSSRDFEALDEELDTRFWHDKAQSILADKLAGHKKLNENRAKNVILFLGDGMSVHTIAATRAFMGDSNKQVFFEKFPYLGLSKTYAVNERTPDSANTATAYLTGVKANYGTIGVNAQVQRGDCVTNSSSHVQSIGQWAQEAGKWAGLVTTARVTHASPAGVYAHVSERNWEHDGEIISSKCSPDVNTDIARQLVEWPVGQELRVIMGGGRSYFRDQSQHDETGVSGLRTDGRDLISDWREIKKQQGAEGKYVWSLKGLKETDISKTDYLLGLFDTSHLPYHGDRRRTHYEDAEPSLSDMTEAAIKMLSKNEEGYFLFVESGRIDMAHHATKAMKALEDTEEFAAAVELARKMTDEEDTLIVVTSDHSHTMSINGYPYRRQNILSLAPNLADDELPFTILSYANGPGFDDTYSTKDGRIDLSHADTTSAEFEFQATVPLSSETHGAEDVGVFASGPFEHLFTGNYEQSAIPAMMAYAANIGPFAKDKINEQ

SEQ ID NO: 22285 - DNA, 5060 bp, DROSOPHILA
cactcgccacaaccaagtcaaattccatcacctttgggaaggcggtcaagttgggcatccatcataaccatacgattccggtgaccaaaacgatttggtatccatttgcccactttaccacctgcccttggttgtttaagctgggttgcatattttatcatctgattcctggtttcttcttcgatctcctcctacgtatccaaggtaaaaagcctattctgatgaggagctatcaaaagatccacgaagtacttttgcttctgtttcccttcaatggaaaaacgtacgagatggatatgaataataccaatcaattatgggattcaatgtcgccggaggacaggagtatatttccctttgacatggccactcttaactgggaggagtacttcactcgcatattgtccggaatgcgggtgttcctttacaaggaatcctgggacaccttggaacaagcgaaaaagcgtttattcaggtgcgtagaattcagattcgatagttgctctatctaacatccatggctgtttcaggttttacatattgcatcgatcccttcaacttgtactttgccttgctctcggaaagattgtgtggatcttgtacagtgtaattgctaataattacattaggagcattgaggttaccctgccgtctccggtggccgattttccaagtatttaatccaatgtgcatatgtacatgcatatatggcatccgattgttaggggtccttttttgatcgattttataacgattttcattgtatcgattgccaaaaataaagttatatgctcgtgcgtaattcgattgtatcattctacacttaaccgttttttataataattaaaaaaattcaatttatttctagtttgtaaaacaaaactttgaagcaaataaaatcccgttatttttacgaataccctacacgattacgactaacgcctttacaatacaatatcagctgaccacatttgagtttgctgtacaaaataccgttagcggtgcactcaacagctgagcggcgctcaagctaacccgccgataatgcagacaacaaaaaaagtattaagcaggtagattggcaggcaggtgtaaaatttcggaacacgcacactcttgtgattgtgtatgaatgcgaaacggcgtacgctctcgcaaacgctcctacgagtataaaaaccgttctccgtcgcagcaagcagtcagtatctccacagcagcagaggcgacgggaagacaaagcaatctgaattgaatacgtcctagttttgggtccgtataacaaaaaaatttatagtgcaaagtagctgagataagcgcggcttgacccgggaaaggcgccagagatgggggcatgcaatataacagtcttattgctggtcatcatgttgtgggtgagttatatacgaacacaagccgcaaagatttcgattatgttctatatttaaacatttgtatatatttcattagctaccccatggtctgtccatgggcaatagctgctcggcatcggtgctggaggcgcgtaggttcttcgagctggaaaatgaacaattgcgaaggcgtttccatgaggaattcctttccggctacaactataacaccaatgtaacggaggcgaatcgccaggccatgatcgaagtgtatgcccgcaatgcggaactgaataagcgactcgcgcagcagataaagtcctccgattacgttcagtccgaggatgcggatatacgacgacaggccgagcacctatccaaattgggtgcatccgctctgaatgccgacgactacctggccctgcagaatgccatcagttcgatgcagacgaactatgctaccgccaccgtgtgctcgtacaccaatcgcagtgattgctctctcaccctggagccgcacatacaggagcgtctgtcccatagccgtgatcctgccgaactggcttggtattggcgggagtggcacgataagtccggaactcccatgcggcagaacttcgccgagtatgtgcgactgacgcgcaaggcatctcagttgaatggtaagtgatggacgcctagataaccccatgtctgacccaaatcgggagaaatcggttcggccagcacagggagaaatagcttatccacttgacatttatctgtggtgaagtacttgggtatttatacctaatttcggtgcactttacaatatcgtgatataaggaagttagggtgatccaactttaagaagaaaaaattatacttatgcgacgaaactccacaaacataacagttttataccattatctcactaatattaaaacttatattagttctaaatataatttactaccaactgtctggcaatagttttgtatacaatagtattttctaatattaggttaataggggttatcactttttcagactttgcaaaacttagttttttttttttttacaaattctttcgatttaatattaatagaattcatattataaatcatgcttataatgtaatatttctgtctacttaaaggtcaccgctcctatgccgactactgggtgcagttctacgaggacccggactttgagcgacaactggatgccacttttaagcagctgctgcccttctaccgacagctccacggctacgttcgctttcgtttgcggcagcactacggtccggatgtgatgccagcggagggaaacatacccataagcctgctgggcaacatgtggggtcagtcgtggaacgagctgctcgatttgtttactccgtatccggagaagccgtttgtggacgtgaaggccgaaatggagaagcagggatacacggtgcaaaagctgtttgagctgggtgatcagttcttccagtcgctcggaatgcgcgcgcttcctcccagtttctggaatctgagtgtgctcacccgtcccgacgatcgtcacgtggtttgccacgcctccgcatgggacttttaccaagacagcgatgtaaggatcaagatgtgcaccgaagtggacagccactacttttatgtagtgcatcatgagctaggacacattcagtactatctgcaatacgaacaacagccggctgtctaccggggagctcccaatcctggcttccatgaagctgtgggcgatgtgatagccctgtcggtgatgtcggccaagcacttgaaggccattggtctgatcgaaaatggtagactagacgaaaagagtcgaatcaatcagttgttcaagcaggccctctccaagattgtcttcctaccctttggctacgccgtggataagtatcgctatgccgtttttcgcaatgagctagatgagtcgcaatggaactgcggcttctggcagatgcgatccgagtttggcggcgtcgagccaccagtattccgcaccgaaaaggactttgacccgccagccaagtatcacattgatgcagatgtggagtacctgcgctactttgccgcccacatcttccagtttcagttccacaaggctctgtgccgcaaggccggacaatatgcgcccaacaatagtcgtctgactctggacaactgtgatatctttggaagcaaagcagctggacgatcactgagccagttcctctcaaagggcaactcacgccattggaaggaggtgttggaggagtttacaggcgaaacggaaatggacccagccgctctgctggagtactttgaaccgctctaccagtggcttaagcaggaaaatagccgcttgggtgtgccattgggctggggaccaacagacagtgagtaattgaatttaaacagtaactgctaactataatttactgtatccctttgcagaaatcccatctgattgctgtggaacgtttagcacctagactgagccatcccaaacttgacttgaggttattagaacccgaaaacaaatatattggtttagtctgtcattaggaacaaacaaaataaacttgataagaacgataattaattcacagcatatgcgcattgatatttaaattgatatttattgtatcgattcattcgtatcgtttcgtttcgttttattaataaattgccattacataatacactttttaacgatatctcacccaccaactttcgtcataaacaaaattgtataaattatagcctttcgtgaattgtgtttctatctcaaccacaaagttgtatatgtttcggtcagtgtaaattttcgatatcttgcttgcctttttgtacacagcaaaagcgctcaaaagttcatctcaaatttatttgatgcttctaaccgtatgctactttgaataactcgaataaaatatgatctttaatggaagctgttgttgtatacaacacaaaaagtatagaatacaatacactataaaaaattataggttaccaaacagttctaaaggtcttgctaaaacggaaatcaagtcatgacttctaaaattttctgaccatcgaaaatgataagctattgctttcaagaaaatgtatttgttaactggttaaccttacattaaatccttataggtcatattccagccgagatattcaaagcttgatcagtgattacattttgcgacttgtgctgcagtatatttatgatttctgcttgtatatcgatgcttttgtgatctggttggtatcaaatttccgcacattttgatttgtagtctctgttggaggagtgtgtatatgataacgaaataaagaacagtcaaatatgatcgtgtggattttaattccaatcgtttaacttcatagggtgatttaattttagtagattataaggaatttgttttgagaaataaaacaatctaagaactaacaataaatattggaaattgtatcatttttgattaggtaatatatgtaaatctgttttcatttcgcaatctcccgctttatgcttgtgatatgggagataccgatggtatctactgcattttcatcaatgtaactgttacttggtaaaaattgtatatgtatttagaatataaatattatatgcaatgcgttccacatttacaaggcagttatccatgattgcggagtaagatttttgaacaaattggaaaaatat

SEQ ID NO: 22286 - DNA, 2450 bp, DROSOPHILA
ggtgcactcaacagctgagcggcgctcaagctaacccgccgataatgcagacaacaaaaaaagtattaagcaggtagattggcaggcaggtgtaaaatttcggaacacgcacactcttgtgattgtgtatgaatgcgaaacggcgtacgctctcgcaaacgctcctacgagtataaaaaccgttctccgtcgcagcaagcagtcagtatctccacagcagcagaggcgacgggaagacaaagcaatctgaattgaatacgtcctagttttgggtccgtataacaaaaaaatttatagtgcaaagtagctgagataagcgcggcttgacccgggaaaggcgccagagatgggggcatgcaatataacagtcttattgctggtcatcatgttgtggctaccccatggtctgtccatgggcaatagctgctcggcatcggtgctggaggcgcgtaggttcttcgagctggaaaatgaacaattgcgaaggcgtttccatgaggaattcctttccggctacaactataacaccaatgtaacggaggcgaatcgccaggccatgatcgaagtgtatgcccgcaatgcggaactgaataagcgactcgcgcagcagataaagtcctccgattacgttcagtccgaggatgcggatatacgacgacaggccgagcacctatccaaattgggtgcatccgctctgaatgccgacgactacctggccctgcagaatgccatcagttcgatgcagacgaactatgctaccgccaccgtgtgctcgtacaccaatcgcagtgattgctctctcaccctggagccgcacatacaggagcgtctgtcccatagccgtgatcctgccgaactggcttggtattggcgggagtggcacgataagtccggaactcccatgcggcagaacttcgccgagtatgtgcgactgacgcgcaaggcatctcagttgaatggtcaccgctcctatgccgactactgggtgcagttctacgaggacccggactttgagcgacaactggatgccacttttaagcagctgctgcccttctaccgacagctccacggctacgttcgctttcgtttgcggcagcactacggtccggatgtgatgccagcggagggaaacatacccataagcctgctgggcaacatgtggggtcagtcgtggaacgagctgctcgatttgtttactccgtatccggagaagccgtttgtggacgtgaaggccgaaatggagaagcagggatacacggtgcaaaagctgtttgagctgggtgatcagttcttccagtcgctcggaatgcgcgcgcttcctcccagtttctggaatctgagtgtgctcacccgtcccgacgatcgtcacgtggtttgccacgcctccgcatgggacttttaccaagacagcgatgtaaggatcaagatgtgcaccgaagtggacagccactacttttatgtagtgcatcatgagctaggacacattcagtactatctgcaatacgaacaacagccggctgtctaccggggagctcccaatcctggcttccatgaagctgtgggcgatgtgatagccctgtcggtgatgtcggccaagcacttgaaggccattggtctgatcgaaaatggtagactagacgaaaagagtcgaatcaatcagttgttcaagcaggccctctccaagattgtcttcctaccctttggctacgccgtggataagtatcgctatgccgtttttcgcaatgagctagatgagtcgcaatggaactgcggcttctggcagatgcgatccgagtttggcggcgtcgagccaccagtattccgcaccgaaaaggactttgacccgccagccaagtatcacattgatgcagatgtggagtacctgcgctactttgccgcccacatcttccagtttcagttccacaaggctctgtgccgcaaggccggacaatatgcgcccaacaatagtcgtctgactctggacaactgtgatatctttggaagcaaagcagctggacgatcactgagccagttcctctcaaagggcaactcacgccattggaaggaggtgttggaggagtttacaggcgaaacggaaatggacccagccgctctgctggagtactttgaaccgctctaccagtggcttaagcaggaaaatagccgcttgggtgtgccattgggctggggaccaacagacaaaatcccatctgattgctgtggaacgtttagcacctagactgagccatcccaaacttgacttgaggttattagaacccgaaaacaaatatattggtttagtctgtcattaggaacaaacaaaataaacttgataagaacgataattaattcacagcatatgcgcattgatatttaaattgatatttattgtatcgattcattcgtatcgtttcgtttcgttttattaataaattgccattacataatac

SEQ ID NO: 22287 - protein, 630 aa, DROSOPHILA
MGACNITVLLLVIMLWLPHGLSMGNSCSASVLEARRFFELENEQLRRRFHEEFLSGYNYNTNVTEANRQAMIEVYARNAELNKRLAQQIKSSDYVQSEDADIRRQAEHLSKLGASALNADDYLALQNAISSMQTNYATATVCSYTNRSDCSLTLEPHIQERLSHSRDPAELAWYWREWHDKSGTPMRQNFAEYVRLTRKASQLNGHRSYADYWVQFYEDPDFERQLDATFKQLLPFYRQLHGYVRFRLRQHYGPDVMPAEGNIPISLLGNMWGQSWNELLDLFTPYPEKPFVDVKAEMEKQGYTVQKLFELGDQFFQSLGMRALPPSFWNLSVLTRPDDRHVVCHASAWDFYQDSDVRIKMCTEVDSHYFYVVHHELGHIQYYLQYEQQPAVYRGAPNPGFHEAVGDVIALSVMSAKHLKAIGLIENGRLDEKSRINQLFKQALSKIVFLPFGYAVDKYRYAVFRNELDESQWNCGFWQMRSEFGGVEPPVFRTEKDFDPPAKYHIDADVEYLRYFAAHIFQFQFHKALCRKAGQYAPNNSRLTLDNCDIFGSKAAGRSLSQFLSKGNSRHWKEVLEEFTGETEMDPAALLEYFEPLYQWLKQENSRLGVPLGWGPTDKIPSDCCGTFST

SEQ ID NO: 22288 - DNA, 3632 bp, DROSOPHILA
ctacctgtgcccttgcctgtttctactgacacgacgccatctcccgcgttggaaactccttacttcacaccaccacctctgcccgagctgccgcctctacccgaactgccgtctcaattcaccgtgagttcagtgcccacaataacggagataatgccagtggatatactacagaagttgggaccgctgcccaagaccttggacgttgatgacggaggtggaactgccagtccggaggatattagcgacgatctcaaggaggttgaggcaaagccagccgaacagcatgtggtgggcgtgaagccgcagctccttgtggagacccagtagtagatccatcttgctagcttgatttctttaattatagtgttctttagataattattcttaattttaaatatgaggatcctcaatgcctacacagatttatttcgtaaatattttgtttataaaatatttttaattgaccatttgtaaacaagttgcatttattcatagaaggtcgttttcgatttattcagctttaggtttctatgtcatttatataaggcccatctgggcccacatttattgatttctaaaagaaaataaaaattgtaaatatttcgcttaagaattacacttgaatttacattcggcgtgcacattatacatatttgagtcatttactgtaacgaagttcttaacgaattaatctaatcctaagatcctcaagaatcgaatgtatgtgaaatttttatagtgtggtgagcatctataagactttgcgtgtttggtatcgtacaaaatatagacatgaaatacaaaaattttgtatttgcgttagttaagtaattgaaaatatactcaacagtaaaatagttttactatttgattgagcttattcgttatgtctgataatagataacgcagtaatcttattctgaagctgtttgggctatttatgtgtaatattttaattggtagtgcttaatggtattggtttttaaattataatttattatagtggtccgatcttttccctgggtgtcaagaccaatggaaaacaatcggcaggcagtgccaaactctccggactgatcttaatcgtcgaaggattatgactgctgatattatatctctgcattacgttgaccacgaccagaaaaccaaatcctctcaccaaattctggccgatgcaagtccgcttcccgatgctaaagggcagaaagtgcggaatattcctctttagttgaagtttttcattatcactttcgatgccagaatcagaacctttggaattttttgggctttgttcctttgacggttccaaaaatcttaatggattaaattccttgggatttacccagaatttctcgctggtgtttagcacataattgttgatgaacacaatggtgcccttggttaccccatagccagagatcactgtgtcctcggtggccacatgtggaacaattggggaggatgaatatcgcagcacctcgaaaatcgtcgccatcgtgtagggcatagcattcatgtccagcaaattaattgacctattttcctcttcaataattgcgtcaatttcctcttgtattctccttccaatatccacatttttggctatataggccagcactagcattactagatttccaaccgctgaatgtccaccaatgaaatcctccagcatgaagataatcgtgttccgggagacatctttatcttcaagcaggcttttaagtagagcatctgtgaagtcccgatctggttcatccaaatcgacgctcagctcccgatgccggataatcctttccattatgaatcccctgatagtcgaggaccagttgatgatcttgttcaggtgtcgctggtagaagggatatagccagggtagaaaatccagcggatgtccctgattgatttcccagaatatctcatcgaagtattgaacaatctgttggaagtccacatcatcgtagtcgaacctcaacgaacacatgtactgactaaacatatttgcacaggccttcagaatcagaggcttgatgttgatcggctctccaggaacgagttggtttcccagctcccgattccagtgctccatttcctcgcaaccaatctgggacattttcatgtagaagcaggaaaattccctgggcgagcagtgacgcctggccagattccttctcttctgctgcagctgtgaccaatcgcacagagccaacgaattgctccgctcgccaccaaatagtttatgatatcgtatgaagtctggccgcccgctcatcaccttgccattttgattgagcacctcgcggatcagctccaagttgttcaccaccagacagcgggtgtgtccgaaggtcagggagtatatgtctccgtattgctgtgccaacgccgtgaatcccgcaaagggactatccctgtatcgatccagcagatgaagattaccaatgatgggccatggtcgtggtcctggagcctgggtatatttttgataagcattgtgattgatttcggttgaattctttgttttaacgggctgcagaacgcggcgcttgactccatatataatgcatatgtaggacgtggccagaacactcagtaaaatcgccaaaatagtgtaaatcaaagcagccagcatttttgctgagctcttgaaagtaggaagcacaaaacacaactaacgacggccaaaccaatcaagtagccaggtaaactatagatcaagactttcccagatccttcgggaaaattggtctaccttctgtgggctgtagacattacctgcccattatcttgtttgctacctgtttgttttgcctttaatcgcttgtttttcccatttagatgatgtcatgaataatcaggatgtagctgagactatccaaaatgtcctctggtaatatgggaatttattctcatttagacatttattagagccactttgttcctccttctgtatgactttagtttaacacattattaaacggactgaaagtcccaagtaactgaaacatatactggccaaaatgctgatacagccatttgctggacttatttgcttatttaagttgcggccttcgcgtggccctctaaatatccgtcagcaagaaagactccctccgggatccccaccctctgctgaacaccataagtggaaattgcgagaagtatatttttttatatttaactgaccagaaaaaacataacattttgcatttccccttaactatttactgagtattccttatgagtatgcgactgtagtctggactttattgctcattaatcttgtccttggcaaatggtccaatgttggctgcataagccatcatggctgggatggcactctgctcataattgccggtgaacaggtgctcgaagggaccggaggcaaagacacccacatcctcagcgccgtgggtttcgctgctcaagggaaccgtggcctggaactcaaactctgcgcttgtggtgtccgcatgggaaagatcaatgcgtccatctttagtgctgtaggtatcatcaaatcctggaccattggcatacgacaagatggtaaagggaagctcatcatcagccagattgggagcaagggaaaggatgttctgtcgacggtactgggatagaagatggaaata

SEQ ID NO: 22289 - DNA, 1578 bp, DROSOPHILA
atgctggctgctttgatttacactattttggcgattttactgagtgttctggccacgtcctacatatgcattatatatggagtcaagcgccgcgttctgcagcccgttaaaacaaagaattcaaccgaaatcaatcacaatgcttatcaaaaatatacccaggctccaggaccacgaccatggcccatcattggtaatcttcatctgctggatcgatacagggatagtccctttgcgggattcacggcgttggcacagcaatacggagacatatactccctgaccttcggacacacccgctgtctggtggtgaacaacttggagctgatccgcgaggtgctcaatcaaaatggcaaggtgatgagcgggcggccagacttcatacgatatcataaactatttggtggcgagcggagcaattcgttggctctgtgcgattggtcacagctgcagcagaagagaaggaatctggccaggcgttgcgaggaaatggagcactggaatcgggagctgggaaaccaactcgttcctggagagccgatcaacatcaagcctctgattctgaaggcctgtgcaaatatgtttagtcagtacatgtgttcgttgaggttcgactacgatgatgtggacttccaacagattgttcaatacttcgatgagatattctgggaaatcaatcagggacatccgctggattttctaccctggctatatcccttctaccagcgacacctgaacaagatcatcaactggtcctcgactatcaggggattcataatggaaaggattatccggcatcgggagctgagcgtcgatttggatgaaccagatcgggacttcacagatgctctacttaaaagcctgcttgaagataaagatgtctcccggaacacgattatcttcatgctggaggatttcattggtggacattcagcggttggaaatctagtaatgctagtgctggcctatatagccaaaaatgtggatattggaaggagaatacaagaggaaattgacgcaattattgaagaggaaaataggtcaattaatttgctggacatgaatgctatgccctacacgatggcgacgattttcgaggtgctgcgatattcatcctccccaattgttccacatgtggccaccgaggacacagtgatctctggctatggggtaaccaagggcaccattgtgttcatcaacaattatgtgctaaacaccagcgagaaattctgggtaaatcccaaggaatttaatccattaagatttttggaaccgtcaaaggaacaaagcccaaaaaattccaaaggttctgattctggcatcgaaagtgataatgaaaaacttcaactaaagaggaatattccgcactttctgccctttagcatcgggaagcggacttgcatcggccagaatttggtgagaggatttggttttctggtcgtggtcaacgtaatgcagagatataatatcagcagtcataatccttcgacgattaagatcagtccggagagtttggcactgcctgccgattgttttccattggtcttgacacccagggaaaagatcggaccactataa

SEQ ID NO: 22290 - protein, 525 aa, DROSOPHILA
MLAALIYTILAILLSVLATSYICIIYGVKRRVLQPVKTKNSTEINHNAYQKYTQAPGPRPWPIIGNLHLLDRYRDSPFAGFTALAQQYGDIYSLTFGHTRCLVVNNLELIREVLNQNGKVMSGRPDFIRYHKLFGGERSNSLALCDWSQLQQKRRNLARRCEEMEHWNRELGNQLVPGEPINIKPLILKACANMFSQYMCSLRFDYDDVDFQQIVQYFDEIFWEINQGHPLDFLPWLYPFYQRHLNKIINWSSTIRGFIMERIIRHRELSVDLDEPDRDFTDALLKSLLEDKDVSRNTIIFMLEDFIGGHSAVGNLVMLVLAYIAKNVDIGRRIQEEIDAIIEEENRSINLLDMNAMPYTMATIFEVLRYSSSPIVPHVATEDTVISGYGVTKGTIVFINNYVLNTSEKFWVNPKEFNPLRFLEPSKEQSPKNSKGSDSGIESDNEKLQLKRNIPHFLPFSIGKRTCIGQNLVRGFGFLVVVNVMQRYNISSHNPSTIKISPESLALPADCFPLVLTPREKIGPL

SEQ ID NO: 22291 - DNA, 7732 bp, DROSOPHILA
ttaaattccttttcgccataatgaagatttccatatggtctgctgattatatgtttttaatagagagccaaaggcttaatgcatgtaactgcaataaaggtgtatttattcaagcaatagcttaaccaaaagattaagacacctgtctttattatttactttatttatagtactttcaatgtgtaccaaaaatctatttaaaccaacatctattttagcaataatttaatctaccgggattcaagtgaagcacagatttagaatagaactattggcaggcgaaattcaacgtcctcgatagtatagtggttagtatccccgcctgtcacgcgggagaccggggttcaattccccgtcggggagacgattgtcaatactttttttttattaaaatcttatttaaagaaaagcacatccctaaaacatgttacaatttttggaacttttgtaaaacaaaaagatggatataaaaatataatttcaatgatcatattgccaagtttatgcattatctttctttatataaatttgcaagaaaaatattcacttattctcttgtaattacatatatgagctaaaaagaaaggaaatatcccatctccccgacggggaattgaaccccggtctcccgcgtgacaggcggggatacttaaccactatactatcggaggatgttgcgcgccgattgccaatagttctatttcagattcttcggtgctctcagtgcaaattattgtgctaagaattcaaggaaacataaataacctatttttggaaaatttcttaaatagcccaacttatcaaaaccacccaaatatttgaaggtgtctttatttgaaccttctaatttatcacactttccgtgaattaccagtcattggctgcactctttgacagacaattcattaggtttcaagagctttctttttctttgttgactttcatatacataaacttgttaaatatgagaaaggaaccaattcctgaagtagacatgaggatggtggccaaaaacgcggaggttcatcgacgaggcattttgggttttgctccccggatcggattggtcaatgttgactacgacgatctggacaggattgacaacttctatttggagacccagaggtatcgggactattaccgcgatccgcacaacattctgcacaagccggagcgttttcggcaacatcagggaaaatgctcaattaaactggacaccagtgtccagaacttgaccaggccgatccgttgggtcaaagagaaaatgcctgtgctctatcctccttcaagggacactgcgatgatgttgggcacaccgatatcatctaggatcataggccaatacaacaagtcgacttgcgcatcttttcttcattagacaaattgaattttaagcggcggcaggcgaactgagattccttgcgaagtctttatttccaattaagttgaatgcacttagtggtccgaaaggcgcacgcagatcatctcagttcatctgtccaccgaaggcagagctcggaataaaatcaaaagtattaattgtctattaaaaaaaaattttgaatgataaacaagactatttcacttttcgtcggtgttgtaaccaacaatgtaataaaacaataactttatccgcttttcttcagatgcatcttcatccaacgaggcagttcatctgcagcagcggctcaaaagcctgagcaccgaattggtgactctgcgaaaccgcctgcatgtgggtcatggaccgggtcagggtcagagccagggaaatggcgcgcagcccgtcgccccagctcccaatgcgggtcccaaggccaacaactttgacctaaacgcatccagtccgaatctcaatctgagttccagcggcgcaggactttcagccagtgcagttcagcaacacaccaatggacatcacacgacatcgaaggtaagttatggtatttaaacatattctaaaactaggaccctactctagtatatacaaatcttaaatcgaactgtaagagcaacaagcttgtccacattcgatttcctttgataaagatgtttatttctcttcactcctcactcttatagaatcacagcttcagccacacattgcccgcaaactcgggctctggtggaggaggaggcgctggaggaggcgccgttgtgtcggcgaggaacacgtcgattccacatccacttccgcatcagttggccgagaagccgggcctgtcgcatcagcagagtggcagcggacatggtcagtccaccgggacactgccacatatgagcggcatgggaagtatcctggggcaaaattcccattcccatgcaccggtcaacaacaacagcaacaactccaacacgctgcccatgcgcacctccaactccggacacctgggcatcaatggcggaggcgttggccaccatctcagccacgcccacagccagcaattgccattcatcccgcagtcgaagcacacgaatccctgccagagtgtgaagactctgccctttggattcggattctccgaaagtcagcagaagatgcaacagcagcagcaacagggcaactcctcgcccaaggacatgcaggatctgatccacttgtcgggaccgctcaccgaacatgccgtgatgcgaacgctccaggcccgattcaacgagcggcggtactttgtgagtattagcgggatccgccttggcgaatcacttgtgtccacatagaggaacataaaccatttgaaaccggtcccggagagacgggtctacagcaattattctgatagtttgtcattaaaacccaactccgtttgcactcagcctcagattaactgctaatttcgacaattacttggcggaaggccgaggaagtcgatatgatctagtcgaggggaatagtttgacagccggtgtggcggatgaggtgtgagcatatgaacagaccagttgggtcttggatcgggttttgcacatttgctggtagtgtttactcaatttaatgggatggagattgttagtttttagccccgctctttctttatccaagcatatctcagaagttataaaaaagtgatttaaacctaatttgattatgtaaaataagcagttgtagggcatttaataccattttttacagaaaggttctataagcaattagattccaaaccaagattttttagttttaagacgtccaaatatcctgcgaagtggcttgctgaccccattgttcactcatttatacatgtttcctcgaatttatcaaatgacttcgaagcatttgactcacccggttaattaatgtactatcatttatcttgcgcgcggtgtttcagacgaacgtgggtccaatcttgctctccatcaatccgtacctggacgtgggcaacccgctgaccctcacctccacccgcgccatgccgctggccccgcagctgcagaagatcgtccaggaggcagtgcgtcagcagagcgagacgggctatccgcaggccatcattctctcgggaacatcgggcgctggaaagacggccaatgcgatgctgatgctgcgccagctcttcgccatcgccggcggaggtccagagactgatgccttcaagcacctggcagctgcattcacagtacttcgatccctgggatccgccaaaactacgaccaactcggagtccagtcgcattggccagttcatcgaggtgcaggtcacggatggggcactctaccgcaccaagatacactgctacttcctggaccagactcgcgtcattcgtccactgccgaaggagaagaactatcacatcttctatcaattactggctggtctcagccgggaggagcgccagaagctacacctggatggctactcgccggccaatctgcgctacctgcgaggtgacattggccagaatgagcaggaggatgcggcgcgctttcaggcatggaagacctgcctcggcatcctgggcatcccattcctggacgtcgttcgtgtcctggccgccgttttgctgctgggaaatgttcagtttattgatggaggggtaagttaaagcagattattaggtttagcctggagggaaatattttcatttttttcattaaatgtagtttatacatattgtttataaattagttaaaatttggtgtgctagttacaaaactgataccaaagcgcctgcagagccacttacaatacttcaccgccatctagcggaaatttttagttctactttagtttattattagactcttcatatactgatgcttcattggtgtgatggtcagagtgctggctttcgaatccgttcgcgcgagttcgaatccaactctggcattcataaatagaatgcaaaatttcttgcgctgatgccatattccatacgtcacaaaaatggaggtaatttacgactgataagccgtgatcgacaaaacaatctgagcgagaaatatttttgtattattttatgatctaactacgatgttattaacttctaagaatatcaatgttctaaaaacgttacctaattatcgttttttgtacattacagggtctcgaggtggatgtgaagggtgaaacggagctgaactctgtggccagtctacttggcgttccgccggcggccctcttccgtggattgaccacccgtacccacaacgttcgtggccagctggtgaagtccgtgtgcggcgatggcgatgccaatatgacgcgggactgcctggcaaaggcgctctactgccgcacggtggccactattgtgcggcgggccaacagcctgaagcgcctgggatccacgttgggcaccctcagctcggactcaaacgaatcggtgcacaaccaggcggatgtcgcctctcagcacgcctccaccattggcggtggcaatgcgggctccaagtcgatggcggcactcaataatgcagtgcgccatgccacctccgatggcttcattggaatcctggacatgttcggtttcgaggagccctcgccacatgcccatctggagcacttgtgcatcaacctgtgcgccgagaccatgcagcacttctacaacacgcacatcttcaagtcctccgtggaatcctgtcgcgacgagggcatcgtttgcgacaccgaggtggactatgtggacaatgtgccctgcatcgatctgatatcctcgctgcgaaccggtctgctcagcatgctggatgcagagtgttcggttaggggcactgccgagagttatgtgaccaagttgaaggtgcagcatcgcagctccactcgcttggagacgaaacccacagccgaaccacacgatccacgcatgtttctcatccgtcactttgccggtcgggtggagtacgataccacggactttctggacaccaaccgtgatgtggtgcccgacgatctggtgggtgtcttctacaagcacacctgcaactttggcttcgccacccatctctttggatccgagctgaaagccctgtatgctcagcaacaggctccaaggggtctgagcttccggatctcgcccacatcacactcggatctgctgaacggggacgagccggtgtccacgctgacccaagacttccacaccaggctagacaatttgctgagaaccctggtgcacgccaggccgcactttgtgcgctgcatccgaagcaatggaaccgaggcggctcgcagctttgatagggctacggtggtgcgccagattagatccctgcaggtcctggagacggtcaatctaatggccagtgggttcccgcatcgcatgcgctttaagcagttcaatgcccgctaccgtatgctagccccattccgcctcttgcgccgcagcgaggacaaggctctggaggattgccagttgattctgaagtacgcaatggagcagccgccagtgctggatggctcggtgaccctggcctgggcacctggcaagcgtcatgtcttccttagcgagggcattcgccagcacttggagcacttgcgcaccgagatcaggcacaagagcgccaccctgatgcaggccacctggcgaggctggtggtggcgcaagaagatgggcaatggcggggccaagcgctccaaaatcccaggtcttcaacaggcgccactgccgaacaacaagaccacgccgaactccgccgcacagaacaaggccgcatcctccacaatggccgcccttgccgctgtggcagctgctgctcccatttctggtgagattcccccacgggtatacccattctccgcccatctaatccccaaactctatgatgcagtaccacgcctctcggccaagacaacgagcctgggcattggaggcactgtggccagaccaaggccacagcccattgctgggactcctccgccggatccgcaggagaagtgcgaccagaagatcattcagcagacctgtaacctgtttggactcgatttggtatgtgttttctattattattgcttgcttgattttattgaaatatccaactacttttatttaacaggaacgtccgccgccagttccgccgtctcgttcctacacgatcaccgggaattcgaaaataagctatccccaaaaccgggtcatgaagatgaactttccagaggagggacagtcggaggcgccgcagctgaagaagggcgaagcggtgaccgtagtgggggcctccaccgttcggggtcacctgatggtggagcacaaggggcagagcttccacgttcccttccagttcatgacgctcagtaaataaggactactggtggaaacaaactggttatgattccattcattccatctgttcaactcttcctgattttagacatcccatttctaaaagactgtaaatattccatttggtagattaaataacaagcattctgtctacgaagcgcatgctaactgaggtgctctaattggcccctaacttacgtagtattattattgtcgcgttaataaataaacgccaatcgataggttgtagcttcaattacatacccacaagtgccaatcaaataagttcttccacctaattcataagtattttacatgttactgagattacattattcgccgttaagtaattagttaagtaagtttcaacaacgacattcattttttatttttgagttcacttaagaattgtgaattttattagactaaggttcattttgtcattcaaataaacgaagcatgcattgaaatatttaaattatcttattttatttcataaaaaggagatgtttctgcaaaataagttaattttccgtttatgataagaaaacgagtttgttttggtctgctagaaaaggaagtaagtattccttaaatgtcccataaataaactaataagaaaaataacttcacgataaaagttctttttttcgcgcgttcattttaaatattttgatacgttgattctatatactaatagtgttggaaattgccgcattgcattcaagcagttcaaatccaagtagttcaagtctcaaacggcaagcatgcaaacaaacagctgacagtatttgtttttggtaatctcgttttgaacaaaaatttcgatgtgagatggagcaaataaatgaagatgtttggatagatatactaaagtacctaccaatgagggatcagttgtcgctggtcgaagtcaacgagaatatatcggcatacgtgaagtatcattggagtcatctcaaaacagtgactctgacccgcgaggatctggattttctggatcggaataacagttagcg

SEQ ID NO: 22292 - DNA, 3954 bp, DROSOPHILA
atggtggccaaaaacgcggaggttcatcgacgaggcattttgggttttgctccccggatcggattggtcaatgttgactacgacgatctggacaggattgacaacttctatttggagacccagaggtatcgggactattaccgcgatccgcacaacattctgcacaagccggagcgttttcggcaacatcagggaaaatgctcaattaaactggacaccagtgtccagaacttgaccaggccgatccatgcatcttcatccaacgaggcagttcatctgcagcagcggctcaaaagcctgagcaccgaattggtgactctgcgaaaccgcctgcatgtgggtcatggaccgggtcagggtcagagccagggaaatggcgcgcagcccgtcgccccagctcccaatgcgggtcccaaggccaacaactttgacctaaacgcatccagtccgaatctcaatctgagttccagcggcgcaggactttcagccagtgcagttcagcaacacaccaatggacatcacacgacatcgaagaatcacagcttcagccacacattgcccgcaaactcgggctctggtggaggaggaggcgctggaggaggcgccgttgtgtcggcgaggaacacgtcgattccacatccacttccgcatcagttggccgagaagccgggcctgtcgcatcagcagagtggcagcggacatggtcagtccaccgggacactgccacatatgagcggcatgggaagtatcctggggcaaaattcccattcccatgcaccggtcaacaacaacagcaacaactccaacacgctgcccatgcgcacctccaactccggacacctgggcatcaatggcggaggcgttggccaccatctcagccacgcccacagccagcaattgccattcatcccgcagtcgaagcacacgaatccctgccagagtgtgaagactctgccctttggattcggattctccgaaagtcagcagaagatgcaacagcagcagcaacagggcaactcctcgcccaaggacatgcaggatctgatccacttgtcgggaccgctcaccgaacatgccgtgatgcgaacgctccaggcccgattcaacgagcggcggtactttacgaacgtgggtccaatcttgctctccatcaatccgtacctggacgtgggcaacccgctgaccctcacctccacccgcgccatgccgctggccccgcagctgcagaagatcgtccaggaggcagtgcgtcagcagagcgagacgggctatccgcaggccatcattctctcgggaacatcgggcgctggaaagacggccaatgcgatgctgatgctgcgccagctcttcgccatcgccggcggaggtccagagactgatgccttcaagcacctggcagctgcattcacagtacttcgatccctgggatccgccaaaactacgaccaactcggagtccagtcgcattggccagttcatcgaggtgcaggtcacggatggggcactctaccgcaccaagatacactgctacttcctggaccagactcgcgtcattcgtccactgccgaaggagaagaactatcacatcttctatcaattactggctggtctcagccgggaggagcgccagaagctacacctggatggctactcgccggccaatctgcgctacctgcgaggtgacattggccagaatgagcaggaggatgcggcgcgctttcaggcatggaagacctgcctcggcatcctgggcatcccattcctggacgtcgttcgtgtcctggccgccgttttgctgctgggaaatgttcagtttattgatggagggggtctcgaggtggatgtgaagggtgaaacggagctgaactctgtggccagtctacttggcgttccgccggcggccctcttccgtggattgaccacccgtacccacaacgttcgtggccagctggtgaagtccgtgtgcggcgatggcgatgccaatatgacgcgggactgcctggcaaaggcgctctactgccgcacggtggccactattgtgcggcgggccaacagcctgaagcgcctgggatccacgttgggcaccctcagctcggactcaaacgaatcggtgcacaaccaggcggatgtcgcctctcagcacgcctccaccattggcggtggcaatgcgggctccaagtcgatggcggcactcaataatgcagtgcgccatgccacctccgatggcttcattggaatcctggacatgttcggtttcgaggagccctcgccacatgcccatctggagcacttgtgcatcaacctgtgcgccgagaccatgcagcacttctacaacacgcacatcttcaagtcctccgtggaatcctgtcgcgacgagggcatcgtttgcgacaccgaggtggactatgtggacaatgtgccctgcatcgatctgatatcctcgctgcgaaccggtctgctcagcatgctggatgcagagtgttcggttaggggcactgccgagagttatgtgaccaagttgaaggtgcagcatcgcagctccactcgcttggagacgaaacccacagccgaaccacacgatccacgcatgtttctcatccgtcactttgccggtcgggtggagtacgataccacggactttctggacaccaaccgtgatgtggtgcccgacgatctggtgggtgtcttctacaagcacacctgcaactttggcttcgccacccatctctttggatccgagctgaaagccctgtatgctcagcaacaggctccaaggggtctgagcttccggatctcgcccacatcacactcggatctgctgaacggggacgagccggtgtccacgctgacccaagacttccacaccaggctagacaatttgctgagaaccctggtgcacgccaggccgcactttgtgcgctgcatccgaagcaatggaaccgaggcggctcgcagctttgatagggctacggtggtgcgccagattagatccctgcaggtcctggagacggtcaatctaatggccagtgggttcccgcatcgcatgcgctttaagcagttcaatgcccgctaccgtatgctagccccattccgcctcttgcgccgcagcgaggacaaggctctggaggattgccagttgattctgaagtacgcaatggagcagccgccagtgctggatggctcggtgaccctggcctgggcacctggcaagcgtcatgtcttccttagcgagggcattcgccagcacttggagcacttgcgcaccgagatcaggcacaagagcgccaccctgatgcaggccacctggcgaggctggtggtggcgcaagaagatgggcaatggcggggccaagcgctccaaaatcccaggtcttcaacaggcgccactgccgaacaacaagaccacgccgaactccgccgcacagaacaaggccgcatcctccacaatggccgcccttgccgctgtggcagctgctgctcccatttctggtgagattcccccacgggtatacccattctccgcccatctaatccccaaactctatgatgcagtaccacgcctctcggccaagacaacgagcctgggcattggaggcactgtggccagaccaaggccacagcccattgctgggactcctccgccggatccgcaggagaagtgcgaccagaagatcattcagcagacctgtaacctgtttggactcgatttggaacgtccgccgccagttccgccgtctcgttcctacacgatcaccgggaattcgaaaataagctatccccaaaaccgggtcatgaagatgaactttccagaggagggacagtcggaggcgccgcagctgaagaagggcgaagcggtgaccgtagtgggggcctccaccgttcggggtcacctgatggtggagcacaaggggcagagcttccacgttcccttccagttcatgacgctcagtaaataa

SEQ ID NO: 22293 - protein, 1317 aa, DROSOPHILA
MVAKNAEVHRRGILGFAPRIGLVNVDYDDLDRIDNFYLETQRYRDYYRDPHNILHKPERFRQHQGKCSIKLDTSVQNLTRPIHASSSNEAVHLQQRLKSLSTELVTLRNRLHVGHGPGQGQSQGNGAQPVAPAPNAGPKANNFDLNASSPNLNLSSSGAGLSASAVQQHTNGHHTTSKNHSFSHTLPANSGSGGGGGAGGGAVVSARNTSIPHPLPHQLAEKPGLSHQQSGSGHGQSTGTLPHMSGMGSILGQNSHSHAPVNNNSNNSNTLPMRTSNSGHLGINGGGVGHHLSHAHSQQLPFIPQSKHTNPCQSVKTLPFGFGFSESQQKMQQQQQQGNSSPKDMQDLIHLSGPLTEHAVMRTLQARFNERRYFTNVGPILLSINPYLDVGNPLTLTSTRAMPLAPQLQKIVQEAVRQQSETGYPQAIILSGTSGAGKTANAMLMLRQLFAIAGGGPETDAFKHLAAAFTVLRSLGSAKTTTNSESSRIGQFIEVQVTDGALYRTKIHCYFLDQTRVIRPLPKEKNYHIFYQLLAGLSREERQKLHLDGYSPANLRYLRGDIGQNEQEDAARFQAWKTCLGILGIPFLDVVRVLAAVLLLGNVQFIDGGGLEVDVKGETELNSVASLLGVPPAALFRGLTTRTHNVRGQLVKSVCGDGDANMTRDCLAKALYCRTVATIVRRANSLKRLGSTLGTLSSDSNESVHNQADVASQHASTIGGGNAGSKSMAALNNAVRHATSDGFIGILDMFGFEEPSPHAHLEHLCINLCAETMQHFYNTHIFKSSVESCRDEGIVCDTEVDYVDNVPCIDLISSLRTGLLSMLDAECSVRGTAESYVTKLKVQHRSSTRLETKPTAEPHDPRMFLIRHFAGRVEYDTTDFLDTNRDVVPDDLVGVFYKHTCNFGFATHLFGSELKALYAQQQAPRGLSFRISPTSHSDLLNGDEPVSTLTQDFHTRLDNLLRTLVHARPHFVRCIRSNGTEAARSFDRATVVRQIRSLQVLETVNLMASGFPHRMRFKQFNARYRMLAPFRLLRRSEDKALEDCQLILKYAMEQPPVLDGSVTLAWAPGKRHVFLSEGIRQHLEHLRTEIRHKSATLMQATWRGWWWRKKMGNGGAKRSKIPGLQQAPLPNNKTTPNSAAQNKAASSTMAALAAVAAAAPISGEIPPRVYPFSAHLIPKLYDAVPRLSAKTTSLGIGGTVARPRPQPIAGTPPPDPQEKCDQKIIQQTCNLFGLDLERPPPVPPSRSYTITGNSKISYPQNRVMKMNFPEEGQSEAPQLKKGEAVTVVGASTVRGHLMVEHKGQSFHVPFQFMTLSK

SEQ ID NO: 22294 - DNA, 12216 bp, DROSOPHILA
caaagattgtgtgtctagtaatacccattgcattatttccagccctctatatgttaccttcataattctcttgattatgaattgtaattgtattgtatgttttgtttttaaagcttagacgaatttagtttatacgaagaaagcgctacgaaaacgtattgtacatcaccccacccaaaagccctacccttcaaatcaaaagaaaaaacccctatccaacccacttgtcaatgcaacttacgattagtcatatatgttatatatagataaatacattatacaaaacgtaattgtaaagaaaactaaggcaaaccacacattcactgcgcatccttgctgagttgctaagttgctgagccaacgaaagctgctgacatcggttgtaattaccctgtcgtgtgcacgtgcaaaaactgtatatacaaacaagcatataacttacaccgatcgaaatatataaacattatatacataaaatgtaaacgagagacaagcacaaatatgtaaaaacgaggaacgggcgggcgattataacttatacaaataatattgttcgatttttgcgaatttgtatgatttgagcggtatccaaaaaaacggaaagtgtggtagatgtaatgaaataaaatttaaataatgataaacatctgcaatagcttgtttaaatatttttataagtgcgggaactgttacttcgaaacctgactttttaatattgaaatagaacctattatcctggaatttatatacatatgtatattccaacgacccacagccaaataaagtacgcattttatttgatttccaattatccacaattttattcgcttcaaaatgtgagtgtgtatatagtatatatgttcatatataatgtacaaatttctcttcgctgtcgttggttttggaatttgattatatcaagatcagatcagcttcatcttcgttcttaatttactaacaactacacaagacaattaattaattaaaaatacgataataatttatgtacaaaaatttccatcggatttatttgtgtgtatttgtgaaaaacaaaactgtagacaattcaaaaaactgaaagaaaaatacttggaaaactttcacaattttctttttcacaagcgattgctttctgtgttctagttgttgttgttggttggttggttggaatgttatacacgcattaatataaaatatacaaaaatgatatatagagaatacgttttttgaagaaggccaaatatggtagaaaggcatgttttaaaacttgttgattagttttggtttttactttttcttttaagctgctttaattacaaaacaaatcgagacgattcggttacaatcttagattcttcgggtttagttgggtacatgatgactccttcttctagttcctctcggtctacaccctcgtcgagattcgattcgcacagcagcaatcacaggcgtggtcttcttgttacttaaacggaacgaggctggacgactgcaaattcaaaataattgtatttagaaaaactgatttcaagatatttctatgatcctatcccatcctcatggtcctcagatcccattcacattcccatgataatacaagtgtaaagatctactcacagtgtggtcgctgggactcttcgggggcagcagctcctccctccatggcctgcatcatgggcaccgggatgcggacgggctgagcgagactgcgtccgtagaccatgcggccgaagggcagctgctgcggctggtcgggcatcggcggggtcatggtgtcacggggctgctcaggcaggggctgcaggatcaaacgctgaatgcgcatctggggcacctgctgctgctgctgctcctgtcgctcctggctgacttcctggtgctgttcctctggatgctgttgctcaggctggacggtctgttgctgctgctgctggggcaccgtggtctgtgcctcggtggtggcctgctcggcggagctggagacatcttcgtcgctgccctcactggattccgcaccctcctcggcggccagacgacgcagctcgtcggtgatgcgatcctcggccatgcgctggatgttcctcagatcctcggcggtgatgccaacgcgctgcagggccattccgaagggcatgggctggatctgaatctgggggatctcacgctgctcctggcgctgctgcatctcatgacgctgctgcatctcctggcgctgctgcatctcatggcgctgctgcatctcctggcgctgttgcatctcctgacgttgctgcatctccagacgttgctgctgggcggggatctggacgggcacatcgtcggccacatggatctcacggaaggggatctgctgcatgtgaatgcgcacggtctggaccttgggcatctgcatttcctcggaggactccatgcgaggcgcctgcatcacctgtggcggcatgggaggacgcatgggcaggtgctggaacggaggtggcagctggcggatgatgatgggtccctgctgttgctgctggggcaattgctgttgcatctgcatggctggtggcatcatcctctggggcatatgggtcagcggcatctggtcgggaatgcgtccgaagggaatgggcactcgctggaagggaatgaacatgggcctcagcggctcggcatcctcatcggagtcctcctcctcctgctcccgctggcgcttggcctccttctcctccttatccttgtcgtcgccgccgtcgcagaagatcgagatccgctcgccggtgatgcgtgccttcttgggatccgtggtcaggttgactccgaagggcagggctaccgtcttcgagggcgagtcgacaatctcctcggcgtgcttgcgctccaccacacagttcatgcgggatctgttttaatacggacaaggattggcattagaaataaatcgtatttagaaagcaaatatcaggatcgaaaattaaattaaattttaaattgtattttttatcaatctttttgatgcttacttcttgttgttgcgcagaatggcggcagccaggtcactcaagtccagctcgagtggcatcttgccggggaacttctgcagctcatcggtctcatcgctgtcggagtaggagttgtccttgtcggggtgctcctcggcatcctgggtggcttcagtcttacgactttccggctccaagctctgcagttcggagtcatcggcagctccagcagctcctcccagcaggggttcagcacggggaagttcctaaaaacaaggaaaatacattgttatattttaaaaatcctttacttatcttgcaatattgtagagtaatatatattatagattgttatttgtttacgtcattcccctaagcagacatatttaagcgacccccaattttcgatcttagatcatgttgcgtgattttgtctcccccaattttccaacgttttgtcgtaaaattgacaaagttgttttctttgggccctcaactgaaactgagtgtctgctttgcagttgcttttcattattttcttgactattttttatttttattttttttttgagccgagtttcttgccagcacttcgtgcgcaaaacaatgaggggcagagacccccggtggcagtcatcgcagtcaattgcccggcggagatgtgaccccaacctacatacgaccgaaaccaaaagtaaaatgccatcggagtaaaatgctcgttgtagccgcggcccgagaagtccaaacaaaacagcgaaccagccacgaaattacataatcgcacgatcacacacagccaagcaaatggctatatctgcgttttgtgaccgagtggatcgtggctaagcagaattcatgcccggccacaatgggcacagaagtaaacaaacgaaaaataaatttaaattatatgactctttcattaatggccagcgacgaacgagggggagttgggtggacttcaagcgggatggaggtgatgtggataatgttttatatatccggttcggatggatggatggcttattttgcaggtcaccccgtgtacttgacaaaagaggttgacattgaattaagacgagttctcttcgcatttcctctaaatgattgagatttatatttagtttaaaagatgctctaatcatgattcaagcaggaagtctgcccttcacctttaagagatggatttaattgtaccccagtttcttgacaaaaactttcctataattgaatttaacaaaatttccatttctcagaaaagccgcagattgtcaacaaaaaccggactggtatgcaaaatggtccaaaagtgagtcaatcttgagtcatgtgctcccaggccaggtgacacacaatccgtaaatttcactttaaaatcatatgtgtaagaggaaaacagcaaaatgggtagaaaataaagaaaataagagctgaaatcgaaaccaagcccaacaaccagttcagcaaacaagttcgctcgatttgattgtttgcttttcgcattcgtagttgaatttcaaggccaggcgcgtctggagataagatctattataatacaaagagaacatttgtttgcctctaatttgcctttgcttattgtgcgggacatgtggggaatcgcgtcgcattaagatgacaattaaatgattacaaattgaatgcttcgtgcaattaaaatgactgacagccctccgaagtcggacggtaggcatttaatttgcaaaacttttatttatagcccgagtgagtgacgtgcgtcagtcgccgccggctgcaattgtcattctagaggcggctcatggcaatttctttagggaaatcatccataaaaaaaaatccatttgcgcttagccagcataataagtttttcttctacccgtcgcttggttgtccaagtgccaagcgattttgcacaacagcagataaattacatttacctatatgctagctgcctgtctgccagtatgtcggtacattacataatcgtcaggccaaaaagcatttgctttgtccccaaaaaaaaaaaacacacacacacagcagcagaaacaaagtgcgagaggcaagcggagaaaaacgaaagactcaagcgcgcaactcgccttaaatggcaaacagtcaacggcaatggccaaaaccacaatggaagcccggtctttggtcttttttctgctgatggctttttgctggatgcttgggatgtttgcccgaaaggttgtttggttcgtttgcttatttttcttctttttttttttggctttcggtcggcggtaccaagcggcgccagccggcaaaagaaacccaccaaaaaaacaaaaaacaaatacagcagaaaacactaaaatgacagcaaaattgcattatggaacggctgttgcaagcgatggccacgtgagaagatcttcatcagccggagatatcaacgttggaaacgaaggtgtatgaaatcgcatttgagaggcggaggatttattaacttcatttggattctgggaaataaccattaaaagggagaggcttttaggctgcaagtgcattgacatcatttcgaactctaaaggagtcaaagtaatacttataaaaaaccatacctctttaatgcaaagattcatttgtcttactactgattagattcagtgcagtttcatctcttagtacctacacttaaattcaatctacagctattttttagttactgttactgttactgaaattgtttttaagctaatatttaaaatcatttgcttatcgatgtcgttagccttgagtctctaataaaataaattagtattcgattttgaattacagagcactgtaaacaatggttcattacgatggccgttattggcagctttcactcttatccattaactcgccgcacaatcaaattaattgggatcatatactgcagtaatgaggctttataaaaaggcgtagttttttagagggtttggctctttttggttgatcacataacaattgcatttgttgcatggggtaaaaatcactttcacgattttccgaccatctctagtggcagctgctctttccagctgatgatctctggcattttggatgccccagcagcagcagcagcagcagcagcagcaacaacagcagcagcaacagcaacagcagccgcagcagcaacaattgctgcgcccacgcccgcttcagtggatttttgttgtatctttttgtatgtggcttgcaacatgttttgttactaccgaatgctgctttcacttcgtctggcatttgattcgcaattgtgtttgctctctggttattatgtcgcaagctccaagctgcgagctccaaatgcgaactccaccattttggtgtccacttaagcgtcaaattatgggaatttcgcttgattgaatttatcgttgcattcgctggattcgtttgtttgctcattcgtttacataagccatctgcacagcgggttgaataacctgatcagagcatatatgtatgcatatctatgctatgtgaataatttgcttcagtttgcactttccatatcggctaattgaatattgatgacacgaatgcaaatgattggaccgccagtcattaactttgaattacgcgccttgcccagtcatccaatcatcaatcagccattttatatccatagtcctaaagttgtgtctataaagttgttactttttttcataactgccatttggttatggttacatgcgtgaaatttctcaaggaagcatacaattgaacatttttttgtttttttttgctgttatgtacatgtgaatatgcgaaattgctttggagctaggtgcttattcaatcacttttgattgaattggcagttatgtggcaagatatttgtataagtataatgactaggaaacgtttagatttactgcaaatcgatatttcccaataaatttccaaagtgatagtgatttacggaaaaaagtaatttactctccactcagatatgtctatcttgtgattggttttataattatatgaatataaagcaactgatttatttactttacagttaatactaattccttttgttttcttttggcgtcaaattaaatttctgcctaatgagaagctcttgttacgattttaggtaatatatctaacatgtgaatatcacatttcgtgtatgcacacaccgcatacagtgcctgtcgaaagtctgcgatcccatggaactaatagcgcgtgcagtcaacaacattttgagggaaattacagcaggtccacacgaagggggaacatttttcggctaccacagattatagctacattttccggtaattatatttaattttgcttaatattcgaactttttttttttgggagtccgacttcaggccgtagcgtgtgcagtcgaacgatgcgagccattattagccaactctataattttttaaaattcagtgccccatagagcacgatactaatctgccatggcaacggatcattgaagcacaacggattgtacggattggcatatcggttggaatacatatttcgcgaactcaccttgcccacctgctgcaaagtctcaagcattagctccttttccagcaccgagtcgagggcctggacctgatcgcacgaggccttggcctgcaggtaggaggaggccaggatgaaggatcccaggatgaaggctgacacgatgatggtgaaggcggtgatcttggcgattttcaccgaattcgcctggcgcttgtaggcctagaatggtacagaaaatcacattagctttgcggtttttttcaatgaacatacatagtttttatttgtgtttgcaattcaatatttctacgtgctcatttgcctatgacctctctgtgtttcggttttttttttgttgggggtaaggtaaaagcgacgaccttactccacaaaatacacctcagcatggtcaagcgcgtttttcgcttcaaaacgtcgaagttttcgagaatttcaaagaagtgctgggtgcataatttgtgattttttgtgagtgataataacttatttacataaaatgtgtaggggttacttcagttgcgactgttttaggatgggtcatgcaatttcattaatattttattatcaatgggcttttaagtgctgtttccagttgacagaggttgctcggcattaatcattaaaaagccaaacagtcagctataagatgagacccaaggtaatgaacaataagtgattgttaaaggcatttaagtttttggcaagtgctttaatcgagaagaaactgcgccttagatcatcgcaaatatttgcctttgccagcagtgggaagccgtgactaatgtgcacaacaaatgctttccgcgtaaggtgcaaaaatttacaagtggatgcaaaaagccgcagcatagggagtatccacaaaaaagttaggccagccaaatgaattccgcatttgaagattttttgttgcgcaagaggaaaccctccgcaaaattgaggaagtggcaagcccaagagaaaaggcagtctcgggtgtgggtgcagtcaggtgaggcggctttttctcggttatatctatatcttttttttttctgaaatgtgcaatgttttttgttaacacctctacgtgcgtggctggcgtggccccaaaatgcagttgcgaaagtgaattgtgagtgagtgagtgatcatcatcatcatcaacaccaggcgaagtgaagtggaagtgaatggctcgcctggcactctattttactctactctactctactctacttgatgaggttttaatttttttgcgttttgtgtttttttaaactttttttgtgaagattttcgtgcagacaaaagacttgagcgacaaacctgatgattaaagttaaaaaatcccatctgtggttggttttgagtgtttggttcgttttttgtgtggtggcgagtgcgggggaatagagaaaatttcatattgtcaatcacggtttcgggaatggtttgggtttcggttattcgcattcacatttttcagccaaaccaaagaaaaacgatttttgtggtttttgtttcgagtgttgtgcacacacacacacacacacacacattgcaaggtaaaaatacataaaaacaagaaaagacaaaaagttaatgagattgtactgcagttgtgtgtggggtcgcttaataatacttaaggtgaaaacctaacacatatggcgcaaaggtaaacaaatactgcacaaaagggaaagctcttggccaagggtcgattgtgaaggctaagacagagctactgacatattaggtaactcattgatagatgaactctgttatagaaaaggtcagactattggctctataaagtaatggttgttatgctcactgtcccataatagaacatcataataaaggtaattctagttcactttttgcattcagtacatattaatgataattactttacagatttcagcagcactgagcattattcctaatgggtttttctaatggctcggtctgcagtcattaagcgattaaaatttagcaaaaacagataattatacaaatacattattttcattttccataaacagggtatcttttagctgttttttattttcactaactggtgtctatatgtcagccaatcaggtttgccgcttttttgcattgggtcagtggaagtgtgcactggaattgagcctgttagataactttttgctttcactgtaccgctggcaaggcgataatgatggaagggggaaaaccctcgcgtgaatggaaccgcacaaatcatttatggctgatgcggatgctgactgttgaatgccaaatgcaaaatgtacggtgcaatttatgcaaatttgtattacaatttagcccacacaacaacaccactacgccaggggatctaatagttttatttttatatctatatatatgcttaataaatatggtgtatggtatggttgggaaaacaagttgaacaagtcaaagtactcggcggtggcgcagtctatatagatatggtatttgttttggctttgcgttattagcgtgtcgtgactgtggcattagagctcttcgcgattcggattgaggcggatttctatttgtccaaccatatcggatacacagatccattcacaccttgccaagacagaagtatgtatgcaagtaggtacgggtgtatcttgtatcttgcagatacgaacgttactgtggactatttcagggaaatgtcaagccgctgacaattgtcgaaaccgatcacgttgcatgcgattccctctcgactgtcagacggtaataatttttaaaattgcacattaatggcggggcatttgcaaattgcttatgcatcatgcagtgcagactgatttggcgaaaatgcagctcacgtttgcagctacttgcagaaaaagtccgcattgcgcatacgctctgtggtccgtcggcggatgcaataagtcaaagggtgaccctggcattttctaacccacttggctgccaaccgaccaatcaacgctcaacaggtcagttgaactgcaaagcttagttgagcgcagactagatgttgatcagaaaattaaatgatcatttaaattagcttaataaacaagtacattttacgcagaaatactaatctattaatctaatgaatttatgatttattttttctgtgcaaaatcaaccatcgtatgtatctgtttgtcattagtttcgccactagtcacttgtgtggcaactcgaggcttcactgtactcaccggtggcggttcgctggcggtgctgtagacctcgctagccgcatagtcgggcttcatttgcacggtagccatcgagacggtatccttctcggtcatctatagcactataaaatatggggaacaatcggttaactctcggctactcgaagtcctgccatgtaaaatccaagcaaggataattgataattgaggacaataacagttcgttgaagttaaagtttgaaaaaggcacagttttctacactttcttttatcacttttcacttgctacagttttatacagcagcctctggcattagtatccttcacttacgtagaggattttccaaaaattcgacaaaaagtaagaggaatttcgttgtacgatttatttttcagcggtcttgttggtttttgaaaaagttgcctgaccaacttttcagcagggagacttttgggcctctggaaactttggattactacgtctttgttgtacgactgccactcgccgtctgaagccacaaacgcgtttcgtttcagatttgtctaccagatttaaaacttttttcactcggcgactgcgacgccgactgcggcagagcggtcactcacacacacacacactcgcaggtaaactgaagcagacagagacagctgcacgatcagcacgaagctaaaaaaaaacgaacgaaaaacaaaagctaagcttaaaaacacaacaaaaaagatcaacaataacacactcaagcggcctggctggcttactcacacactgacactttgtccatgggtcacagtaggcactcaagttattgtttattacttaaggtaaaacatatagctattagtatacttttcaaatattttatatattatagtataggtgacaatattttatataataatttgaaaaggtacgaaatccatgtagtcgagtgattactgttcgttttcaagccgagcttaggcatagaaaaagctttcggctgctttggaccctacaattgagctacacacgtgattgtgcgttgacgctgagcaattagccgaatgcgaattaaattgaatttaaaaataaaatcatatcaaatgatataatggcttgtgtacacacacacagctatttatagtgccttttgttgactggccacttttctagccaaacgattcgcaacgcattccatcaattagaagcagctaatgcgttttagaagcagaaccatttaggtgagccaagtgcgaagccagcgatatgccccaccgatatgtagggtatactatatgtatgtacatatgaaaaaaagctctcgcggcacactaaaaattaaaggtactcgcacaactccgccaacacaatcacatacatacataaattaacaatcagagtagacctcgtataacttgctccccgactcaaaagtggttggctgcagctcgtttgttgttgcaccacttcaagttgcttacgaaaaaggaaaaaaaaaacattgggtttctgtagtatttctatattt

SEQ ID NO: 22295 - DNA, 2500 bp, DROSOPHILA
agacggcgagtggcagtcgtacaacaaagacgtagtaatccaaagtttccagaggcccaaaagtctccctgctgaaaagttggtcaggcaactttttcaaaaaccaacaagaccgctgaaaaataaatcgtacaacgaaattcctcttactttttgtcgaatttttggaaaatcctctacatgaccgagaaggataccgtctcgatggctaccgtgcaaatgaagcccgactatgcggctagcgaggtctacagcaccgccagcgaaccgccaccgatgggattttttaactttaatcatcaggcctacaagcgccaggcgaattcggtgaaaatcgccaagatcaccgccttcaccatcatcgtgtcagccttcatcctgggatccttcatcctggcctcctcctacctgcaggccaaggcctcgtgcgatcaggtccaggccctcgactcggtgctggaaaaggagctaatgcttgagactttgcagcaggtgggcaaggaacttccccgtgctgaacccctgctgggaggagctgctggagctgccgatgactccgaactgcagagcttggagccggaaagtcgtaagactgaagccacccaggatgccgaggagcaccccgacaaggacaactcctactccgacagcgatgagaccgatgagctgcagaagttccccggcaagatgccactcgagctggacttgagtgacctggctgccgccattctgcgcaacaacaagaaatcccgcatgaactgtgtggtggagcgcaagcacgccgaggagattgtcgactcgccctcgaagacggtagccctgcccttcggagtcaacctgaccacggatcccaagaaggcacgcatcaccggcgagcggatctcgatcttctgcgacggcggcgacgacaaggataaggaggagaaggaggccaagcgccagcgggagcaggaggaggaggactccgatgaggatgccgagccgctgaggcccatgttcattcccttccagcgagtgcccattcccttcggacgcattcccgaccagatgccgctgacccatatgccccagaggatgatgccaccagccatgcagatgcaacagcaattgccccagcagcaacagcagggacccatcatcatccgccagctgccacctccgttccagcacctgcccatgcgtcctcccatgccgccacaggtgatgcaggcgcctcgcatggagtcctccgaggaaatgcagatgcccaaggtccagaccgtgcgcattcacatgcagcagatccccttccgtgagatccatgtggccgacgatgtgcccgtccagatccccgcccagcagcaacgtctggagatgcagcaacgtcaggagatgcaacagcgccaggagatgcagcagcgccatgagatgcagcagcgccaggagatgcagcagcgtcatgagatgcagcagcgccaggagcagcgtgagatcccccagattcagatccagcccatgcccttcggaatggccctgcagcgcgttggcatcaccgccgaggatctgaggaacatccagcgcatggccgaggatcgcatcaccgacgagctgcgtcgtctggccgccgaggagggtgcggaatccagtgagggcagcgacgaagatgtctccagctccgccgagcaggccaccaccgaggcacagaccacggtgccccagcagcagcagcaacagaccgtccagcctgagcaacagcatccagaggaacagcaccaggaagtcagccaggagcgacaggagcagcagcagcagcaggtgccccagatgcgcattcagcgtttgatcctgcagcccctgcctgagcagccccgtgacaccatgaccccgccgatgcccgaccagccgcagcagctgcccttcggccgcatggtctacggacgcagtctcgctcagcccgtccgcatcccggtgcccatgatgcaggccatggagggaggagctgctgcccccgaagagtcccagcgaccacacttcgtccagcctcgttccgtttaagtaacaagaagaccacgcctgtgattgctgctgtgcgaatcgaatctcgacgagggtgtagaccgagaggaactagaagaaggagtcatcatgtacccaactaaacccgaagaatctaagattgtaaccgaatcgtctcgatttgttttgtaattaaagcagcttaaaagaaaaagtaaaaaccaaaactaatcaacaagttttaaaacatgcctttctaccatatttggccttcttcaaaaaacgtattctctatatatcatttttgtatattttatattaatgcgtgtataacattccaaccaaccaaccaacaacaacaactagaacacagaaagcaatcgcttgtgaaaaagaaaattgtgaaagttttccaagtatttttctttcagttttttgaattgtctacagttttgtttttcacaaatacacacaaataaatccgatggaaatttttgtacataaa

SEQ ID NO: 22296 - protein, 617 aa, DROSOPHILA
MTEKDTVSMATVQMKPDYAASEVYSTASEPPPMGFFNFNHQAYKRQANSVKIAKITAFTIIVSAFILGSFILASSYLQAKASCDQVQALDSVLEKELMLETLQQVGKELPRAEPLLGGAAGAADDSELQSLEPESRKTEATQDAEEHPDKDNSYSDSDETDELQKFPGKMPLELDLSDLAAAILRNNKKSRMNCVVERKHAEEIVDSPSKTVALPFGVNLTTDPKKARITGERISIFCDGGDDKDKEEKEAKRQREQEEEDSDEDAEPLRPMFIPFQRVPIPFGRIPDQMPLTHMPQRMMPPAMQMQQQLPQQQQQGPIIIRQLPPPFQHLPMRPPMPPQVMQAPRMESSEEMQMPKVQTVRIHMQQIPFREIHVADDVPVQIPAQQQRLEMQQRQEMQQRQEMQQRHEMQQRQEMQQRHEMQQRQEQREIPQIQIQPMPFGMALQRVGITAEDLRNIQRMAEDRITDELRRLAAEEGAESSEGSDEDVSSSAEQATTEAQTTVPQQQQQQTVQPEQQHPEEQHQEVSQERQEQQQQQVPQMRIQRLILQPLPEQPRDTMTPPMPDQPQQLPFGRMVYGRSLAQPVRIPVPMMQAMEGGAAAPEESQRPHFVQPRSV

SEQ ID NO: 22297 - DNA, 2889 bp, DROSOPHILA
actcagccgagactggtcgacgccgcaacttcatgatcatcgaatcaaagacaatggcacagacaaagaaaatcggtggattcaaagccaaacaacgattgccagcggaagtaaaacaaaacaaaatacacaaaaaaagaagagccgaaaagcaaagaaacttattttcatataaatcaatgatagccaataaactgtttaacttcatgttaaccacatacttgaattaagtttatgtttaatgggctggtgtcaaggattggcattaacaccctaagttgttccccaccttgacctcaaaaggaatagtagcttaacatttctttcagttcctatgaagttgtccctctttccatatcttttttccttaattaactttcgctttcggtggcaatggctggaaatgatcttgaacttcagcaatccatcgcatgggcagggcgtaaaaggcaaagttgtaaacgggttttatcgagccaacaaacgaatgacttaagcaacgaactttggcacagcgccatctggtgttcatgatacgaaaagtttctatgcgaaaaagctgttatgtgtacactgtacaaaatcgtgggaatttttcaaagataacatatttgcaacaagttttgattctgttatctactttcggtcattccaattattaattcggaatgctggtttattatgtaagcttttggcacacacacaagtaactccaactagccaatttcgatgtgggataccctgttagggatcaaaaggaatttgaatttaatctcgtaaattttataagggctagcctaaacatattgcttgtgatcgcccaagaaatatcccaggcattaaagcttagcggagtttgcaaccactagcagtaaaattcaaaatcatagccaagcacctgttttgtgaaatcgaacgactgaggaagcaaacttctttttatgttaaaactttattggtcggattcagattcgtttacagataaaacaggtgtcgttacttaatcgttccaccagccggcaccgccgcgggagccaccaccagcagcaccaccgtaggccccacctgcaccaccagcacctccggaagcgtggttgacagtgtaatcgaactcagcggggttaccccaggcgttgccagctccagcacctccggcaccaccctgccagcctcctgctccaccacgacctgctccagcaccttgccagccaccagctcctccagcaccaccacgaccagctccagctccagctccttgccatccaccagatccgcgtccaccgccataagaggctgcaccaccgccgtaggaagctccagcaccacctccataggcagcaccagctccaccgccgtacgaggcagcaccgccgccataagcaccagcaccgccggcggaaccaccaccaatgtggaccttagtgttgccctgcgactgcgagacgtgggacaccaggccagctccaatagccgggcggccaccgaatcctccgccgccaccaccacgtcctccgccgggcagatagccgcctcctgcaccgcctcggaggccaccggcgttggccagagccagggaagccaacaagcacacaaagaccttgaaggatatcgttaacgagactaactctttaagatccttagcgctcctcgatttcttaccttcattctggaaattgagtttattagatttaagattctgatcgaagctgagatccaatggtttgtgatgcctttggaccaagaaacacttgaatttatagtccaagtcctatggatcttctttggctaatgatccggacaagaaaacaaaaaacaagtatgaaagataagatataaaaattaattttaattttaaaaaaccaaaacatcaatttgcttcgctcaatcattagattctcttgccctctgaaatcatctttatctatagctgaacgaaaactgctcttcgctttttgttttccttggctttaattaaagatcacaaattaattgcatggcggcaattagcccgcgggcttccgattgcccaatcacgaacaagccaggtgtcttaaaagcccgaaaagtggacgcagtgcgtccagtttatgcccatgttgctgcgtgggcgctatacacactcctggctgctcctccacaaacctttgtctttggtttttgttttttttttttatttttgttatttttttgaaagtgcacaaattgttagttatgcaagcgaaaatgcagaaatgcaacacatcaacttgacagaagtaaagtggaaatcttgctgagcaaaaatgctgtgaatgggaaatttgaaatggggaagtcaaatattttggcatccaactgaaatttgtatttcacctgtgccaagtcacctcgaatgacctagtggcttttaaaaaattcgtgaaggtttttctggcaatgataagtggttttttcttgcaagcaaattgtgttaaataatcaatagctcatagtcctatcctatattaacttttaatatttttaacagtaatcatatttaaatacatatacccgtcactcgtaaagtaaaagtgtatactagatcacttgaaaagtgtataacaggcagaacgaagagtttccgaccatataagatatatatatatattcttaatcagccgagtcgaactggccatatccagttccgtttgtatgaacgtcgagagctcaggaactataagaactaggaggttgtgattaagcatacagattttaaagacttagacgcagcgcaagtttgttgaaccatgttgccacgcctactctaacgcccaaatctatcccgcccacaacttaaagcattcaaaaaataattttcttaacgggtacctgatagtcggggaactcgactatgaagcattctctcttgtt

SEQ ID NO: 22298 - DNA, 753 bp, DROSOPHILA
atgattgagcgaagcaaattgatgcatcacaaaccattggatctcagcttcgatcagaatcttaaatctaataaactcaatttccagaatgaaggtaagaaatcgaggagcgctaaggatcttaaagagttagtctcgttaacgatatccttcaaggtctttgtgtgcttgttggcttccctggctctggccaacgccggtggcctccgaggcggtgcaggaggcggctatctgcccggcggaggacgtggtggtggcggcggaggattcggtggccgcccggctattggagctggcctggtgtcccacgtctcgcagtcgcagggcaacactaaggtccacattggtggtggttccgccggcggtgctggtgcttatggcggcggtgctgcctcgtacggcggtggagctggtgctgcctatggaggtggtgctggagcttcctacggcggtggtgcagcctcttatggcggtggacgcggatctggtggatggcaaggagctggagctggagctggtcgtggtggtgctggaggagctggtggctggcaaggtgctggagcaggtcgtggtggagcaggaggctggcagggtggtgccggaggtgctggagctggcaacgcctggggtaaccccgctgagttcgattacactgtcaaccacgcttccggaggtgctggtggtgcaggtggggcctacggtggtgctgctggtggtggctcccgcggcggtgccggctggtggaacgattaa

SEQ ID NO: 22299 - protein, 250 aa, DROSOPHILA
MIERSKLMHHKPLDLSFDQNLKSNKLNFQNEGKKSRSAKDLKELVSLTISFKVFVCLLASLALANAGGLRGGAGGGYLPGGGRGGGGGGFGGRPAIGAGLVSHVSQSQGNTKVHIGGGSAGGAGAYGGGAASYGGGAGAAYGGGAGASYGGGAASYGGGRGSGGWQGAGAGAGRGGAGGAGGWQGAGAGRGGAGGWQGGAGGAGAGNAWGNPAEFDYTVNHASGGAGGAGGAYGGAAGGGSRGGAGWWND

SEQ ID NO: 22300 - DNA, 2724 bp, DROSOPHILA
aatggagatcgaggcagctgcgtgtttgtctttttggctaccgtgctaccgtgcggttgcacataattcgtgctgtcttgaaaatcgggtcaccgcaaatcaatcaatcaatcggagacttgggcccaattgttccgctgcaacttatgagttggcacagaacccatcacaggagattgacgggtctcgaaagtaggtgtctcacaccacgatgagctatatcattattttaaaaatgcggatcattgctatagattattcaattttatcacagacataattctaaacaagaatagaaaccgaaatgtatatacatttggctagaatatttttttatgtaatatattcacaatatttattttatcaattttttttatattgttatttttaggtatatattttattttaaaaatatttatttttaaaatttgattaaatcacattaataactattttacaacaagaagtattttaaagctcatcattgaaaagaatttttatttattggtataccccaaatttattcgcaagaaattaatcctctagaacaaagacaagaatgaatatttttttgaaaatttaaatcggcctatcttggcccaaaatgctaattatagacgtctgatcggccaattctagaaccgaaccgcttgaaccttttggcttttgcacgtttcgattttaattcatgggcggcataaaaatcaaatttggctcttttgttcgatcgactgacaggcttttttttttgcgacggattgatcgatggctggaaaacaatcaaatgcgctttttggttgcgcaagtgctgcagaaaagccgaaatagatgtcgaaagtgcactaagtacctgtctcattaccttccttcttcttacttcgattggcaggtgatgacctcaaccatttggccattgggtcagcggcagaatcgactcaagattcgaagcaggaagccaaatttaaccggttccccatgcaagcacaaagcacacgcaatttaaaatggaaattcttttcttgtatattgtataaattctaacaaacaaataccgctaaaaaatataaaaaaaaaatattaaatcctaagctgcttggctttcggtttggcagtttgaactatttatagttggtccatattggcttgctccacatttaccagcccttgttccagccggcggactgagcgccggaatagccaccagagtagccaccagactgagcgccggagtaaccaccggagtagccaccagactgagcgccggagtaaccgccagagtagccttcgttaatgaccttcacgatgacaaccttctcaacgggcctgggagcagcatatccgccagagtagccaccgccgccggagtatccaccaccgccggagtatccaccaccgccggagtagccgccaccgttggagtagccaccggagtagccgccgccgcctccaccgccgccgagcttgccgccaagaccaccgctcagaccgcccaggccgccgcccaatcctccgccgagaccgcccagcttgctctgcagcagctgtccgatgccgccagcgcctccgccaatagagccgccgcctccaccgccgccgccaagaagaccgcccagggaggcctgtcccacggacaggatggcggcaaggatcaccaggatgcaggcaaagggtttcatctcgagtagcgaatgggatacaatcggtatcaaacagctgaccaaactaattccaaccgctgacggagcacacacctttatacccccgaaaaatcgatgggtcgctccgaatgagatgggggggggggcccaattagaagccattgatgggcagagcgaccagagcagcatcattgattcggctgcgatttcataataacccacattcggttatgctggccggcggttcttttgtttgcctatgctaatctgtgcgcatgcgcggctcacttcggatgaggaaccgcttctcctttagtttgcacagtgggttgggaggtgttaaatgcagagctgcagccgttgggaaatcgagtgacaacatcatctgaccaggagtggaaagagcacacagttcaatttgcaacaaaatcacacttaattttgagtagtgatcacgattctatctgcattttatgctacgaaattcattttgaatacgagtaatatacattattacctattttgattttgttttatttttatattttctgtgagctaacttcattcttctgttcacttcatagcttcttctaaatgttatttgaaataaacatagattaaccagtgtgccgctgtgcaaatcgccgaaagtcaaacaaattatcggcatttaatcaccgcggccggcagtggccaacaatggatcgacaatcaacatttatatcaatgttttgtcagttggccaaaagcagatagcagaagcagccgaagtgtcaaacagatgaatggctaaatcgtgagttctgcccaaggtttagaggttgaagtgggaaaactaaggcatcttcctgctttggccaagaacttttattaactcatcgctcggaggcctattcaaatctgtacctgtattgtatagccaatagcaaatacccatacccatagcccacatcatcgcttattaatacgtagaaccggttcggcgattctatttctatgcttcagtttggcatatatttgcatagtggctgggcggatatggcagattgcctgggaattttcgctg

SEQ ID NO: 22301 - DNA, 724 bp, DROSOPHILA
agtttggtcagctgtttgataccgattgtatcccattcgctactcgagatgaaaccctttgcctgcatcctggtgatccttgccgccatcctgtccgtgggacaggcctccctgggcggtcttcttggcggcggcggtggaggcggcggctctattggcggaggcgctggcggcatcggacagctgctgcagagcaagctgggcggtctcggcggaggattgggcggcggcctgggcggtctgagcggtggtcttggcggcaagctcggcggcggtggaggcggcggcggctactccggtggctactccaacggtggcggctactccggcggtggtggatactccggcggtggtggatactccggcggcggtggctactctggcggatatgctgctcccaggcccgttgagaaggttgtcatcgtgaaggtcattaacgaaggctactctggcggttactccggcgctcagtctggtggctactccggtggttactccggcgctcagtctggtggctactctggtggctattccggcgctcagtccgccggctggaacaagggctggtaaatgtggagcaagccaatatggaccaactataaatagttcaaactgccaaaccgaaagccaagcagcttaggatttaatattttttttttatattttttagcggtatttgtttgttagaatttatacaatatacaagaaaagaatttccatttta

SEQ ID NO: 22302 - protein, 173 aa, DROSOPHILA
MKPFACILVILAAILSVGQASLGGLLGGGGGGGGSIGGGAGGIGQLLQSKLGGLGGGLGGGLGGLSGGLGGKLGGGGGGGGYSGGYSNGGGYSGGGGYSGGGGYSGGGGYSGGYAAPRPVEKVVIVKVINEGYSGGYSGAQSGGYSGGYSGAQSGGYSGGYSGAQSAGWNKGW

SEQ ID NO: 22303 - DNA, 2772 bp, DROSOPHILA
tcaccaaatgccccacacaacgagcatgcaaatccgaaaataattgctcacttaccaaccccaaaacaagcggggattacgctttggatacttttgtatctatcagcagctcagcaaaaaaaataacacatgtattaaaatcgggcagctctaagtcggttactattcaagtacccgaaacgctctgcatatgcgaatcaatgaccaattacagttaatctgctaacagatacgaataagtgcaaggacgcgcaggatgagaatgcggatgtgaggatgtgagcatgcggatgacgaccgtgaaacggacaatttgtattcgaagcgggtaatccctatgtgagtgcttaggtcaagttgtttcacattcacattctcttcacttcttgttttttttcactttttgtgccaggccatacttttccctgcttttttattccctgtcaacaaacagcatcgaaattgagcgaatcgctcaatcagatgtgaagtgtttgaaagcgtttcacaactgaaatcaaatcgtatgcgattcggggcgaaaggacaccctaattacatgtgtagtcgggtatatttggccgcgtgtcctgccgccagtcagcacccaaagccactttaattgtttacccgaaagtagagttaataaaaataccaacaccatgtgagcgcggacgatttaatcatttggaaaatcacaatatctaatgtccttggtgccaaccctctatagagaaaaagggacgcgtattcacccgtattcaaccctcctccgactaacgaactaagcgtgtttgtatacaaagtggggcttaagtgtttcaaagaccatttacaaattgggttcggcgattgttttgcccgttcttatctagccattcaagttcccagactctgaaagtggtttattcgcttattagcggacactgcgatggcaatatttaaagcccatagccgttagatgaaaatacagatacattttgagcgagttgaactgcaacttaattcgaaaataattgtgcgaatcgaaaaccaatttcaattacctgcacgcgtgcttcgctcaaatccaatcgcatggccagatcctcccttgtgaaaacatcgggatactgggtcttctcgaaggctcgctccagctgatgcaattgaaatgttgtaaatgttgtgcgagatctgtgaaaaatcgaaaggaacggcaagggcggcacgttagatacgtcggataagagtttgcccccctcctctttgttggcatgttttttaatagcccgacaatgggtaaatacgatttgatctgctaagcggattgtcgctgcactcaccttcgaactttacgcggcctctccatatcgctgagatcatggccattgttcagactggaggacagctcgtcgtcgttatccacgtccaggccgccgtccgtattcgttggggagtcctctcgtttggcctgaacctgcaattgttgctgctgctgctgctgctgcgaatggtgttgctgttgcgagtgctgctgctgctgctgatgcgacaagtgattgctgccgttgctattgctgctgtgcaaatgatggatgtgatgcggatggccgtggtggggatgcgtaatcagcacttcgctgggtgtatctgcgataaaaaacaaaaagtggcagggaaataaagttaaacaatttcgaattgaactcgagtgtgtggggaaacaaaaagtttcgcgtttgacttttaaaatcgaaagccaaacggcagctgcagaaattgaagttcattcaattgtggctgaagtagttatatcctcaattttaacccccttttttttgtacggtctcagtctcgaataaaattcaaatccttcaagtgctcgaaagctacgcaaattgatttggcaatcaataacaaataaatataaagccggaataagttttaaccccaataccacggcagcgagcatataaatatcctttcacacgaaacgatttggtgagtactcaaaacggtttcttttcgagccaaggcaaaacgtgtaatcaaactttaatgaacctcaaattaatcggattcacaatggcaccaggacacgtccccgctcagcaggacgcccgtgtcctggttgtatccttatcgtatttcgtaacatttacgcagacccatgtggcaagaaggtaatttccagcgagcatcaaattacgaggctcacaggatgcagtgtcctgcggtgcgcacgccgctcgttgtcgccaaattgcaacctggaccaatgggtgccgtgattccactgaatccagcccaggcaatttccagcctccacctctcccgaggacttcaatctaattacgggtctaatgacgcaattgcccgttcccgctctccatgcgatatatccggccagatatgttttgatacagtgtttttttttttcttctcaagtagatccttgggcgaactgcctcctgcagcttggccacgcccacaacaagagttccgacatgccgaacaactcccattgtcatgatatgttttctttttgctctctgggtggagttcgaggtcggtgtttgtcggaaagttttgaactgccctcattcacctttcccaactatgataaaatgtcccttgcgagcaatttgcatatgatatggatggcaatgtcaatctgcctctccactgctccggctcctttgcgaaaggatctatttgatgtggtcagtggagtaggaggacggttcggattttggagcaccaaatttggggggggagcccattggctgt

SEQ ID NO: 22304 - DNA, 508 bp, DROSOPHILA
atgaacttcaatttctgcagctgccatacacccagcgaagtgctgattacgcatccccaccacggccatccgcatcacatccatcatttgcacagcagcaatagcaacggcagcaatcacttgtcgcatcagcagcagcagcagcactcgcaacagcaacaccattcgcagcagcagcagcagcagcaacaattgcaggttcaggccaaacgagaggactccccaacgaatacggacggcggcctggacgtggataacgacgacgagctgtcctccagtctgaacaatggccatgatctcagcgatatggagaggccgcgtaaagttcgaagatctcgcacaacatttacaacatttcaattgcatcagctggagcgagccttcgagaagacccagtatcccgatgttttcacaagggaggatctggccatgcgattggatttgagcgaagcacgcgtgcaggtaattgaaattggttttcgattcgcacaattattttcgaattaag

SEQ ID NO: 22305 - protein, 168 aa, DROSOPHILA
MNFNFCSCHTPSEVLITHPHHGHPHHIHHLHSSNSNGSNHLSHQQQQQHSQQQHHSQQQQQQQQLQVQAKREDSPTNTDGGLDVDNDDELSSSLNNGHDLSDMERPRKVRRSRTTFTTFQLHQLERAFEKTQYPDVFTREDLAMRLDLSEARVQVIEIGFRFAQLFSN

SEQ ID NO: 22306 - DNA, 3309 bp, DROSOPHILA
tcggacccgttgtgggcggtctacttgtccagggcgtgctgaccgagaatatggcaatgaagattggtccgcttcccgatggtagctttcatcccgttactgttaatactatccaccgaaacaaggctccttgccgagttgtccgagctggtcagagcgcttcgctgtctttcagtatggatcaggatgtgcccacgctacgaagtggcatggttcttttgggtgatattggaaatagtctggatgagccctacgggaccttcttcttccaagtgagttgctagttttcatttatcgttaccaaataaatacatcaacttccctttgcaggccaaggtgtccgtgctgttccacgccacggccatctatgtcggcttccaaaccacagtccacataggcagcattcgccagacggccgtcattcggggcattatgggcggcgagcgactgggcacaaacgattgtgcttcggtgatgttcgagttcgtcggccacccggagtacgtgcgtcctggaatgcgcatcctgttccgcgagggcaccagcaaaggaatcggagttgtcacgcaggtgtttccggtcaacaagacaggcataaagtagagaagcgggccagatggatagttccaatgacatatctatatatctcaaacaaagatgacatgtacatatacttaattagcaattagagggaggcgttaaatcttaggcagatcttctgtacacttagtttcgggttctgtgatttttcgtttaagctcggctcacaatcggatgttgtgagtaatccttctcaattaaccttatttcattaaaatccaccccaaaatgcatacaatgttgctttcaattcgcgtccgagccaaagagtataaataattaccgaagtattaatttttttccttctagcagatgtacatatatatgtacatatgatcaaaaccgactaactttaagcaacatttaccatcaattctatggtatacaaagacgaaaaagtgctcaacaatttgtttatttctgtctactgctaatgtgctcatcttgactactgttatcacttgttgccgggacactggcgccaccttcaatttcctccgccttggctggcacttcggatgtgaaccggaagaggacgggcacctctcctatggagggatttccgttcgcttccaacaggcgaatccacgagagcaatgagtcctttgtggaggtgcctgtggcacagatggccataatggttccgtcgtcctgttggtggacagagcgcagctttcccagctggttgtgtcgccttggtggagcacgaccaaagaagggtacttcgatgtgggagacatcgtcctcgtccagctgccgctcatctaattcagacaggaactcagaatctgcatcagcgcgcagggtaaagtagttgatccggcgattcctaagccatatgtgaaagggtccctcgatgtacagagctttctggcgagagtgctcccgcagcagtttctcctgctcgggactcattccgctcacgatccacgtatcgtcaatggcatccttcagctcgctggtctcgaaaaccgtgattttggaccgcaggtcgaccgtgcacatccgctctagcgccagcttggccatttccaatgtatcatccggaacaggatcgggcagtggccacggtgataggttcttaaactttggcatccagtacatcatgcgccaatacttgcgcagtggatgtccctgcctgccaaacacattaagcagcatcgcctccatctcgtgatcgggcatcaccccgcaatcttccatctgctcaagcagatcaatgatacactgctgctgtttggggtagtgcatgaactctgcctggaacatgttggtgggtatgaacttgcccttgggcatcacgttgatcagggccttgtagacctccaagtctctttccaccccgaaatccgccatattcttgagtgccgcgtagatgaactccacatggttccgacggtggacgtcgcgctcctggaatatctccaccatggtcaggtagctgtttttcgtcctgtcctgggcggcggcaaaggggttccttaaagccggcaggtttttggtgccgggtttttgtgccctgggatttggattcgggttctgtttcggatttccctcgtccgtagcgtagtttcgaaagcggctgaccagcgaatggcctccattgccgtgcagccggagcaggcattgtgcgcggcgcagcattttttatttataattaattaattgaataaatttgcaaatacgattacaaaacattgcacaagctgcggaactagttcgcgttttgcagcactgctgctgcaacatatgttttaatagtgccgatagtctagcgtatttagccaaatttggtaaattctagggcgaaaaattgtatttagtttcggctgtacccaaagattttcaagcttaaatagtgtcatgaccgtaatacacgcttaaagtcatacgctagtaacaaaagttgaagtgaatattgcataagctcattgtgactaccttcacgaatctcttccttcggagaacagctgtttgtctggcttagggccatcatcactggtgactgagttgctcaacactgtattaactcagtgtatcctttgtgctgctttttgttgttatttcaccgttttctgcgttatccttattcgcatagttttcggttgtttttctgttgtttaagttagttccgaaccctgagttatttgcacgggcgcgcgcctacataaaaatgcaatccaacaagccgatctctgcggcggaggcctgaccagcaggcagtatctataacagaagcaaaacaatagactttggcttggtcccaaggagcacccaccagcccaacgttattcgagacttccagccgccaaggatgcactgaagggaagcggaaacccaaggagcatttgatgttcccgcaatgcgaagagggtaaagaggattcgggcatcacattctactgacatgttgtgcttcgactcggagaggatgaactggtactaccacgtcctggccaggcgtccctacctggtggtcgtctccattgctgtctactgtgtcgcttgcatcatcgtggccctcgtcctgaacaagctgccggacttcagtgatcccaccttggtttgtcctattagatttgtccaaaacatgttcactgcttgatatttggagaatatatcttatcttattttacaattattttttaaaatattgagcacatggaaataatccgaaaatgtctaaatgatattattttatttaaatttc

SEQ ID NO: 22307 - DNA, 1309 bp, DROSOPHILA
cagcttgtgcaatgttttgtaatcgtatttgcaaatttattcaattaattaattataaataaaaaatgctgcgccgcgcacaatgcctgctccggctgcacggcaatggaggccattcgctggtcagccgctttcgaaactacgctacggacgagggaaatccgaaacagaacccgaatccaaatcccagggcacaaaaacccggcaccaaaaacctgccggctttaaggaacccctttgccgccgcccaggacaggacgaaaaacagctacctgaccatggtggagatattccaggagcgcgacgtccaccgtcggaaccatgtggagttcatctacgcggcactcaagaatatggcggatttcggggtggaaagagacttggaggtctacaaggccctgatcaacgtgatgcccaagggcaagttcatacccaccaacatgttccaggcagagttcatgcactaccccaaacagcagcagtgtatcattgatctgcttgagcagatggaagattgcggggtgatgcccgatcacgagatggaggcgatgctgcttaatgtgtttggcaggcagggacatccactgcgcaagtattggcgcatgatgtactggatgccaaagtttaagaacctatcaccgtggccactgcccgatcctgttccggatgatacattggaaatggccaagctggcgctagagcggatgtgcacggtcgacctgcggtccaaaatcacggttttcgagaccagcgagctgaaggatgccattgacgatacgtggatcgtgagcggaatgagtcccgagcaggagaaactgctgcgggagcactctcgccagaaagctctgtacatcgagggaccctttcacatatggcttaggaatcgccggatcaactactttaccctgcgcgctgatgcagattctgagttcctgtctgaattagatgagcggcagctggacgaggacgatgtctcccacatcgaagtacccttctttggtcgtgctccaccaaggcgacacaaccagctgggaaagctgcgctctgtccaccaacaggacgacggaaccattatggccatctgtgccacaggcacctccacaaaggactcattgctctcgtggattcgcctgttggaagcgaacggaaatccctccataggagaggtgcccgtcctcttccggttcacatccgaagtgccagccaaggcggaggaaattgaaggtggcgccagtgtcccggcaacaagtgataacagtagtcaagatgagcacattagcagtagacagaaataaacaaattgttgagc

SEQ ID NO: 22308 - protein, 409 aa, DROSOPHILA
MLRRAQCLLRLHGNGGHSLVSRFRNYATDEGNPKQNPNPNPRAQKPGTKNLPALRNPFAAAQDRTKNSYLTMVEIFQERDVHRRNHVEFIYAALKNMADFGVERDLEVYKALINVMPKGKFIPTNMFQAEFMHYPKQQQCIIDLLEQMEDCGVMPDHEMEAMLLNVFGRQGHPLRKYWRMMYWMPKFKNLSPWPLPDPVPDDTLEMAKLALERMCTVDLRSKITVFETSELKDAIDDTWIVSGMSPEQEKLLREHSRQKALYIEGPFHIWLRNRRINYFTLRADADSEFLSELDERQLDEDDVSHIEVPFFGRAPPRRHNQLGKLRSVHQQDDGTIMAICATGTSTKDSLLSWIRLLEANGNPSIGEVPVLFRFTSEVPAKAEEIEGGASVPATSDNSSQDEHISSRQK

SEQ ID NO: 22309 - DNA, 3911 bp, DROSOPHILA
tcgactatccgcgcaccagctcaaatcgcgtctgagattccttgaactgaattctcttcttgtgctgcacgtgggcttcactgaggaacaaagtagacgccaccagggttaacacagtacccacacacgccaggataaaggaccagccaaaccaattgttcgcatgctccggcatccagccattccggttgccaaatccagcgaatacaatcactgcaatggctgcacttactccagcaccgagaagcacatatcccaacgatttaatgagcgtaatgaagtgcttttgatccggaccagcacacaggatgaagaccagtactccgatggcagataccaacatcccgatgaaggccaaagtgtagaagaactgagtggctatcatgaaggcgggcagcaggaatccacggatctcatcgtaacccgtggtaaatgggtcatacacccaacggcagcccacgaagaatctccgctggctatcgtcgttcacgtccggcagcgaccggaagcagtgcacccacaatcccaggcgatccagcttggcgcccgtgatgcggtaatcactgaccaaccaactgggcgttgcaaacgcaatcacgatgaaggcaaaggcgaacacgaagacgccaacgccacaacttccggatagtgtgcgtctcttcatgttcactgtgtgactgttttgcgtgtggctggtgggcaggtgctcctgggaatcctcgcgtgcgaagtgggatggtttttgcatcctttgagtgggaaattctattggaatttcgctggtttcctggggaaatgtttgtttggtttgctgtttgggtgtggactgcagtgtggccgcactggtaataccgcagaataccatggggccacaaaataaataccaaatgctacggtaccaataaatttcaaaacagtaaattaaacaatttagattatacattttttaaattaagaaataaatgattttaaatttaattaatttttgatagatggctaaggtacttcttaaatcaaataaaaagctttttatatagaatataacatattttggttatattgtcgataaaaacttatacttaaaaggcccaaccgttgtaaatgctaatgagcgtcgtttcattctggaagacatgctctcctcaatcgttcccctaattaagggctgccacagccttgtgggcggcatcatccaagtcactggctgtctgaatgggcaggcccgaattcttcaggatctcgcgagcctgatttacattggtgccctccagtcgcacaaccagtggaacattcagttgcagctttttggatgcagccacaatgccattggcaatggtggcacaattgacaatgccgccaaagacattgaccaggattcccttgactttcgggtcagcagtgaggatctcgaaggctttggccacctgatcctccctgacgccaccgccgacgtccaaaaagttggcgggctcgcctccattcagcttgatgatgtccatggtggccatggccaggccggcaccattaaccaagcagccaatgttgccatccatggcgacgtagttcagattgtacttggccgcctccacttctcggggatcggattcctcctcggtgacgtccatggagaaaatatccttctgacggaactgggcattgtcgtcaaagttgagcttagcatcaacggagataacttctcccttatccgtctccgccagcgggttgatctcgatctgtacggcatccacagctttgaagagagtatagagtttttgaatttcctcagcacaacgctttacagagtctcccttgaactccaagaacttggccacctccaagagcgtcgactccggtatgggcttgccaatgtctagcggaacagtcttaattttctcaggggtttcctcggccaccgcctcgatatccatgccaccggcaggtgaggcaatcagcacgggtccattgtgctcgcggtccagcaagatgcagagataggtctcgcgggtgatgttgatactgcgtgccaccatgaccttgttgaccaaaattcccgatttgggcgtttgtttcgttatcagtcggtttccaatcatctgctgggtaagcgaaagcacctcgctcttgctggcaaaatgttaaataattattagtataagctggtcttatcacttgtgtttttaaggtacactctggctttcacaaacttttatcattttcaatatgggcagaatgataagattaatcttatatacaaatgatattgtagaacataaataatattaattttttagataaaatgtgaatgtgaatagccggaatagacctaatctataatacttggtggtgatatggacgccgcctttgaatccgttgtcgaaagttcccttgccacgcccaccggcgagaatctgcgccttcaccacgtattccgggcactctgaaacacagaagcacagcatttaacaccaattagcccagggattacataaacaccggcatggttccgtcctccacttaccaaaagtcttgacgacctcggcatctgccttggagttattcaagaccttgaattgctgtatggccactccatacttctggaggagatccttgctctggaactccagcagattcaggttgcgcacgggaacctatcatcgaaagataaacaaagccaagacaaaggtcacttcaacttctcttttcgaagagttgatatattatagaggaatgtgagtgcgaggaaaccttatgaacgatgtgacgggctgtggtaactgctttcagtaggaacgacatcttggctgatctgcggtggtaactgaataccttggctaacttggtattaatttattttcgtaactttgtcggtaaatttagtttaaaaacacaaccgaaaatcgccgccgttccacgatgcttatcactgcacaatgtgaccaagaagcacgactactttccatggtgataaaaatataccaaatgccactgccatcttgaactagttctcgcgaagcaatggtcttactgttgcagtcagctgaaaatcagctgtcgttgtgtactttttttcttcggctaatagtcagcgaagaatgacgaataacacaaattgaatgaaaaacctgagtgagacggaagccgaagtcaccatgcaagaaaatgtagtccacgaatcattgccccagatcccggtggccacttcggtgagctgttgcttcgttctggctgttctgtacgtgggtagcctctacatctggagcaccaaacacaaccgggatcatccaaccacggtcaagagaagattcgccagtgtgtccatggtgatgctggcagccccgttcttcgtttacttcttctcatcgccggagctgctcagccgggtaccatttcccaagctgctcggtttgcgcttggagggattgtggcaggctgttgttataccatacagcctgacggtgctgctcttcctgggacccatctttgtcaacatgcagaacgagtccgtgcgctcctacttcggtaatagttaaagcccctctgcctatcagccccttctcactgcttgatttgaattgcagatctggactactggaggggatcatttggcagcatcatctgggtgcgcaaccatgtgatagcaccgctgagcgaggagttcgtgttccgagcctgcatgatgcccctgatcctgcagagcttttcgcccctggtcgccgttttcataacgccgcttttcttcggagtagcccacttgcatcacatagccgaacgcctgagcttaggcgtggagttgagcactgccctattgattggactgttccagttcatctacaccacgctatttggcttctattcggcctttctatttgcccgtacaggtcatgtgatggctcccatcttggtgcacgcgt

SEQ ID NO: 22310 - DNA, 1520 bp, DROSOPHILA
tggaacggcggcgattttcggttgtgtttttaaactaaatttaccgacaaagttacgaaaataaattaataccaagttagccaaggtattcagttaccaccgcagatcagccaagatgtcgttcctactgaaagcagttaccacagcccgtcacatcgttcataaggttcccgtgcgcaacctgaatctgctggagttccagagcaaggatctcctccagaagtatggagtggccatacagcaattcaaggtcttgaataactccaaggcagatgccgaggtcgtcaagacttttgagtgcccggaatacgtggtgaaggcgcagattctcgccggtgggcgtggcaagggaactttcgacaacggattcaaaggcggcgtccatatcaccaccaacaagagcgaggtgctttcgcttacccagcagatgattggaaaccgactgataacgaaacaaacgcccaaatcgggaattttggtcaacaaggtcatggtggcacgcagtatcaacatcacccgcgagacctatctctgcatcttgctggaccgcgagcacaatggacccgtgctgattgcctcacctgccggtggcatggatatcgaggcggtggccgaggaaacccctgagaaaattaagactgttccgctagacattggcaagcccataccggagtcgacgctcttggaggtggccaagttcttggagttcaagggagactctgtaaagcgttgtgctgaggaaattcaaaaactctatactctcttcaaagctgtggatgccgtacagatcgagatcaacccgctggcggagacggataagggagaagttatctccgttgatgctaagctcaactttgacgacaatgcccagttccgtcagaaggatattttctccatggacgtcaccgaggaggaatccgatccccgagaagtggaggcggccaagtacaatctgaactacgtcgccatggatggcaacattggctgcttggttaatggtgccggcctggccatggccaccatggacatcatcaagctgaatggaggcgagcccgccaactttttggacgtcggcggtggcgtcagggaggatcaggtggccaaagccttcgagatcctcactgctgacccgaaagtcaagggaatcctggtcaatgtctttggcggcattgtcaattgtgccaccattgccaatggcattgtggctgcatccaaaaagctgcaactgaatgttccactggttgtgcgactggagggcaccaatgtaaatcaggctcgcgagatcctgaagaattcgggcctgcccattcagacagccagtgacttggatgatgccgcccacaaggctgtggcagcccttaattaggggaacgattgaggagagcatgtcttccagaatgaaacgacgctcattagcatttacaacggttgggccttttaagtataagtttttatcgacaatataaccaaaatatgttatattctatataaaaagctttttatttgatttaagaagtacc

SEQ ID NO: 22311 - protein, 416 aa, DROSOPHILA
MSFLLKAVTTARHIVHKVPVRNLNLLEFQSKDLLQKYGVAIQQFKVLNNSKADAEVVKTFECPEYVVKAQILAGGRGKGTFDNGFKGGVHITTNKSEVLSLTQQMIGNRLITKQTPKSGILVNKVMVARSINITRETYLCILLDREHNGPVLIASPAGGMDIEAVAEETPEKIKTVPLDIGKPIPESTLLEVAKFLEFKGDSVKRCAEEIQKLYTLFKAVDAVQIEINPLAETDKGEVISVDAKLNFDDNAQFRQKDIFSMDVTEEESDPREVEAAKYNLNYVAMDGNIGCLVNGAGLAMATMDIIKLNGGEPANFLDVGGGVREDQVAKAFEILTADPKVKGILVNVFGGIVNCATIANGIVAASKKLQLNVPLVVRLEGTNVNQAREILKNSGLPIQTASDLDDAAHKAVAALN

SEQ ID NO: 22312 - DNA, 2861 bp, DROSOPHILA
tttcgcttacctttctctgggtcacttaattaaggcactagcttagctgaagtttatgcaattcaatgatctctatggttagtcgcaggtcagtcgttcaggtatgtttataacaataatttgttttcaggcactacgaactacaccataatagttctatctaattaaggcacgagtgtaatatttcgatgctagttccgactagcctgcgacttttgctaaagaaaaaaataaacgtacaattgcggaggggtatgctctttgtgtctgggcgttaattgagcgaaaattgatatgcaaatactgtagaatactctacatgaacatgagtcatctagttgagcgtcttcgtttgatgttagctgtgcttggttctggttttcattcggaaaaacattcagtcttctcttggaactgatctggtcgattggatggatgattataagtaccaaaaactgaaagcttgtgaatcggtgcggccgtcaattgcataaactttttaaattaaaaactacgagtacagtcgaacttctctgaactaaaattaatttctttaggtatgttagagagaagcgatgaatatatggcgaaaattatttttatccaaaataactttggttcgttaaaatttttcgaaatctccgccagttggggagttatttaaacgatttaaggtaatataaaacgaatgttaccgacatgaatactttaacctatgcacagggaaaccattgaataaaatataaaacgaacataaaccaactttaaaaacgtgcactaccagaaactgttagttagaatatttcgccttagagaagttcgactgtaatgtttagggtgagaattctttgaggggacggaatgtttttgttttgttttcctcttggttggcttgtgttttccttggtgcaagtgtgccagctgccacggctaaaatagacaatgcaagaaggttaagcgaccgaccctgacttggatatagtcaagtacttaccatcgactatccgcgcaccagctcaaatcgcgtctgagattccttgaactgaattctcttcttgtgctgcacgtgggcttcactgaggaacaaagtagacgccaccagggttaacacagtacccacacacgccaggataaaggaccagccaaaccaattgttcgcatgctccggcatccagccattccggttgccaaatccagcgaatacaatcactgcaatggctgcacttactccagcaccgagaagcacatatcccaacgatttaatgagcgtaatgaagtgcttttgatccggaccagcacacaggatgaagaccagtactccgatggcagataccaacatcccgatgaaggccaaagtgtagaagaactgagtggctatcatgaaggcgggcagcaggaatccacggatctcatcgtaacccgtggtaaatgggtcatacacccaacggcagcccacgaagaatctccgctggctatcgtcgttcacgtccggcagcgaccggaagcagtgcacccacaatcccaggcgatccagcttggcgcccgtgatgcggtaatcactgaccaaccaactgggcgttgcaaacgcaatcacgatgaaggcaaaggcgaacacgaagacgccaacgccacaacttccggatagtgtgcgtctcttcatgttcactgtgtgactgttttgcgtgtggctggtgggcaggtgctcctgggaatcctcgcgtgcgaagtgggatggtttttgcatcctttgagtgggaaattctattggaatttcgctggtttcctggggaaatgtttgtttggtttgctgtttgggtgtggactgcagtgtggccgcactggtaataccgcagaataccatggggccacaaaataaataccaaatgctacggtaccaataaatttcaaaacagtaaattaaacaatttagattatacattttttaaattaagaaataaatgattttaaatttaattaatttttgatagatggctaaggtacttcttaaatcaaataaaaagctttttatatagaatataacatattttggttatattgtcgataaaaacttatacttaaaaggcccaaccgttgtaaatgctaatgagcgtcgtttcattctggaagacatgctctcctcaatcgttcccctaattaagggctgccacagccttgtgggcggcatcatccaagtcactggctgtctgaatgggcaggcccgaattcttcaggatctcgcgagcctgatttacattggtgccctccagtcgcacaaccagtggaacattcagttgcagctttttggatgcagccacaatgccattggcaatggtggcacaattgacaatgccgccaaagacattgaccaggattcccttgactttcgggtcagcagtgaggatctcgaaggctttggccacctgatcctccctgacgccaccgccgacgtccaaaaagttggcgggctcgcctccattcagcttgatgatgtccatggtggccatggccaggccggcaccattaaccaagcagccaatgttgccatccatggcgacgtagttcagattgtacttggccgcctccacttctcggggatcggattcctcctcggtgacgtccatggagaaaatatccttctgacggaactgggcattgtcgtcaaagttgagcttagcatcaacggagataacttctcccttatccgtctccgccagcgggttgatctcgatctgtacggcatccacagctttgaagagagtatagagtttttgaatttcctcagcacaacgctttacagagtctcccttgaactccaagaacttggccacctccaagagcgtcgactccggtatgggcttgcc

SEQ ID NO: 22313 - DNA, 861 bp, DROSOPHILA
atggtattctgcggtattaccagtgcggccacactgcagtccacacccaaacagcaaaccaaacaaacatttccccaggaaaccagcgaaattccaatagaatttcccactcaaaggatgcaaaaaccatcccacttcgcacgcgaggattcccaggagcacctgcccaccagccacacgcaaaacagtcacacagtgaacatgaagagacgcacactatccggaagttgtggcgttggcgtcttcgtgttcgcctttgccttcatcgtgattgcgtttgcaacgcccagttggttggtcagtgattaccgcatcacgggcgccaagctggatcgcctgggattgtgggtgcactgcttccggtcgctgccggacgtgaacgacgatagccagcggagattcttcgtgggctgccgttgggtgtatgacccatttaccacgggttacgatgagatccgtggattcctgctgcccgccttcatgatagccactcagttcttctacactttggccttcatcgggatgttggtatctgccatcggagtactggtcttcatcctgtgtgctggtccggatcaaaagcacttcattacgctcattaaatcgttgggatatgtgcttctcggtgctggagtaagtgcagccattgcagtgattgtattcgctggatttggcaaccggaatggctggatgccggagcatgcgaacaattggtttggctggtcctttatcctggcgtgtgtgggtactgtgttaaccctggtggcgtctactttgttcctcagtgaagcccacgtgcagcacaagaagagaattcagttcaaggaatctcagacgcgatttgagctggtgcgcggatag

SEQ ID NO: 22314 - protein, 286 aa, DROSOPHILA
MVFCGITSAATLQSTPKQQTKQTFPQETSEIPIEFPTQRMQKPSHFAREDSQEHLPTSHTQNSHTVNMKRRTLSGSCGVGVFVFAFAFIVIAFATPSWLVSDYRITGAKLDRLGLWVHCFRSLPDVNDDSQRRFFVGCRWVYDPFTTGYDEIRGFLLPAFMIATQFFYTLAFIGMLVSAIGVLVFILCAGPDQKHFITLIKSLGYVLLGAGVSAAIAVIVFAGFGNRNGWMPEHANNWFGWSFILACVGTVLTLVASTLFLSEAHVQHKKRIQFKESQTRFELVRG

SEQ ID NO: 22315 - DNA, 13837 bp, DROSOPHILA
aattattatttatttgattattctaatgaattttaaaactaagactttctaggtcaaaaccaggttagggaggtcatgagggtggtgtaccataacagtaaaaacattaaaagaaaacgcccttaaggtatgttacacattttccaactgcgcctcaagtattccgtagtcgactataatgatactcgtacatatatgttcctgaatcgacctgaggctaatagttacaaatttgtgttgaaaccaaactttaaagtttaaaacaactctttaacgcaaatcctttgttcattaccacatatatagatttttattgacagcacaaccaaatgaagtaatccttgttttcataaaattctgccaccccaattaaggatttcactctcataagtagatttgttttcccattttccaattaaataattaataagcccagaattattttcttttaatttttatttaatttcagtatttctcttttgacataacaattcaatattccgtctcaatcgtgattagagtagacattaaataaactaagaactaaagttgataaaaatcataaagaaataagagtgaacaaaatcataaaaaaataaaaagcatacataaatgcataataaacaacatgtcacaaaacaattttctcttttttttttttgccaatttacagtgctctctgcaggaaatgtttagattacaaatagagtttgacagagatattacattagagagctccgaaactcatcgtggacaggcggtttggagtgcatttaccaaaactgtttaacatcgatttcgaaatttaactcaaggtagcgaacacattaactgggttctccattcgattaacgcttcttaaatgctgtttggccctgcctggcagacactaaaaacacttagactaggtttagttgttcgggttggaggtaggatcgaggttgggatgggatttaagcgggatctgggaggggaatttgattgtcctctcgtccttgtctcagttcgtctcactagtcaccttggtttcgggtttggggtcagccaggactttctctgcttcgggctcaactttcactttaacttcctcggaggctgctggaacggattcagccggtgccttaacctcttcggatgctacgggcttgggctccaccgcggctttaacctcctcggaagcggcggctgctggttcgacatcaaccttggacacttcagaggcggctgctggttcgacctcagccttggacacttcggaggcggctggcacgggttcgaccagggtcttcacctcttcggcggcggctggcacgggttcgaccagggtcttcacctcttcggaggccgcggctacgggttcggaagccttttcctcgagtggtgcctcagtatcggtggcttcgcgtttcttgtgtagtctgttgggcagattctgggtgcacgagcatgggcacatgcactgatccttgggagccgaaccagtcagcaccgagtggaggctgaaggatacaccaggctgaacgcccagcgggaaggaatcgatgttcgtgagttggttaatcgagttctcctcacagttcgagtagtactcctgcggcaggatgaccacgggcattagggcgataacagctcccttgggaatcttgtccggcggatagaaggccggctgtccgggtgcctgaggtatgaccggcaattgggtcagtgacatggcgtttattatgctgccgaagtttgcttgtccattgaagccggaaaattgtttattaaagtcaacggaggcgggattgggataggagttcgtggtggtggtggttgtggttgaggtaagggtgcttttcgatgagtgcgtcttatcggcgttacaaacacaggactgatcgctgatcgatggaacatgcaatgggggagagggacgtggcgttactttgggttcaacgtaaacggtaggaggtcgggtcacgggtttgtacggaacggtcacgggttgtttaggcaccacaacggtgggcacctgtggcgtatggtattggatctgcggcagtttggtcaccaccttttcgaagggtcgtggagtcgagggttcgtattggatcggaatcggagccggagtgggcaccggaatgggagtcggagtcttggtcttggtcacgtatttgggagtcggcggtggtggtggcaagtaagtgtggttttcaatattacccgttgtcactggcggtgtggtaacgctcttatttggcttatccttctcaatagtgatagccgggacctttggctgtacgatcgtcgtggttattttttgggatggcggttgaggagcgggaacgggagcgggaacatagggttttggagtgttgggaaaagaaggaggaatatatgttagtggtggctttgtcgttacggatggtttcttaatagcataatcattattttgttcgtaattcggcttatagactgtttttggtggttcaatttcaatgacttgtgagtatgatggaggtggtttcgagattttacccggttggtttggtggcagatagccgggtgtctccttgtccgagtaacgaggatcgttgggagagggtcctggaatgcaaagagtccttttttagcatctgatattgaaatgtgtataggatgtattacctggtgggccgggacgagtggggcctggtggaccgggccgagtggggcctggtgggccaggacgagtggggcctggtggtcctggtggtccgggacgagtggggcctggtggtcctggtggtccgggacgagtggggcctgttggtccggggggtccgggaggtccgtagggcccaggacgagtgggtccaggtgggccgggtggtcccggtggtcccggtggtccgaaaggtccaggcttagtgggtcccttgggtccgggaggtcctagaaaatgggataaatgtatttcttaacataaagaacatttatggctgtcatataacacctaccaggtggtccgggtggtccaggtgggccggggggtccgttgggtccattgggtcccttggggcctgagaagcgggttcaaattgtaataaaaatgtttgttaaacatagatctagcaaggattctaccgccgggtcctttaggtccgcctgggccgccggggcctacgccgccgccgtctcccttgccgccatttccgccgaatcctccctcgggtccaacaacgtggacatatgggggtgccggtggtccagtggggccttcaacgtgaacatatttgcccgaatcatcgtgataataccgaccatcgttaatacctgcgaatggtagtcgaatgaaatgagtattcattgtcatattcaaagttattcattattactcaccgttatagcgtccgccattgccattatatttaccgttatctagatagtgaatttaaagatcataaaaattgttcgattaaaaactgtgccgtaaaaatttactttctacatgctcacgttttaactacagatactagctactagtaactacataaattaaacattacattaactacagcaactgattttctaaaactgttctagataattgtataacactcgaaaattacaggcttacgttctagaccgacaccaaataacaacaaaaatcataacaacaaagcaaacaagtaggatggagttagtattaaagtatgggcttagttgggggatcaggaacaccgaaaaccaaactaaaataaatcataggtgttaattgttagttgcgtttatagaattgattaatagtcattgctcaagcggattttttttttacatattcatgtgccgtgtaattattttacaatatatgtgtgtacttgtgtggttgtcgtggtgtattggtgtgggtgtgtgtatctgtgtgtggatgggtgggtgggtgttgaactgaagaatcggtgcaagcatgggtgatataactgtgatccgatctcagccaaatgcgcgctgagacacagaatttgtgatcaattcgtattgattttcatttcatttaataactttttgtgcagaaaggatagaaagtgaggtataggtaatatataaagattgggattgtgcgctcttaggaaaggtgctctgataaaggataactgaaatcaaaaacgtgccctagcattgcctcacttatatatgtgtgtatatggtcttttttgggagaattgcaaaataggattatagaaaatatcgaaattaggtgtgaaatcattgtttcttggctgaaaataaacaaatagtttcttaaaatagtttaaagtttaagtaagaattattgtaatgaagacatacgtttaagattgctatcttacgaactaaaagccttgaagagagaaatttgaacgaactgatcgcgcaataagatgagaaatttatcgatgtgccattggaacctctttacattgggtaacaccatatcaggttacatttcatccgcatcctccacagctcgttcaaatttagctctccatgagtagagaaatcgttggagggctaacctggagtgtatggaatggccccaggaaaaccggtctctgtgtgcgtgtaggtgctcgtgtaggttccctcattatccgggcgatactggccactggcttcgattccgaaaccgctggcggcacccgtgcccgtacgatcgccaccaacagcgccaccgtttccggtgttatagcgaccgccgtttccggcggtataacgatcgccagagccggcggcaccaccgtttccggtggtgtaacggtcgccagcaccgacgccgccaccgtttccggtgacataacggtcgccggcaccgacgccgcctccgtttccgctgatataacgatcgccggcaccggcaccgccaccgtttccggtgctgatgcgatcaccggaaccgtttccggaaccgtcgcccaggccagtgcgatcgccatccttgtagaccggttttcctgaggctcctcctcccgcgccgactggacccaggccgccaggtggtcccggtggtcccggaggacccttgggtccctttggtccattcgggccacccgggccattgggtccgaaaccgccaacgcctccaaatcctccgtttccaccgaaaccgccgccagagccgctgcctccattgcctccatttccgccattgggtccaatcacatggacatagggattactatccggcacgtactggccatcatctaaaaggacacaaactatgcagtttccgatccgcagatcccttctctagctcattgctcactgttgctgcccggtagcagggtgttcaccgaatggaaggacggcgcctgatcgccgggatggctgagatccgaatgacccttgtccgtgccaaagatccccgtgccctgcggcaccagtggaccagtgggcttgtggatgggcagactcttctggtcggagcccttgatcacaattgtgttggctgagaacgatggtatcgcatcgttgctgccgcctttgttcttaaactggaaaatatgtgtaggtgcatcggattagaaggggtccttgaggcgtttctacgcatttccaagaatcttcattaaacaaacagccctacggtgggttgaattctaagaaatgagcagaaaccgcccgaggagaaccccatcaacccttacatcatctaggaagaatgggacgccgtgctgggcaccattcgcaaactttccacatccgatggggaagtacagttcctcccactgcagcacaatgccaggctcggatggaccaccgttggtctcgctgtacagatggggcgggaatgtctccactggcttctccggctccacggtgcggtaaccgtgggcatcggccacgtagtgtgttgcccggaggaggtggtagggatcgatcaggccatagcagccgtaggtaactccatcgggaccgcgggtctcgtgatggaagttgccggtcttgccgacatcgtagccatacctataggcatcttttggttgatcgtgttcgtgtcgatttggattggtttttgatttggtggggttttggtttggtttggaagagtaatgtttagagtataacgcttttgtttggtgtgattgcttgcagtttttggtttgtagtgctgtgaggacctgtaaatggtgtgtttatataaccctaagactctcgactaactgactgtgatctaactgctctaaaaagggcgctgtaactgaaagtttcacgaagaacctaatcagatgaggtttgtataaggaaaatgttggtgttttttgtgtgctgttgttgattgggtatttttcaagtattttttcggtttttgttcggagtaatcaatttggaggtggtgtggtagatttatgagtatgcgaagcatttttaaagaggtttcatgtagaacttttctccactgaagagcaaatgcctacacaaaactgtagaaagaagtgtaaatttatatgtaagaggaggagaaagtagcatagaataagagagaggagagatataggtaatggttgattgattgttgagcgtgtatatatttacaatttgatactacgagttctactgggtgagtttagtaaagctgctacggaaatatatataaatttatatatattatatatatataggagggtactacaattggtggttgtttcggtttttggggggtttagattaattgatgtaagtcgattgaactatcaaagggtttgaagggggcagtacaaatacttatgactacgatactactaactactacgataacaatttgttgttggtcaagttaactacttagatggtatatatgtaaataacaaaaacgaagactaactaactgcatggatgggtcagataagaaatggatgggcagtacaaaatcaactgatttttacatagttaatgaattgaattgggggattgttctagttttacttttcggatgtttgggatggattcaagcggcttagatagacacggatatgaaattgttaaacggattcacttacttgtgtcaatgtttgacgaatagtactgacggttcgttgtcttttggtcgtcaatgtcgagaattagacgacggttctgctcatcgaacttagcagagtagacgcattgcaagaaaatgcatgcgacggcctggaaaaaaccaaaggcgaatgattaatgaaactgtccaacgaaaaacgcaaatcctacaactgtcgaaagatttgtcacattcatggcacgcccccacagaaaccgagctagtatctcaaagacttaagtcttggcatgacttggctcggctcggctcaatttgcatactccgtttagagatgagtcaaatgcccgagctcgtttttggttatttgtatctccaacaacaggcccaagcaaatcagcagccatttagatccggttcgattcgaaaccgtggcaaagaaaaatacagcacatacaaaaaaaaaaaaaaatccgttcaccaaaaccactggcaaaatgtcaaaggcataataatcgaatcacaacgcattcttggctcacactcgtcaaatgttgacggactttttagcaaactggaactggagtttgcgatttggcagaacatgctaatttcccaagatttgtcacagtcgaccaagaaaaactagttggcttccactgacagtaatggacaattagcttagttctaaatgcacttgctggcattctgagtgacatcgccaaatcgattaccactaaccacttagcatcaggttttagctctcaactggcccacatattcgtaataatcgttggatcatcttttggccgaaaatctcagcctgaatagctgagattacgaaacttatccgttcgtcgatttgcatatattgcccatagaattaataaacacaagccaagttccggcatcgccaagacttccttatgaaaacgagttatcttaaccccatcctaatacagaattaaaacatcataattcttaaatatgtcgctgagttcgtagccaaaaaatcaggtgcggtgtatataaccttcgcgttatgctaaataatcgattggcttatatgaattgatggatttgttcgcgtccaaattgagactccatctcttcgtcgagggtgtgtttgccttaaggttaaagagggattgcagtaattaaagtggaaacaatggcattttatggttaacacccgccatagcttccatctaccaatggctgcgataaggtcaataatttagcgtctttgtgggtgcaaacaaagtggaaaccaaaccatgtgaaggaaacccaaaaaatgcggcgacaaaacaaatgaatttctaataaaacaaatttatttgcctatcgcggccatcaaacgggtccgagattcaagactgagattccaatggcgaataaaaagagaaaaatatgaaatctcattaatgcaaatcggtggctcgacggataactgtcttttgattggcatatcttcaagtttaaattgttgccaaatcgcctgctccaaaatctccaccactaataaataatacagaaattatgcacaacaatcgcagagtctatggaaagagcattttttgtttttaatttactatgccatgctatccagcagttgttgacagcagaggtcgtttccatctcacccacataatcgagcctcagggcaagtttttcataaaaaatgtgttttttttacgaatttcattcctcgcatttcacattgcatgcctgccatggaagtcgatggaaaaactggtggttaaatattactaaagtttctcattattttcggtccttattgatttttaacttattacggcagttgattacatttgaaactttgtctttcacccatgggaaactaacatattgagcaagtttttctctagcaaaagtcgggggaaactgttttcgttgacatgacggaaatacgaaaatggtgatggattgattgatgtgacttgctggtggaaaaataccattgatttggtaataatgaaagtgagtaagaactgtggttacagccaactaagttgatgaaatagaagtggaatataaagcgaattcctcttagcattaatataaaaaaaatttgaaatatgaattcatttcgaatatgggctagccccaaaatctgacaaatctaaaacgttgtgggtaattaggctctcaaattgagtgaaggggctgccaagcccgcttttgagttgctgctgatcgtcgcacaaaagcctcacatcaattgccaatcaattaaactcaatagccagccaacaaatgtgggccaaaatgtgtgtaacatgttgtacagacgtcatgaaagaagtgcgaagaggcgaatttcgagttgcgaatgcagtaaatcaattccaagtcgcatagatcatgcaaaaccgagtgccaactggcgttgtgacccaaaaaacgcatatggctacgccttgagaaccaaagcgttctatagttactatccaatatactcgtagatgcactgaagtggtagtatgctctatgagccaatgaatcttgaagagtttgcataactcagcgaagacaatttattaatcgacttattcgcacgcacaaggcggttgtttctgttgttgttaacatgatttcagatgtacagcgcatttttcatcatcatcatgggcatcttgatgatcataatcatccgaaaagtaaccggtttagtcatcctcacacttttcgctgaagtatcttgactgcttttgccctttggcggttggagcgaaacttttttttttcgtgtaagtatttatacttttcaaggtcgatcttttgccggcggccaatgaattgaacaagaaataatgtgttgttgtcgcataaaagtttataaatcgaatcaaaatgcaactgactgcggaacggcgaccttaatcgatgacatcttctttgggttttttttttttttcattgggatgcagtttcgtgctgtggggaattatgaaatttctctttaacgaaacattgttggggaattgtgaaatgcccgtttcaacgcctcagcttcccggcaaacatttccataaagatgtgagtaaaaacggctaacaaacattcataacgcacctacccggcaaccaaaaaacaaaaagtctccactgtaacaaaaagcttataagaacttgacaaactttgcgatcttcgtaagaaaacaataaaaacaattttaatcaaaccgaaaatattcggcggaacaagtataaccagctgtgggcgatggcctttaggtttggattttccagttaatccagacttgaatttaattagcgacgcatctagaattctttgcagagcagaaaagtgctaatgagatcagaacccatcgataggcaaacgaattagccagtttgatgcgagacaatagctgggaatttgtccaacgaatgtatagtcgactgtcactgaacttccactggacttgttctgatttattaaagcaattaaaaaataaaccgttgggcctggcacggttgagcatcccgaatgacatcatattatttttaaaaacttttactttcaactcttggcatttggctgcagcttaatgaatacactttgtatagcgttttcgtttttacttaaaaccagccccaaagacttcctccatcatcggcaccaaaactatatatcttatatctccatagctgccgcctttggcgattgtctctcctaatcgccgactagcgatcgagggctaatttgcatttctagattcgtattttagatacagattccatattgaaattggccacaaacatatggcaacagagaagcgacataaattagtgcggcataaaagccgaccttttgggcctttaaatatcgaaagttaactggcgagtaggagaaatagtaagaaccgatgagccataaaagtgaatgggagacgatgaagttccatgaactcttacgtaatgttgttctagctggaagttggcccagcctgaataaaagttcattaactggtttttgtatcgttgtttcctggcaaagcagaagtgctctgcccttcattcgcactttaatttaaataataacccttttggctcttgtaactgtaaagatttaactattcatcggacatgcctaacgctccattttacaaccaaataaatgtaatttatttcaattgccccatttgccagcagccaactgtttgtcatgccaaactcgactttggctactccattttatgactcaactcagtaaggcaactactactgggcgattaaatctcttcaaattgcactacaccaaatggcggcaaagaaaattccgcggactctttaaaattccgcacaagccgagctgagaacaaatttataataaaaagaattgtgggccaagatgagatgcgatgccctgccctgtcaacgtggtgccgctgggcattttctcccccgacttggtttgttatttttttttttttacccgtttttgtttgttggccgagtacgtgtctggcagaatatcttggcccaaaacagaggcttatgccgcaggcaatggtaataaataccgaagcgcccgcaaagcttaaccccaaataaccatcgtggatggggtcactttggcaggtgacaagggccacagactgaatccattttttctacgccgaatggagatagtatctcggctcacttagagcatcattatgacacctcttttggggaatttcggtgctcataaaatcgcaggtacaaacaaaaaaaaaatgagtagcagtcacaagcaaaaacaattaacagctttggataggcattatctaagaattttttggccataatcaaattaacactcttttgcgatagtatttcctaatgaagcgggtccttgactcacgattttatttagcctcaacttttgcacatttaatatgtagctccgttaggtaacaaaaaaaacagcaaatgataaaaaatgaatggaaatttgcataatgcagacaatgacaaaaacagctctctccttctttctgaatctctttgtttaatacccagacatttgttattttcggtaaacaacgtacttccctactggcgcatttttgtccgttgactaatcttctaaccctggctaaaaacaacaaaattgtaccgagtatcgattcgattccaaacagcacaaaaaaattcaagtcaaataaaaactgggcattacttttgcttctgcgttgtgttgtgtgccaaagcaaacagaagtgcctgcgtttgcatcgcatcgtttcgaaattgccggtattcgtatttgtttgcccagaaaaatgccggttggctattactattattattattagtattattaccgcacgtttctccaacaaattcgccttcgcgcccgtgctagtgtaaataaattgtacagaaaaatgggtttccgaaatagttataatttgacccggacttgttaacgctcgttaaatgcggaattccgccttaaatatcagttatgagttgtacaaatattctatatgcagtttgtagctcgtaagcgtttgaaatttggttgccatgcactctattcgatattcgaatgtgatcaaacacacttagcagacgtttttattaccatttaatgtttgacaatatttttagccaactgctaaatgtctttacaaaatatcagttgaaataacaatcaaatcgaaggtcatctgaagacataaatttgtttatacacccaaatttaagaaacaacaatcgtttttcgtttggcaattggacgttaaacaatatgtacgtttttcaaaatcgaataattaaaagtaattgttttttttcttgagtattcatttaacttaccatgcacagagctgcacgcgccattttgcaacgaattttatgttttttttttgacacaagaaacgccagtaaatatttaggtgttttgaattttacaatggaataaactcagttatcccttttccaatcttgaaaagaagaaaatgcttattttagttttatattgaatcgcaggcaggcacacagtttcgcactataaggttggaaatatttgcaaatattccgtcttgtttatccttgcaattagtacagttctcttgcggctgctatagccattgatcgatcacaagtgattgggtagtgttttagtatttacttttaggagcctaaactagagctcataccgtggtgaccgatgtggacgaactgaagatgaacgcatcgagtcttagccatataaacagaggcagacgcaaaacaaaaaggcgaaaaaacacactcgacacaaaaaaaagactaaaaatcgtacttgagagcagctcctaacccatacagatacctggcttaaagtgcgtgagtgtgtgtgtgtgtgtgtctgagtgtgagtggaacgagtttgcttttttcgccggattcgttaatttatttggccaagcgccggagagatgagctcgaactaagccacgggtcgtatacttgatatattgatcactctcctcggcgattcgaactctctcgctcggaattctctaggatctgcttgcgtgtctcaagaatttaagttcactttcaggttcttggggttcattaatatttagagattgatttttttcctcatcttatttattctcttttatgttttattgtctcgcgtgtttgtttgttcaaagaacgttttttgtctttaattgaaaattcgagtttttcgtgtttattttgatttaattttatcgttaatcgaagagtgatatttcagatatacgcagatatagatagattgtcgtctttttctggctcccgtcgttgagggtttatatattttgctaaaaaattatttagatggtttattgatttaattaaagct

SEQ ID NO: 22316 - DNA, 3543 bp, DROSOPHILA
atggcgcgtgcagctctgtgcatggccgtcgcatgcattttcttgcaatgcgtctactctgctaagttcgatgagcagaaccgtcgtctaattctcgacattgacgaccaaaagacaacgaaccgtcagtactattcgtcaaacattgacacaaatgcctataggtatggctacgatgtcggcaagaccggcaacttccatcacgagacccgcggtcccgatggagttacctacggctgctatggcctgatcgatccctaccacctcctccgggcaacacactacgtggccgatgcccacggttaccgcaccgtggagccggagaagccagtggagacattcccgccccatctgtacagcgagaccaacggtggtccatccgagcctggcattgtgctgcagtgggaggaactgtacttccccatcggatgtggaaagtttgcgaatggtgcccagcacggcgtcccattcttcctagatgattttaagaacaaaggcggcagcaacgatgcgataccatcgttctcagccaacacaattgtgatcaagggctccgaccagaagagtctgcccatccacaagcccactggtccactggtgccgcagggcacggggatctttggcacggacaagggtcattcggatctcagccatcccggcgatcaggcgccgtccttccattcggtgaacaccctgctaccgggcagcaacaatgatggccagtacgtgccggatagtaatccctatgtccatgtgattggacccaatggcggaaatggaggcaatggaggcagcggctctggcggcggtttcggtggaaacggaggatttggaggcgttggcggtttcggacccaatggcccgggtggcccgaatggaccaaagggacccaagggtcctccgggaccaccgggaccacctggcggcctgggtccagtcggcgcgggaggaggagcctcaggaaaaccggtctacaaggatggcgatcgcactggcctgggcgacggttccggaaacggttccggtgatcgcatcagcaccggaaacggtggcggtgccggtgccggcgatcgttatatcagcggaaacggaggcggcgtcggtgccggcgaccgttatgtcaccggaaacggtggcggcgtcggtgctggcgaccgttacaccaccggaaacggtggtgccgccggctctggcgatcgttataccgccggaaacggcggtcgctataacaccggaaacggtggcgctgttggtggcgatcgtacgggcacgggtgccgccagcggtttcggaatcgaagccagtggccagtatcgcccggataatgagggaacctacacgagcacctacacgcacacagagaccggttttcctggggccattccatacactccagataacggtaaatataatggcaatggcggacgctataacggtattaacgatggtcggtattatcacgatgattcgggcaaatatgttcacgttgaaggccccactggaccaccggcacccccatatgtccacgttgttggacccgagggaggattcggcggaaatggcggcaagggagacggcggcggcgtaggccccggcggcccaggcggacctaaaggacccggcggccccaagggacccaatggacccaacggaccccccggcccacctggaccacccggaccacctggacctcccggacccaagggacccactaagcctggacctttcggaccaccgggaccaccgggaccacccggcccacctggacccactcgtcctgggccctacggacctcccggaccccccggaccaacaggccccactcgtcccggaccaccaggaccaccaggccccactcgtcccggaccaccaggaccaccaggccccactcgtcctggcccaccaggccccactcggcccggtccaccaggccccactcgtcccggcccaccaggaccctctcccaacgatcctcgttactcggacaaggagacacccggctatctgccaccaaaccaaccgggtaaaatctcgaaaccacctccatcatactcacaagtcattgaaattgaaccaccaaaaacagtctataagccgaattacgaacaaaataatgattatgctattaagaaaccatccgtaacgacaaagccaccactaacatatattcctccttcttttcccaacactccaaaaccctatgttcccgctcccgttcccgctcctcaaccgccatcccaaaaaataaccacgacgatcgtacagccaaaggtcccggctatcactattgagaaggataagccaaataagagcgttaccacaccgccagtgacaacgggtaatattgaaaaccacacttacttgccaccaccaccgccgactcccaaatacgtgaccaagaccaagactccgactcccattccggtgcccactccggctccgattccgatccaatacgaaccctcgactccacgacccttcgaaaaggtggtgaccaaactgccgcagatccaataccatacgccacaggtgcccaccgttgtggtgcctaaacaacccgtgaccgttccgtacaaacccgtgacccgacctcctaccgtttacgttgaacccaaagtaacgccacgtccctctcccccattgcatgttccatcgatcagcgatcagtcctgtgtttgtaacgccgataagacgcactcatcgaaaagcacccttacctcaaccacaaccaccaccaccacgaactcctatcccaatcccgcctccgttgactttaataaacaattttccggcttcaatggacaagcaaacttcggcagcataataaacgccatgtcactgacccaattgccggtcatacctcaggcacccggacagccggccttctatccgccggacaagattcccaagggagctgttatcgccctaatgcccgtggtcatcctgccgcaggagtactactcgaactgtgaggagaactcgattaaccaactcacgaacatcgattccttcccgctgggcgttcagcctggtgtatccttcagcctccactcggtgctgactggttcggctcccaaggatcagtgcatgtgcccatgctcgtgcacccagaatctgcccaacagactacacaagaaacgcgaagccaccgatactgaggcaccactcgaggaaaaggcttccgaacccgtagccgcggcctccgaagaggtgaagaccctggtcgaacccgtgccagccgccgccgaagaggtgaagaccctggtcgaacccgtgccagccgcctccgaagtgtccaaggctgaggtcgaaccagcagccgcctctgaagtgtccaaggttgatgtcgaaccagcagccgccgcttccgaggaggttaaagccgcggtggagcccaagcccgtagcatccgaagaggttaaggcaccggctgaatccgttccagcagcctccgaggaagttaaagtgaaagttgagcccgaagcagagaaagtcctggctgaccccaaacccgaaaccaaggtgactagtgagacgaactga

SEQ ID NO: 22317 - protein, 1180 aa, DROSOPHILA
MARAALCMAVACIFLQCVYSAKFDEQNRRLILDIDDQKTTNRQYYSSNIDTNAYRYGYDVGKTGNFHHETRGPDGVTYGCYGLIDPYHLLRATHYVADAHGYRTVEPEKPVETFPPHLYSETNGGPSEPGIVLQWEELYFPIGCGKFANGAQHGVPFFLDDFKNKGGSNDAIPSFSANTIVIKGSDQKSLPIHKPTGPLVPQGTGIFGTDKGHSDLSHPGDQAPSFHSVNTLLPGSNNDGQYVPDSNPYVHVIGPNGGNGGNGGSGSGGGFGGNGGFGGVGGFGPNGPGGPNGPKGPKGPPGPPGPPGGLGPVGAGGGASGKPVYKDGDRTGLGDGSGNGSGDRISTGNGGGAGAGDRYISGNGGGVGAGDRYVTGNGGGVGAGDRYTTGNGGAAGSGDRYTAGNGGRYNTGNGGAVGGDRTGTGAASGFGIEASGQYRPDNEGTYTSTYTHTETGFPGAIPYTPDNGKYNGNGGRYNGINDGRYYHDDSGKYVHVEGPTGPPAPPYVHVVGPEGGFGGNGGKGDGGGVGPGGPGGPKGPGGPKGPNGPNGPPGPPGPPGPPGPPGPKGPTKPGPFGPPGPPGPPGPPGPTRPGPYGPPGPPGPTGPTRPGPPGPPGPTRPGPPGPPGPTRPGPPGPTRPGPPGPTRPGPPGPSPNDPRYSDKETPGYLPPNQPGKISKPPPSYSQVIEIEPPKTVYKPNYEQNNDYAIKKPSVTTKPPLTYIPPSFPNTPKPYVPAPVPAPQPPSQKITTTIVQPKVPAITIEKDKPNKSVTTPPVTTGNIENHTYLPPPPPTPKYVTKTKTPTPIPVPTPAPIPIQYEPSTPRPFEKVVTKLPQIQYHTPQVPTVVVPKQPVTVPYKPVTRPPTVYVEPKVTPRPSPPLHVPSISDQSCVCNADKTHSSKSTLTSTTTTTTTNSYPNPASVDFNKQFSGFNGQANFGSIINAMSLTQLPVIPQAPGQPAFYPPDKIPKGAVIALMPVVILPQEYYSNCEENSINQLTNIDSFPLGVQPGVSFSLHSVLTGSAPKDQCMCPCSCTQNLPNRLHKKREATDTEAPLEEKASEPVAAASEEVKTLVEPVPAAAEEVKTLVEPVPAASEVSKAEVEPAAASEVSKVDVEPAAAASEEVKAAVEPKPVASEEVKAPAESVPAASEEVKVKVEPEAEKVLADPKPETKVTSETN

SEQ ID NO: 22318 - DNA, 7383 bp, DROSOPHILA
atcttttaagtaaaaagcgctcaagtcaaaacttttactttcatttaaaagtaaattttcttgatgtttcaaatttatagcaaaatgccataatttcagttcgtttgaaacaaacgaaatgaagcggaaattgcgaaccgaatttattcgtacaatttatgggccacacatgaacaataataattcattcggctgcatgtaattaagaataataaaaatactggtatattttgtttgtttgcttaatgactcgaaatgtttattcgttttcgtttggtaattaaatacaataataattacattaataagcctttctgttttttaatgacaaatattgtacattacatttgcttacatccagctgtgtgcttgtgtaggatttaatacataatcggattgttgttaaaatactatttaaataatttaatttaatgctacttaattgatttcaggtgctaatttaatttgattcattttttgttcagctaataatacatttgatttggtgagttttggtttgagtttgataaggtcattaacgaatcgattatttacaacgtttggacttcgtgctttaaggatcgcaatttgaagataccattattataatactgtacacggctcacgaccagcattcacactcattcaatatatatccttctgcgaaacaattatcagcaatgggacttgtaatcacaattcattaagacgaaatcacagaggcaaatggtcatgttccaatgacacatttagttgcgggatatctaaacactgtaaaggggttttactaaagccttacatacaattacaataaaatttaaacatattagtgtagtagctataccctaataatagtcattcactaaaacattaacacacatacgttaaatgaatgagctatgacagccaatttactggaatacacatcatatgtgaatgccgactggctgcggaatgtgtcattggaacacggctataacttagatcgctctagtttaaattaaagtggttgccacaaggacttgcccgcatccttgtccttcgcctgcgagccgggcaggtggactcgcgacacctcgctgagtatgcaggtgccatcgcattcggtttggctgccaaattcctgttcgcaaatgcagctggagctctccctgcttagcagggccaactggactccggccccggatgccaactcctcgctggggggcgtggttgatggcagctccatgagtgccacgtcgtcctcgcattcgattacgttcggatgcagaggtttgaagttgtttcgccgccacggcggcattgcaacgccaacacctggtgccgaaacacccggagtggccgcaaaggtaaccacgctttgatgctgatgatgttggccattgacattgttgttctgcccactacttccgttgtaaatgccgctgttagcaccggatccatgcacccgcggcatatgcaagcccggcttcccattgttgacaccaccacgcgccggaccaaagagattactccggattcgcatcgaggagttggcgtaggttgaccttatggagctggcgcgggtgtgcatcgaaaaggtcctttcgtgggcgtccatgctcgtcttgaacttgcagaaacaggccgcaaatcgcttgttgaattcccgcttaaatttttcctgtgcagagaaaaatagacgacggtttaggttaatccatcccaataacatatcactaaagtaagcgaaagtacttttattcacttaaatacaaattaaagtgcattgcataaatcataaacctcttagcaaagtttatcatttgcaaaaatacattttttcgctatcaaactttctggttaattattatgtgaattggcagaaaatttttcgtgaaaaagcgaaaactgccccggctacggcatctttctggctaatgaaagtgctctaggcaaacctccatcttcgctgacaaatcccatttgtcttcgctgacagtaaaatagaatatctgttgacaaagtttttcacgcacagccagcaggggaaaaagtttacgagtttattcggagatctggctctcaatctatcttttacagacaatttgagtgtcaaagcaaacagccgacgggttttttcccgcttttatcggtttgccactttggcattctgaggatttttgtggatttcgcttcagttttgcggtttcacaatttctgcggcccagacggtaggtgtttgcttattggctacagtggagcgctgctttaattaactttgacaaagtatttttttgtgtcagctattttaggtgcgaggcgaaaagaaattggaaattgtttcaaagtaaggcagaagttatttttgattaaaaaaaaagtgacgcgtatgcttataaatcagcgagaaggaaaatgggaaaacatcaacaaagcaatcgattcgcttacaatgaaattaagttagacatatttcattcttttttaagcttctttgatttttgagaccatgaaaacttccgtaaaagtttcatttgctttgcgtctatgtttgtgtttcatttgatgagataatagaaaaagctaattttggaagcacgtgcaaaggctttttttcttttaggtctaaaagtacgaaaataatatagaaaaaattactttttttactttaacttcattattaaaagcaagacgttaagtatgtagatattttgacgagacatccaattgtacgcaaggcaagttttcccaagatcccctgtcaataactgactcacccaaacttaagttccccaaaactaacccaaggcgaccttgagtccctcatcaatccccacatttccccggcaaatttaccacacatttatagacttatgtctttttagtgcgtgtgcaaagaacgtgtccctgagcacgaacaaacatccaaaggatgtcaatcaaatcccagccagacaaatgcaaatttaacactccgtaaacaaatcatcatcatcattggagcccacacttacattgtagatgccataaataaagggattgtagcagctattgctcatggccagccaatcgcagcaaaaccagacgatgctaatgaagtggtagtcgttgatttccggtatcgtgacatacagaatattatagagctgcagtggcagccagcagagtccaaagataatgaccacgataatcagcattttgatgacctgcaagcgtcgcagaaaaaggaaattaaacccagtcccgatttgcataccacatcaacgtgcaaaactcaccttcttcttgtttttcaacagcgttatgtcccgtgaatcctgtgcgttaccaggagcacgtgtgccccacaatcgtaccgccatctggatgtagacaaagctgatgacacagaatggaaccagatactgcacaaaaaccagggtgtagcgaaaggattgcaattgatcatcggataggttcttgttcatgcagaatggccgcgtcacattgtaggtctcattgttctctgttcaaaggatgaaattcagttaaggtcgctggcacttaatccatgcaagttgacgtattgacttaccgcgaaatctttcggtcaactcctccacacgaaaggcaatggcaaagggcaccgcaaatagcagggccagcatccaaattccaccaattatgaacttcgatacgaacttggtgggacgtgccctgcatgcgtaagccgatttttaatgattatgattgacgaatcgaatcgtttcgaatgtgggagcccactctcccccccagcgactcacctaagtggattaatgatggccctatgccgatcgattgcaatggcggtcagcgtgaataccgagacatttacactcagggcctggacgaaggggcagaagctgcacatgaaccacggcaggttccaactctgcagcagggcagcctggaactacacggaatgaaaatattgcaattattagtttaaagtattgcagattatcagaaacaacttgactatacaactatgcctaacctttagcctgagcatgatgtttacaaatcacaaataatccctttaaaatgttcactatatatatattcattttaattaaagtgtaaggaaataggatagctacaagtgagtcgtccgcctgaggtttgatatgatttaatcaacccaaaattgcgactccattcaagtcacacggcaaacaccattaatgaacagtggaacatgtcgggggtgttgtattttcggccagtttcaacatttcgtcgacaaataaacgctcgaaagcccagcggtgttgttttggacactgatttgcgcaggagtgagtgaaaaagtgtgtgtgtgattactgcggatatttgaagaccgcgctttctccgttctccacacaaagtcggccgcaaattgcaatttctcgccggcttattgatgacacttactggcggctgtgacaggaccaaaaatctatttgattgcggcattaatataaattaagtgcccaaaatgtggctggctttgggtcaagttcaaggttcaacgaagtgtacagattgagctttattagtatgaattctgaggtaaaaatcaatttactatttttatttgaaacatagaaagatgtaaacaatttgtactaccaattaataattatttcgactattcagttcgatggttacattcaatattttacgtctaaaacaagctaaaatgcaattgcggcattctgcgaaacgagctgaatacaaagtaacgattcaattactttattcaaatgtccattgctcattgattgaccattttccgactaaacagtattttcaaagcaaactgcgttcgcgttttgcattcgacgacaccagggaatcaattgaagataatggcaattcaattactcggtatcacatacaaattccaaagaaagcccagaaaactgttcacatagcttttagcactctattttgggtactttatagaatacaaatcccattaacacataaaccgaaaatcacatttaaatttgatgtaggtaatattccattaccacaacttttttcgacaagatgcgcgtaggccatggcaattttctaatgccaaacatgagcgctcgttgcccggaaattaaattgatgccggattatgctgaaattggtgtccctgcgcactgtgggtttcaaaaactgggctggctacctttctatggtgaaaataagcgaaaactaatgctaatgttgttggcttgtgtgatttatgcgttaaagtcgatatccatttactagcgcaacagtgcgtatgggcaattttgcatgtatgcatttcatatccgcgaaaaaaaaaatctcggtaattacccgcattataattaagcttaactgttgcaactcacctgaaatggtatgcagaagaggccaataatcacatcggcaaaagccaaattagcgatatacatatttgtcacggtccgcatttgcctggtcgtggccaccacccagatgaccaaagtgttgccaatgacggccacgatactgattcccccatagaaaatggacaacagggccacaatctcagcgggagccgcgtatagacgctctgtgaatgaattgaaaaatagttgtgcattagatttatatcactcggaaaaagtgcttgcaacattattataaaactaaatgagatataacaatctgttttacacaaaaatttaagaatgtatccaatacataatgcgctcctactaagttactgaaattttagttatttattacaagaccatgcttttatgagtgaataaattttgtgtgtggtgcttagcttcttccaatccattagtttcagtgttgaacttgtgaaaaatcgcgcttgctgacagaagcagattaattcaagtgtcagttgtcagtcaactgatggcaggacagacgacattcacgttcctgctgacttgtaaacgtcaaggaaattgaaccgtattttatagccaaagagggaattttataaatgccactttggacagtatatacctgtatatatatatacctatatccaatttaatataaaatattgatagttaaacccaactttgatatgaatttcattagcatatccgaacatcacctgtttcctcatatcaaagtcaatgagatggttgagcccaagtttggtctttaaattcggcaccccccacactcatgaatgattcaagatcaaagaactaacggcgaactgtcagaagaaaaaaacacttgtcaatgtttttgattgatgatacgtcaagtcaatttaatccagttggatgagtcgcgtccccagttgcttgaagggattagagagtatacttaccaaattctgcttcctcctcggctccgggcaggaattccaggcgggactcctgctcgattaagtccattgccataacactttttcgttttttagttttagttgtgtatcctaatgaggatatgatatccttcaaaccttgtattttagttcgaatgctgctgctctatgtagtgcaatacatcttcaggggcttctgagcttcattgcaatctaaactggaaagatataaattacagcatttgttcatttgttttctgaaaattcgcaaaaaagttatctgccacaagtccagtggtcagggaacaacaaaagtgcagacaacaagagaaacaaatgatctgaaaaaaaatcattgaaaagctatacaagcaatatcagtcttgccctcaaggaactgaccaaattcagtgggcggacatgagttatggctcaggtggaatcacctgtcagctttcacaagtgaaaagtttgttctgtataattgaaagtgcacccaaattcagtttggcgactgagggcactgcactagaatttcgcttgtatttcgtttcttatgaaaacagttcatgttttcatgtttttattgaagagtcatgccaacgctcaaatgttgccttagccttattgaggtggctcctaaaaaataaacaagaaagtcagcaagttcattgaatgtttgagaatagaagcctcactcaggttaattggccatttatcgaactgttaacattgttgggacttgttaatttatcttcttcagtgtaaacactgtcaagacttgttaatttattgggtaactaaatgtttattctataggcagacggaattgttatagattgacttagggatgcttgtaggaaataggctgggaaattggcgaatgtcgtgaaaaaaagatgtatttagttttgaatgactgtactatttcccccagaaagaaacaggttcacaggctttaagtttatatggaaatgcaaaaatttgtttcgagcattaaattactcattttattatgctggtcacaagctaaaagaactaaaaggagccaccctaacgcatgaccccaa

SEQ ID NO: 22319 - DNA, 1623 bp, DROSOPHILA
atggacttaatcgagcaggagtcccgcctggaattcctgcccggagccgaggaggaagcagaatttgagcgtctatacgcggctcccgctgagattgtggccctgttgtccattttctatgggggaatcagtatcgtggccgtcattggcaacactttggtcatctgggtggtggccacgaccaggcaaatgcggaccgtgacaaatatgtatatcgctaatttggcttttgccgatgtgattattggcctcttctgcataccatttcagttccaggctgccctgctgcagagttggaacctgccgtggttcatgtgcagcttctgccccttcgtccaggccctgagtgtaaatgtctcggtattcacgctgaccgccattgcaatcgatcggcatagggccatcattaatccacttagggcacgtcccaccaagttcgtatcgaagttcataattggtggaatttggatgctggccctgctatttgcggtgccctttgccattgcctttcgtgtggaggagttgaccgaaagatttcgcgagaacaatgagacctacaatgtgacgcggccattctgcatgaacaagaacctatccgatgatcaattgcaatcctttcgctacaccctggtttttgtgcagtatctggttccattctgtgtcatcagctttgtctacatccagatggcggtacgattgtggggcacacgtgctcctggtaacgcacaggattcacgggacataacgctgttgaaaaacaagaagaaggtcatcaaaatgctgattatcgtggtcattatctttggactctgctggctgccactgcagctctataatattctgtatgtcacgataccggaaatcaacgactaccacttcattagcatcgtctggttttgctgcgattggctggccatgagcaatagctgctacaatccctttatttatggcatctacaatgaaaaatttaagcgggaattcaacaagcgatttgcggcctgtttctgcaagttcaagacgagcatggacgcccacgaaaggaccttttcgatgcacacccgcgccagctccataaggtcaacctacgccaactcctcgatgcgaatccggagtaatctctttggtccggcgcgtggtggtgtcaacaatgggaagccgggcttgcatatgccgcgggtgcatggatccggtgctaacagcggcatttacaacggaagtagtgggcagaacaacaatgtcaatggccaacatcatcagcatcaaagcgtggttacctttgcggccactccgggtgtttcggcaccaggtgttggcgttgcaatgccgccgtggcggcgaaacaacttcaaacctctgcatccgaacgtaatcgaatgcgaggacgacgtggcactcatggagctgccatcaaccacgccccccagcgaggagttggcatccggggccggagtccagttggccctgctaagcagggagagctccagctgcatttgcgaacaggaatttggcagccaaaccgaatgcgatggcacctgcatactcagcgaggtgtcgcgagtccacctgcccggctcgcaggcgaaggacaaggatgcgggcaagtccttgtggcaaccactttaa

SEQ ID NO: 22320 - protein, 540 aa, DROSOPHILA
MDLIEQESRLEFLPGAEEEAEFERLYAAPAEIVALLSIFYGGISIVAVIGNTLVIWVVATTRQMRTVTNMYIANLAFADVIIGLFCIPFQFQAALLQSWNLPWFMCSFCPFVQALSVNVSVFTLTAIAIDRHRAIINPLRARPTKFVSKFIIGGIWMLALLFAVPFAIAFRVEELTERFRENNETYNVTRPFCMNKNLSDDQLQSFRYTLVFVQYLVPFCVISFVYIQMAVRLWGTRAPGNAQDSRDITLLKNKKKVIKMLIIVVIIFGLCWLPLQLYNILYVTIPEINDYHFISIVWFCCDWLAMSNSCYNPFIYGIYNEKFKREFNKRFAACFCKFKTSMDAHERTFSMHTRASSIRSTYANSSMRIRSNLFGPARGGVNNGKPGLHMPRVHGSGANSGIYNGSSGQNNNVNGQHHQHQSVVTFAATPGVSAPGVGVAMPPWRRNNFKPLHPNVIECEDDVALMELPSTTPPSEELASGAGVQLALLSRESSSCICEQEFGSQTECDGTCILSEVSRVHLPGSQAKDKDAGKSLWQPL

SEQ ID NO: 22321 - DNA, 4841 bp, DROSOPHILA
tagtataattgggctagaagggatatatatcgtgtgtacttcatattaatataattgacttgcggtgggaaaatcttttcgatacatgtctgccgtttattgattaaaatcctactttttagtcgcattgaaattgaaaacttgtcaatgtgctttttacccttgaagtgaacggttcgatttttggataagccatataaaacaacattggaaattatgcacgaggcaaatccaagtaaaagtgtgtaaaattgaagttgaatattcatatataagatgtctattcgacatccttttaagcataaagattatttaaaactaagagagagaccattaaaatctttgataatggctcacatgaacatattgtgatataacaattgcacttatataccaaagtttctaaatgtatagaacatatgtcgtatgttgttacatacttttggaaacgaaagtgaaaaactcagatgttatccttgtgattctgttaattccaagctgcagttaataggtccttgaactgattggctttatatttattccgtaatccacccaatagctgctcgcaaggccttttcgtccaccagctcctcacgacgcagtagcaatgggtgtgccagtggccacgatgtcgaggaggaagaggaggagcagctcttccaggaggcgtcgtccggcacaagaacaaacagcgtcgatgggattgccgcccccttcaccgccgctgtcagtgcgacaccggttacggatttctatagcaatgccaccgtactcattacgggcggtacgggcttcgtgggcaaagtgttaacagagaaattgcttcgctcgtttggattgcgtaaaatttacatgctgatacgcagcaaggacaacatgagcgtgcaggagcgtttgaagggctttttcaatgaatcggtaagtgtcaggacaggatgcgggagcctgctgtcaggcgaaccattccatgccgttggccagtacaatatcggataaaatcccaacccactgccttcgaacagatattcaataggatgcgcgaggagtcaccgcaattgttggcgaaggtgcatccgatacgcgctgattacagtgccatcgacctggacattgattccgccgaccgagcaatgctctcgtctgaggtccaggtgagtaacttttgttgatgcgctccaacggcccttcctccaacgccagtttcaatccaccgcaaccactcctctgttggcaattcaatcaatggactttttgtgtgagaaacttttcatgggtctttgttgtgtttgcctatctggatggctcccccgattcctgtctgttactatctatttacacttgaagaaaaggagtactaaccttgacaaaaaatatgacaaaatgagtaaataagctgtaattgatacttatatctgagatggcattccacagattagggtgcactgctagcagaccgatcttttgcagctggcatatttagcatagtaaattttctttcagtgttcgaactatcgcaacgtgtgcctctcgacaaccctagttggcgcattacgtatacgtaaaacgttgcatgccaaaggcaggctcaatgtttacgacaacgccagccaggcagtcagtttatttccttcgtttctcgccccttattttttctgctctgttttgctgatcacaagaggagcacgatatgtatgcatgtgcatatgtatatctatatatattttctacttttgaacaaaaattgaaaaaaccccgccgccacgtaaaactgtgaaaatgtgtgttgcttcgcctgctggtggttataaaacacaatatataaataaatgaaaattcctgtgcatgcttcaagtgcctggcatgcgcgagctattgtcctgccatccgggcgcatccgcatccccatccgcatctgcatctgcatcctcgtccgcatccgttggtcggttttatttttcctcaacttcccggtactgtttgcaaaaacattttgcatacaagtcactcaggcctggtcggtctgcttagagtccgctagcactgttttaagctgaaattgctttgttgtcgatgttcaatgcacgcgtggcactgcaggattcccgccacagcgtcctgtttccaggaccaattccatctgccaccgctcgttctgctgcattttgtgtgctgacttgcaagctatcatggagcgtagagcagacccgattccccaccagatcgctgcttgagcgattaacagtgatggataggggtacaatagagactcatttaccaaagtgaaaatattatttcacatttttttgttgccaccaattcgaataatgctgtaggccacgaattgatattaatttgttagctgtgaaatagtaatagttataagacatgtaacatctttaagatactagatatttgccatcactgactgctgctgctttgtatgcgaatctcatgtgcattttgcatgagcatttctgtgctactgggctcttccctttttgttcttttcatttttaatatgcattacaattcttgggtctggtttatcttcgcctgtagattgtctttaatgttgtcgcttcggtgaaattcaatgagaaactaagcgacgctattgacattaatgtcctgggcacgaaaaagatcctcgacttagtcatggaaatgaagcacttgaaggtaagttgattgcaaactatacttactactcaacaaaaataacattatacgtaaatcttttataatgttgccttggttaaacaatgattcatgaaaacccgccagtattccattctgaaccaatcaatgtatcagcaatcaatacgctggcattcaataccgattccatgcatataatttaaaagcctattaaaggcttccaccgactttatattccacccacccatcatgactggcattggttgcacttccattagtggaaataaacaatggttaaataaaggttcaatattcgcatatcgcgcttttaagtaaccaaaatacataattcccgttgctgaataaatgcaaaaatatttgagtatgaattgttatatttacgtactattttccccgcttttctcaccaaattttcccttttccccaactatttgtgtgtttcatattttacggcattggcgggcaaacaatttcgaacacaattcaatcaacattcaacatgcgtgtttcccttccgattgcaatggtcccccatttggatccttccttgtggaaaaaaccacagtccttcgtgcacatttcaacactctactgcaactgcaatcgaaaattcatcaaggaacaagtatatgagaacgaaattggctacgaaaaaatcatgcaggttggtaatgctatatttatatatgtatatcaaatgaaatcttaacacttagccgactaaaagcacttgcagatactcaaataagtttctccttagttaccttaagctgggtaaaattttcaccaccacttcatactcctgcagatctaccgcacatttgacgatgaaactctggagaagatgcggcactgtctgattggccagatgcccaacacctacacaatgaccaagaagtgtgccgagaatctggtgaatcaccgggcattccacatgccggcgggtatttttcgaccgcccataggtgagtgttggatgggcggagggaatatttattgcggttgcagacttgacttaacaaactaattgtcagataattagcacaaatacccaagggcaggcattgtgtaagcaaaaacacacaagaaacatttccagctccttccattcgcagagagagatcccccggtggatctctgtggcaacaaaaggaatatttaaaattttgtgaaaaatggccaacagagttgtcttcgtttggtagctagtgaattttgggggggagggttcttagggtttaccagataaatgcatgtggaaaaagtttttatatttcgtttttcttttttttttttttgtgattttgtttgcttctttgtttcgagctgcacaaaacgcaacgtaacgtaacgaacgaaacgtaacaaaaagtcagaggatggctgacttggtttaccatcgtctcaatgctcggtgctcagtgctcggggctggaggaatgggaatcctggctgccgaagctctcgaggaacagagcacaaacaaattttcatttattttaacacaaaaatgccaaagcatcgtcctcatgcagctgcatcctaagctgcctgtgcaaacgagaatggcaatggaaaaagaatcattttcggatgatttggtagatagcgaaatactctaaccttaaatagtggttttcatacaagaattttttaaaaattaaatatttataagcacatttaggtgggatctcaatttatatttattattcaacaagtatttgccattaaatatttgaaatattttaaaatgtcatgtgacgttacatactttactcttcttgccgaagagtgttggttgaaaaaatcaagtccaaaacttgcaattgggagtcaggcatatcagttagcaaaatggcaaatggaatgggaagttcggaatgagctggcttaggtggcattggtggctgggatccaaactgctgctggacccgtccctaccattatcgctttgacgttggcgaaaatcaacaaggatactcccggcacagtaaaaatcctcctccttcagcgtctgcgattctctggccgagcgaacaaagcagccattaattcttatttattcgcagtaatgtcaacgtacaaggatccatttcccggctggactgataatttgtacgggccatcaggtttatgcacttggtccgcccggggactcgtcc

SEQ ID NO: 22322 - DNA, 921 bp, DROSOPHILA
atgcacgaggcaaatccaactgctcgcaaggccttttcgtccaccagctcctcacgacgcagtagcaatgggtgtgccagtggccacgatgtcgaggaggaagaggaggagcagctcttccaggaggcgtcgtccggcacaagaacaaacagcgtcgatgggattgccgcccccttcaccgccgctgtcagtgcgacaccggttacggatttctatagcaatgccaccgtactcattacgggcggtacgggcttcgtgggcaaagtgttaacagagaaattgcttcgctcgtttggattgcgtaaaatttacatgctgatacgcagcaaggacaacatgagcgtgcaggagcgtttgaagggctttttcaatgaatcgatattcaataggatgcgcgaggagtcaccgcaattgttggcgaaggtgcatccgatacgcgctgattacagtgccatcgacctggacattgattccgccgaccgagcaatgctctcgtctgaggtccagtgcctggcatgcgcgagctattgtcctgccatccgggcgcatccgcatccccatccgcatctgcatctgcatcctcgtccgcatccgttgattgtctttaatgttgtcgcttcggtgaaattcaatgagaaactaagcgacgctattgacattaatgtcctgggcacgaaaaagatcctcgacttagtcatggaaatgaagcacttgaagatctaccgcacatttgacgatgaaactctggagaagatgcggcactgtctgattggccagatgcccaacacctacacaatgaccaagaagtgtgccgagaatctggtgaatcaccgggcattccacatgccggcgggtatttttcgaccgcccatagagagagatcccccggtggatctctgtggcaacaaaaggaatatttaa

SEQ ID NO: 22323 - protein, 306 aa, DROSOPHILA
MHEANPTARKAFSSTSSSRRSSNGCASGHDVEEEEEEQLFQEASSGTRTNSVDGIAAPFTAAVSATPVTDFYSNATVLITGGTGFVGKVLTEKLLRSFGLRKIYMLIRSKDNMSVQERLKGFFNESIFNRMREESPQLLAKVHPIRADYSAIDLDIDSADRAMLSSEVQCLACASYCPAIRAHPHPHPHLHLHPRPHPLIVFNVVASVKFNEKLSDAIDINVLGTKKILDLVMEMKHLKIYRTFDDETLEKMRHCLIGQMPNTYTMTKKCAENLVNHRAFHMPAGIFRPPIERDPPVDLCGNKRNI

SEQ ID NO: 22324 - DNA, 3316 bp, DROSOPHILA
caacacttaaatttacataatttccgcttcaagtcgcaagtgtaaaagccttggccaggatcagctgctctcggtccagaggcagccgtcctaacttgtttccccagtccattacattttattttttggtttttgctccttgctccgaaagcgcggaaatgttggcaatattttaacgcttctatttaagctgaattcgccaccgtgttttctgggtccagctcttgtttttgtggtagatccaacacgttgccaactttttggcctttggcaagtgcacgaacacgaaaacgaaaagtgcagccccacttgttggggcccctaatacaccaagggcaactttatagacgcttagcaattatggccacgccaactattttattccctcttcacacggccaagtgaattgcgagtccatcgagtggttccatgaaatacgataggggtcctgcaaatggcaaagggttgattgaactcaatcgatctgcttcactagttgaagtgtaaaaataatgaaatggtttaaatcagaaaggaatataatgctcttaaccttaacctagaattttagtttaagcggttcagtttgttaagtaatgaacaggtcaagtcttcacatgaggagtaaacattttccctcactgtagatatttggctataaatatatttctttcgatagttaaagtgtttacacacctcaagatcatatttacaatagttttatagataatataattttatatccgtgttcattattattattattattattctcatattttttgcataatagctgactaaaatcagctttctacaagaatggcattcgttttccattgtaaatatatagcaatttttttttttctgctaagtgagaagcactgcttacttcaaagtgattcagtgttaaaaaaatttcctagcgctttggagttatcgattacatctcctttataatcttagtgagctacggtctctttaagtcagaaagtcattcttgacagtacaaaagttttgtggaagcggagctaatttgtgttttaaaagttttgtaaaggcggagctaatttgtgttttaaataatggaagcaaagcaattgttggctgaaagttgtgcaaaggtggacatcttagagatgaagaaggcattgatcccaaatccttctgccgaagaggatgcagttgctgtaattccgctcgcaggtatatatatatgtagatttagtcacacaccatgacaagcactttttcgcttcaagatgacaagcactttttcgctttaagaaatagaatttaatttaaacctcttttatctgaaaatgaaccggcagagcgtaaacgtagattgattatttggtttcttcgttctagataatttgaagaaaactgctatgggcggggaaaataaaagcgatgagaagggaactgtttcttctgagccaaaggctctcagtgatcaaatcacatcttctatgcgtgttaccaaaaacaaaatcgccgatgataaatcttctgacgttatcactgatgacgcaaccaatggccgtaagaagcaaaagaaaaataaaaaggcaaaaattcgcccgttgaccatgcccgtgacctccaaggatgcccttatggttttgaatgagttaaagggcgtgacagtcgacaatatgcaaataaaacgagaccacgagggaaagattatggctcgcgttgttgttaactcaaagaaatacgaagccgagggttcttcagtaaactctgcaaggaatgcagcttgcgagaaggcactgcaggaaatcctaaccaccaaaatgaaagctgtgttggacgggccaggaaagagcttggaaagcgatgaggatgatatactcgaaaagatggcctcttatgccattcacaaacttggtgaggaatggaagaccgatgatattgatgtcgcaaccctgtataatgacttgaagaacaagcagacgtctgttgtcgagccaaagaagccgttgcccgaaacatggaagaatatgcacccttgcatggttcttaactatatgcgcccccagtgcacctttatagtttcaggtggcactggtacaaaccagaataatactttctccatgagcgtctgtgtggacaactgcgagtttaatgctgaagggccatccaagaaggcagcccgttacaaactatccgctttagtttgtaacaaactatttggaaccgactatccacaaaaataaacgaaaacatcacatgattctgggcacccggtagtactttaaaacgtattagcggcattccccacaaactacacgaaatactgacttgaagaaaaaaaaaaaaaataatacattgcaacaaataacacttttcattgaattaatttgtatcgtaaataaaacgaataaaacttaaaccacttcattcatttacttcttgattttattggaaaatctcttttagatcaatcttttttattacatcaccccagaacctatgcaattatttgcattcatatttcatattccattttcctgccggtcacgatagaaagacaaacaaaaaagctggaggacacagatcttggatattgaatttaattaaaaatgttcatgacagttcaaccagcttattatcctgtcacactgagtgagccaaaaaaaaaaagcgagtgttgaatgaaaatggaaaaatatttcaacgaacgtaattgaattcgaattggaattgttccgctgcaaatggaagttgtttaactagacaaaaaagggggaacgaaaagtgttaattttattgcacggctcatcaatatccagctcacttccgattgggtttattaatgatttctctccctaatggttattcctgcgaaataacgctgggcatccgcgtttaatgacaattaacatttttctaatggccggcaattaggggaatcccccgggctttaagcaagatttattcgagcgaagggacggccggaaaaaccactttctggagctccagtcgaagccaagttctcgcacaatgttggccttattattacattgtttatgagagccccttacttcttggctctatccccgctcaatttattgttttgtgttgtgttgttcttgttgctggcttgttttacaagaccgtctcgccatgttcactagtgtatgctaccacccacctcccaagagtcgcaaaccaccctggccaccaccccatttgaggtcgcagcatcttgcggtccgccttaagtcatatttccttattatctgggcggtttttggcattgtttttgcgccgccccttgacttttttgcggttgaccttacgaaaa

SEQ ID NO: 22325 - DNA, 1148 bp, DROSOPHILA
acagtacaaaagttttgtggaagcggagctaatttgtgttttaaaagttttgtaaaggcggagctaatttgtgttttaaataatggaagcaaagcaattgttggctgaaagttgtgcaaaggtggacatcttagagatgaagaaggcattgatcccaaatccttctgccgaagaggatgcagttgctgtaattccgctcgcagataatttgaagaaaactgctatgggcggggaaaataaaagcgatgagaagggaactgtttcttctgagccaaaggctctcagtgatcaaatcacatcttctatgcgtgttaccaaaaacaaaatcgccgatgataaatcttctgacgttatcactgatgacgcaaccaatggccgtaagaagcaaaagaaaaataaaaaggcaaaaattcgcccgttgaccatgcccgtgacctccaaggatgcccttatggttttgaatgagttaaagggcgtgacagtcgacaatatgcaaataaaacgagaccacgagggaaagattatggctcgcgttgttgttaactcaaagaaatacgaagccgagggttcttcagtaaactctgcaaggaatgcagcttgcgagaaggcactgcaggaaatcctaaccaccaaaatgaaagctgtgttggacgggccaggaaagagcttggaaagcgatgaggatgatatactcgaaaagatggcctcttatgccattcacaaacttggtgaggaatggaagaccgatgatattgatgtcgcaaccctgtataatgacttgaagaacaagcagacgtctgttgtcgagccaaagaagccgttgcccgaaacatggaagaatatgcacccttgcatggttcttaactatatgcgcccccagtgcacctttatagtttcaggtggcactggtacaaaccagaataatactttctccatgagcgtctgtgtggacaactgcgagtttaatgctgaagggccatccaagaaggcagcccgttacaaactatccgctttagtttgtaacaaactatttggaaccgactatccacaaaaataaacgaaaacatcacatgattctgggcacccggtagtactttaaaacgtattagcggcattccccacaaactacacgaaatactgacttgaag

SEQ ID NO: 22326 - protein, 324 aa, DROSOPHILA
MEAKQLLAESCAKVDILEMKKALIPNPSAEEDAVAVIPLADNLKKTAMGGENKSDEKGTVSSEPKALSDQITSSMRVTKNKIADDKSSDVITDDATNGRKKQKKNKKAKIRPLTMPVTSKDALMVLNELKGVTVDNMQIKRDHEGKIMARVVVNSKKYEAEGSSVNSARNAACEKALQEILTTKMKAVLDGPGKSLESDEDDILEKMASYAIHKLGEEWKTDDIDVATLYNDLKNKQTSVVEPKKPLPETWKNMHPCMVLNYMRPQCTFIVSGGTGTNQNNTFSMSVCVDNCEFNAEGPSKKAARYKLSALVCNKLFGTDYPQK

SEQ ID NO: 22327 - DNA, 6036 bp, DROSOPHILA
acgaccattaaagcaatgcgcttcaacgcgcttcccaagttcccaagtacaattaaggatttcaacgaacgccaaaagccatacgccaaaatatattgtggccgggaaacaataaagacaaaaaatgaaatggaagtcaacggaggaaaaaaccaacctttgcagctataagtagggccaagaattggaagcccaaggccaagttaagggaaaaataaacaaaaatgtaatttgcgccacttagcagagagcgaatggacagtgccataaataattccaatttttttttgtttttttttcggtattacagcggtggtccagataataaggaaatgtgactttgttctgggtctcctcatttgaccacaaaaataaaatgttaaatgaaaagccggcaggaaaagccacggaaatgaaagcaaaagaaaattcagaagtggcacaaactagagttggcagatgtacgaagtcaacagcagaaggtaaagtcagtttaataatcttaactaatttacaatttattttaattttttggtttattattttgtgaataaataaacgctgaaatttgattcaccgaatattttgggatacatttaccgctttgttacttctataggcacggaaattcaattaaggtaacaaactgtccgaatttatgacatgggaagcgttgggccccaaaggacgaatggagtttgagtgcgattgagacgcacacttgggacgacccttatatcctttatgcatattcattggctaaccgggcgtggatcatgaattatgaaatgtaattgaacgaaattgaataatgacggtgaccggtgtcagttgacaagaaaagtgaaattccaatgagcgatttatgggccaatttcaattcaattttgacagccgcaaaatgtcaaagccaacgaaatgaataatttacacgcagaggcggagatatatatatatacgggggcgtcatttgcatgtaaacttattgttagaaatcacaatgcactggtggctactcgtatttttgccattatcctgccaaggattgccggagcatgagttgctggaactggagttggattatggtttggccgaaccgcagcgcacttcgctgctgcagagcagtctgatattgcaattctcgcaggactataagcacatacccaggataacgtacttcacgtgccagaagccacatctacagaccccaaaccaaatccccaacgctgcagagcatcgtgacgccttcgcggcgaagaattttcagctgattaagagtctctacgaaagcgagctctttgtgcggattgtccttctcgatgtcctggcccagtcgccaacgagtgggcgacccaaccgaccgggcaacggaccaaccggcggattcagccagacgcccagccaggcgcagagcaattccgagtggctggagggcgtcctgcggatggaagccctcaggcaaattgcggtcgtggatctggcatgcggcgccgtcagtcgacgatttctcgagttggtaagaaggggtatggaaactgggaaaactggtaggagcttctccacaagacactggaaaaaattattaaatgcttctgactttattgagatttatgaaaaagtaatttacaaaataaaagaagcattgattttttgtcccctaattcgactgtatacttaaaccatttggtaagatcaaaagtattgaaatttgttccaagtgcttgcgtctagttgtagactccttattaagtactcaagtacaatcatttcaaaggcttccgccaagatgctctacagcgagaagtttcactggctattgatagaggatttcgcctggcatggaaggacgcagacagccgaaggatcggggaaacgtgatgatggcgagatggaggaagaagagccgcccgggcagcaaattcaggccaccgacgatgaggacctgccctccatcgagagcttcttggggggcatgaacctgtatatgaacaccgaactcactctggccaagcgaatgtccgaggcagcccactacactctgttcgatgtttggtgagtgattaactggcctggtcatccacttcagaatcacctcaagcttcaatcttaacttgaatcaagttgtcctctaccgaaaatactttatgccatatttgtctctttattgttcattgatgactgagcacttgaaaggacttgttgtatatattgattgatattgatatatttgcttgcttatttcattgtaccttatattgtttcttaaattttatttatttacacattcaatgtatttaatttggtgtttcatttagcaatgtgtggttagttcaaattaacctggcaattgcggtttcggaggcatttaattatagtcattaaatgtattctgtattctgttcatttcgaatacttgattattaggacattttgtaataaaaagaaatatttgcctatttaattatgcaatggctaccaaccagatcaatgtatctcacatccctgttcaaccatattgacctcaagcacctccaaagcttccttagcctgaataatatcgccacagtcaaaggacaaactatcatttcaccaacacttgaccgcaaaaccattcattccattccactgaaataccagagagaagcgtggcacttctgcctggttgccatcaacacatcagacataatttcccaactgtcgacttcccggctgctaattcccacaacgacttgctcccattttggaccatcgcttaggaaccccggactcaactacggcggccacgtcaatctgaccgaaattggcagcttcacgccgacggagggaatccagttgcatacatggtttcggaccacgtccacagttcgtcgcaggatggacatgcagcacgccagggtgcgatgcatggttgtggtgaggattgggaaattgggtgggatgcgtagatccatcatcatgccggggggtggtcagtggagcattcgagaaaaatgaaggggcaccacagaaatcacattggtttttgaatcaactacaaaagtgtttgaacttcgcaaagaattggatggaaaatattaggtagcatagacacctttacaggttttagtgcgtataaagtactagtttattacagtgcagcaatattttcgatatctgtccatttgccaggtgaccaacaagaacatgacaggcaccctaatgtactacctcacgcacactatgtccggtcacatcgacacgatgaaccgcttcaacttcaatctgctgatggcggttcgcgacatgttcaactggacgttcgtcctgtccaggacgacttcgtggggatatgtgaagaacggccggtttgatggcatgattggggcactcatacgcaacgagacggacattggcggagcaccgatattctactggctggagcggcacaaatggatcgatgtggccggtcgcagttggtcgagtcgtccttgtttcatctttcgacatccccgaagcacgcaaaaggatcgtatcgtcttcctgcaaccttttaccaacgatgtttggattttaattgtgggctgtggtgttctgacggtatttattctttggttcctcaccaccatcgaatggaaactggtgccacacgatggttcagctttgataaagcccaaaggaggagcgcctccaaggcatcattaccagcagcagcaacagcaggagcaagtggaagcaccagtgcgtcccatcactgccgtttcggtggtggtcagtaaggaaaaagttgaagagaaacaggaggagtatgaagattccactccgatcgatgccggaacactttggcaacgctgctatcagaagctaaacaaatacatcaaggatcgaaaggccaagcagaagaaagcgccggaaagagtgggcctattcctggaatccgtgctcttcttcgtgggaattatttgccaacagggtttgggattctctacgagttttgtttcgggtcgctgtattgtaatcaccagtttactcttctcattttgcatctatcaattctattcggctagtattgtgggcactcttctcatggagaaacccaaaaccattaaaactctgagcgatctggtgcacagttcgttgaaggtgggcatggaggatattctctacaatagggattactttttggtgagaatataaatatttgcattatgcttaaagtcttcaaatcttctttattcttagcacactaaagatccggtgtccatggaactgtatgccaaaaagataaccagtgtgcctacgactaaggaaaacgaggccgatgaagacgaaccagtggatccaaatccagtctccacagatcctgccaaatcctatcgggatatcgttcacagccatgaaactggtgcacatgccaaggataatgctgcgagcaattggttagatccagaaacgggtttacttagggttaagcatgaacgtaagtaattcgtaaatcatataaattaacattaacattttcaagcatctaggttttgcctttcatgtggatgtggctgctgcctacaagatcattgctgaaacctttagtgaacaggatatttgcgatctgaccgaagtcagtatgtttccgccacaaaaaactgtgagcataatgcaaaagaattcgcccatgaggaaggtgatttcctacgggtgagtacagttttagaaaattaaaaaaaaaaaacaaaaaaaatgagtcaaaatccttgtagattaagacgtgtcaccgaaacaggaatactgacatatcactttaatgtctggcactcgaggaaaccgccttgtgtgaagaaaatcgagacctccgacctgcatgtgagttcgaaggagtggcgtaaacgccccttttcaactttttaagccaccttgattcccaggttgacatggataccgtgagttcggccctgttgatactacttttcagctacgccatcacccttatgatactgggcactgagattttatactccaaatggcataatcgaattcaattaaagtgggtgggcgcaacttgaaagtgatttaataaaatgcaaactcaaagagtttgagctctgacacttgagctcaactggaattaattgccgtggatgaagttttcagttcattttgaatgcccgctttccgattcattagcttgccacaaagggaaaattcgattttcgcaggtaaaaggtaaaagtttaattaaattaacttggctgcgcagcaaatcaattgcataattaaattaggtaatggggtcaaactttttctgaattttttagaataaatataccgtgcttatgaagtgggaagattttttgtattattcgaaggattttcgttttaaatttcatatatgcaagttgttaaaaatattttttcattttgtctcaactacaaaatagcttgcagcgggcggagaagcaatgagtgagtcaattttggccacaaacgaactacaaaatatccattaagataacaagtttttcagtagttgtaacacagttttccttccttctactccttcatatttttcatttttttttttttttttttttggatctttgccttttaccgggtgccttcttgtcagcgctcacataaaaacacaaaagtcctcgtcctgggcgcaatgtttttttggctccttgccaaagtgccgctcttaggcatttcttttcctttcctcctttagccttgtatttgtttgtttgcgaaatgggaaaggacttggaccgccttctaggctgaaaagccacaacaacagagcagcaagtcgaggcaaatcaattacaacatgtagtgagaatctgtaaagcgcaacgaaaacatgttgccccgaaaagttgtcaacatttttcatttaatgtccttgctcattagtagtgaccgaagcaaagacaaaaaccagaaagcagtggtccatgttcgatgggcgggcataaggttgaaaaaccaagtgagttttccgaaatacacgctttttgccgactacacgagtgattgaaaaagtttgcgagacatatgggt

SEQ ID NO: 22328 - DNA, 2580 bp, DROSOPHILA
atgcactggtggctactcgtatttttgccattatcctgccaaggattgccggagcatgagttgctggaactggagttggattatggtttggccgaaccgcagcgcacttcgctgctgcagagcagtctgatattgcaattctcgcaggactataagcacatacccaggataacgtacttcacgtgccagaagccacatctacagaccccaaaccaaatccccaacgctgcagagcatcgtgacgccttcgcggcgaagaattttcagctgattaagagtctctacgaaagcgagctctttgtgcggattgtccttctcgatgtcctggcccagtcgccaacgagtgggcgacccaaccgaccgggcaacggaccaaccggcggattcagccagacgcccagccaggcgcagagcaattccgagtggctggagggcgtcctgcggatggaagccctcaggcaaattgcggtcgtggatctggcatgcggcgccgtcagtcgacgatttctcgagttggcttccgccaagatgctctacagcgagaagtttcactggctattgatagaggatttcgcctggcatggaaggacgcagacagccgaaggatcggggaaacgtgatgatggcgagatggaggaagaagagccgcccgggcagcaaattcaggccaccgacgatgaggacctgccctccatcgagagcttcttggggggcatgaacctgtatatgaacaccgaactcactctggccaagcgaatgtccgaggcagcccactacactctgttcgatgtttggaaccccggactcaactacggcggccacgtcaatctgaccgaaattggcagcttcacgccgacggagggaatccagttgcatacatggtttcggaccacgtccacagttcgtcgcaggatggacatgcagcacgccagggtgcgatgcatggttgtggtgaccaacaagaacatgacaggcaccctaatgtactacctcacgcacactatgtccggtcacatcgacacgatgaaccgcttcaacttcaatctgctgatggcggttcgcgacatgttcaactggacgttcgtcctgtccaggacgacttcgtggggatatgtgaagaacggccggtttgatggcatgattggggcactcatacgcaacgagacggacattggcggagcaccgatattctactggctggagcggcacaaatggatcgatgtggccggtcgcagttggtcgagtcgtccttgtttcatctttcgacatccccgaagcacgcaaaaggatcgtatcgtcttcctgcaaccttttaccaacgatgtttggattttaattgtgggctgtggtgttctgacggtatttattctttggttcctcaccaccatcgaatggaaactggtgccacacgatggttcagctttgataaagcccaaaggaggagcgcctccaaggcatcattaccagcagcagcaacagcaggagcaagtggaagcaccagtgcgtcccatcactgccgtttcggtggtggtcagtaaggaaaaagttgaagagaaacaggaggagtatgaagattccactccgatcgatgccggaacactttggcaacgctgctatcagaagctaaacaaatacatcaaggatcgaaaggccaagcagaagaaagcgccggaaagagtgggcctattcctggaatccgtgctcttcttcgtgggaattatttgccaacagggtttgggattctctacgagttttgtttcgggtcgctgtattgtaatcaccagtttactcttctcattttgcatctatcaattctattcggctagtattgtgggcactcttctcatggagaaacccaaaaccattaaaactctgagcgatctggtgcacagttcgttgaaggtgggcatggaggatattctctacaatagggattactttttgcacactaaagatccggtgtccatggaactgtatgccaaaaagataaccagtgtgcctacgactaaggaaaacgaggccgatgaagacgaaccagtggatccaaatccagtctccacagatcctgccaaatcctatcgggatatcgttcacagccatgaaactggtgcacatgccaaggataatgctgcgagcaattggttagatccagaaacgggtttacttaggcatctaggttttgcctttcatgtggatgtggctgctgcctacaagatcattgctgaaacctttagtgaacaggatatttgcgatctgaccgaagtcagtatgtttccgccacaaaaaactgtgagcataatgcaaaagaattcgcccatgaggaaggtgatttcctacggattaagacgtgtcaccgaaacaggaatactgacatatcactttaatgtctggcactcgaggaaaccgccttgtgtgaagaaaatcgagacctccgacctgcatgttgacatggataccgtgagttcggccctgttgatactacttttcagctacgccatcacccttatgatactgggcactgagattttatactccaaatggcataatcgaattcaattaaagtgggtgggcgcaacttga

SEQ ID NO: 22329 - protein, 859 aa, DROSOPHILA
MHWWLLVFLPLSCQGLPEHELLELELDYGLAEPQRTSLLQSSLILQFSQDYKHIPRITYFTCQKPHLQTPNQIPNAAEHRDAFAAKNFQLIKSLYESELFVRIVLLDVLAQSPTSGRPNRPGNGPTGGFSQTPSQAQSNSEWLEGVLRMEALRQIAVVDLACGAVSRRFLELASAKMLYSEKFHWLLIEDFAWHGRTQTAEGSGKRDDGEMEEEEPPGQQIQATDDEDLPSIESFLGGMNLYMNTELTLAKRMSEAAHYTLFDVWNPGLNYGGHVNLTEIGSFTPTEGIQLHTWFRTTSTVRRRMDMQHARVRCMVVVTNKNMTGTLMYYLTHTMSGHIDTMNRFNFNLLMAVRDMFNWTFVLSRTTSWGYVKNGRFDGMIGALIRNETDIGGAPIFYWLERHKWIDVAGRSWSSRPCFIFRHPRSTQKDRIVFLQPFTNDVWILIVGCGVLTVFILWFLTTIEWKLVPHDGSALIKPKGGAPPRHHYQQQQQQEQVEAPVRPITAVSVVVSKEKVEEKQEEYEDSTPIDAGTLWQRCYQKLNKYIKDRKAKQKKAPERVGLFLESVLFFVGIICQQGLGFSTSFVSGRCIVITSLLFSFCIYQFYSASIVGTLLMEKPKTIKTLSDLVHSSLKVGMEDILYNRDYFLHTKDPVSMELYAKKITSVPTTKENEADEDEPVDPNPVSTDPAKSYRDIVHSHETGAHAKDNAASNWLDPETGLLRHLGFAFHVDVAAAYKIIAETFSEQDICDLTEVSMFPPQKTVSIMQKNSPMRKVISYGLRRVTETGILTYHFNVWHSRKPPCVKKIETSDLHVDMDTVSSALLILLFSYAITLMILGTEILYSKWHNRIQLKWVGAT

SEQ ID NO: 22330 - DNA, 2610 bp, DROSOPHILA
tctaattgcatttgcatattttgataatattcgaaaaggggaaatgaaagtggcaaatgcattcgccattcgaaatactcagtttaatgcggattcaaagggaatggaaaataagggtggaggcgggtgttagtgaaatttaattgcatcgtgcgaagaaatcccgtttaattacggcgattaactgtaataatttattagtttttgcttaatttgtgacatgtgcaaacaattagtgattcaatcgcatggccaaaaaggaagcaataataactttgactaattagctgtgtgcggtaggcttaattcgtggcgaaaataatatggctgaatcacagaaacaattaatacgctttttttattcgttcgttaagttttgtagtgccacatactaaagagtaggaaaaaaaaacgttgataagtaattactctcattgaatttgcattatttgttaatactttactaatttaaaaaaaaattaaaggaagttagattttacctatttataaaatagttcgatttaaatgtaagcataggacatataattttagcaaattttttttgtttttaaaaagtaactgcacttgaaaatgtttttacacaggatatgtacattttaaatgtactccactgtaagattacacaaaatcattttttttacacgttacttacactgttaagtgacaaaattaaaggtagcaaatatctaaattattaaccctacttattaaatattttatatattttatattcaacatagtcataaaaaattaaacataactatttaaataaatataagtgctgaagatataacaataaattgctaaagcggaatcacttctgtaaaatagcctaacgcctcgttctctctgttaactgctctccgtttgtcaacactaaaatgttaaacaaataaaattttttgcgaagcaccgaaaacagcaactgtttgtaaaatatcataaattatttattaaattaattaaaaccaacgggaaaatggcagcaaaagtagcgagcggcacgaacaaagtgttccagaacgtgagtatgggtgaatcatcaaaggacagctgactaagatgaaaagtaacctcactttgtcatggttttttctgtgcatctgctcaattgaaatttatgatatatattttaaatcgcattttcagcacgatgacgtgcacatctccttcgaggatcagcagcggatcaaccgctttgcgaagcacaacgcccgcatggatgacttcaaagcggagctggaaacgaagcgcaatgagctgaagagcttggaggaggcgctggaggagattgagctgttcgacgaggacgaggacataccgttcctggttggcgaggtgttcctctcgcacaagctggagaaaacacaggacatgctgaaggagaccaaggagcaggtgctcaaggagatcgccggcgtggaggccaaggcgaaggttatcaaggcggaaatggacgagctgaaggctcatctgtaccagcggttcggcagcaatatctcactggaggccgaggattaatccacaattgatcaattgttaatttaacattttacaaaatagagtacatttaatttaaactcaactaaacgcgatgtcttcagattagagcactaggaaatagatgatcagggcgatgataagcaaggtgaccaccactcctccgatgaatatccgacgatcctcgaccagccggcgttcaataagtttcatcgtgtgattggacagacccagtgtgctgcctatcgcctggattctcttgtgcgctccgcccagcgtcattctctgcgagatcaggctctcgagaatgccgctgcccgaggcaatcatgtcgtccacaccccgatgggcgttacccagctgcgtatgatgctgcagttcgtagtccaattgcaggcgcgtttcctccggctgcgcgctgtttgccgtgaatctgtgattcagcagctgttccctctcggagatctcctgcatccgtcgctgtcttcgttcccgcgccgtctgcagtgatgtctgcaggtgtctcaggtcatatttcagctgatccacacgaagtttggagctttgtcgctgcgaaggtggcaccttatacaacagcacatccaaccgatcgcagtttctaaacacaaaagatttatttaataatacaaactcctcttgggataatatatatcattgtagaactcacgcgttcgcctgggtaatcttcaattgaatgccgttttccacgtcaagcgattcctgggcactgagctgactcagtcgctggaaatcgcgctcgatgtcctttaccacattgttggtttggtggtacaagctctccatgtcgttacacctattgattccgcattaatttatgggcccgagaatattcgcaaattaatatttaatcggttgcaattggtttgtttttaaaaaagctgacgcgttaacattggacagagtgtcatgttagttaacagcactgatagcagagcagctggctgccgtttttggtatgaccatatattatgacaaacttatcagctaatgcaactattaaatttcctttttattttcagagaatatgctatatattgttaaataatg

SEQ ID NO: 22331 - DNA, 485 bp, DROSOPHILA
atggcagcaaaagtagcgagcggcacgaacaaagtgttccagaaccacgatgacgtgcacatctccttcgaggatcagcagcggatcaaccgctttgcgaagcacaacgcccgcatggatgacttcaaagcggagctggaaacgaagcgcaatgagctgaagagcttggaggaggcgctggaggagattgagctgttcgacgaggacgaggacataccgttcctggttggcgaggtgttcctctcgcacaagctggagaaaacacaggacatgctgaaggagaccaaggagcaggtgctcaaggagatcgccggcgtggaggccaaggcgaaggttatcaaggcggaaatggacgagctgaaggctcatctgtaccagcggttcggcagcaatatctcactggaggccgaggattaatccacaattgatcaattgttaatttaacattttacaaaatagagtacatttaatttaaactcaactaa

SEQ ID NO: 22332 - protein, 138 aa, DROSOPHILA
MAAKVASGTNKVFQNHDDVHISFEDQQRINRFAKHNARMDDFKAELETKRNELKSLEEALEEIELFDEDEDIPFLVGEVFLSHKLEKTQDMLKETKEQVLKEIAGVEAKAKVIKAEMDELKAHLYQRFGSNISLEAED

SEQ ID NO: 22333 - DNA, 4732 bp, DROSOPHILA
gctccgcccagcgtcattctctgcgagatcaggctctcgagaatgccgctgcccgaggcaatcatgtcgtccacaccccgatgggcgttacccagctgcgtatgatgctgcagttcgtagtccaattgcaggcgcgtttcctccggctgcgcgctgtttgccgtgaatctgtgattcagcagctgttccctctcggagatctcctgcatccgtcgctgtcttcgttcccgcgccgtctgcagtgatgtctgcaggtgtctcaggtcatatttcagctgatccacacgaagtttggagctttgtcgctgcgaaggtggcaccttatacaacagcacatccaaccgatcgcagtttctaaacacaaaagatttatttaataatacaaactcctcttgggataatatatatcattgtagaactcacgcgttcgcctgggtaatcttcaattgaatgccgttttccacgtcaagcgattcctgggcactgagctgactcagtcgctggaaatcgcgctcgatgtcctttaccacattgttggtttggtggtacaagctctccatgtcgttacacctattgattccgcattaatttatgggcccgagaatattcgcaaattaatatttaatcggttgcaattggtttgtttttaaaaaagctgacgcgttaacattggacagagtgtcatgttagttaacagcactgatagcagagcagctggctgccgtttttggtatgaccatatattatgacaaacttatcagctaatgcaactattaaatttcctttttattttcagagaatatgctatatattgttaaataatgatttttaattagtgaccaaatattgcacttgacggcgctgttaagtgttaccactgttaacggtgtaaaaatcagagttgttaagcaagccaagcaaaacctaaaccgcactggtcacatcgcactggaaacgcgttagcacacttttacggtattttagcacttagcattaaccacaatggcgaatacatcaagtaccggcgttggtaagaaataaaattgataaattagcaatttggcagcttaaaaatgcgatccccgcacgcccggagttgttggccatccgttttctgcatttcccgctgaccggcggcgatttttccgccgctacggacccgacaagcggaccgcaatgtgattgtgtgtgtggtgcaaaacgggcaaaaagaagacgaaagcaagggcgaaagacgaaagccgataaaagcgaaatgggcgaatggaaatttattttcgccagcggaccacgctgctcttgcaattttccttggccgcgtttggcgttggaaaaactccgttgcaattgggcttcgtgacttgacattttccgaaatatcatccccgctccttcctcactatgtggctctcgctcgctcgctcgcgcacgctcttcttcttgccttcatacttaaagttttttctttattttccttattttttgcacacttgcgtttttgcaagctgccttgtcttttctaattaaattagctgccatttacatttgcctggattgtttttgcaaatgcagaaattatgctttcgccccgcccccgccgacacaccctccccccgcgcccatcgtgcttaatatctgcgcttcgcattttttttttttgacttgtgttctctgcacgaaaatgcgtacaaagtcacacggccgaaaacaaaaacaacacgagaagcagagcgcaaaacaacaacaacacgtacccatatgaccccacactgagaggaaaagtcgccgaaatatcaccgaaaatggtttataccatagaaaatgtgtagaacagtccttactagtttgtttctaaatagataaaactgtcgtttataattatatatatgtatcttatctgtacgagcccgtgattataattatttagaaagctaagtactttcttgccccgccaaccagaaaattaaaaacaagctgacatttaacttaatgactatatttaaagatttaagtttttcagtgaaaatgcattatgtcatcgagttctcacctctttgccgtttcacattgcagtggtgccacggaatttccgcttactggaggagctggatcagggccagaagggcgtgggcgatggcaccatatcgtggggcctggagaacgacgacgacatgacgctcacctactggatcggcatgatcatcggtccgcctagagtaagtttccatatcgattggactttcctcgctacgtcaccagataagcccggtttattaggcaattctgtaggattattgacatcttatcgcttagattgcgcagaccattcagtttggatagcaccttgtatctttgaaggcagtttatctcttcagtgcgatggaatttgataatatttgcatttcattagcaccgctgatgcaactcattgtgagtgtgggtttcaaaagtcattggcttcattagcttcttatgtggtaaatatgaatataaaatgtacctctgctagattttaatcttatatgaaaactacaagctgcaatctgggattattgctagaaaatataggtatagaaacgctcgtgctaatttattcttattttattcacaagaaaatattccactttacatgcatttattggggaaaacaaggctctagccttgaattactagcaaggaaagcggcggaaaactaaatttgcatttaatttttgtatagtctagaagtgttgcgcgcgccgccgcatgaatcattgaggagtttgggtggcagggtcttctaacagagccccaacttggtttagttgcattggcaactaaagtggagaagcggtggactaaggggaatgggagcgcctgactcatcgacactctggccgcaagtgcacagagtattgaatcattcaagaatcatttaaagctaatggcaaactcttgtgtttattacagacaccattcgagaatcgaatgtattcactaaagatcgagtgcggcgaacgctatccggatgagccaccaacgctccggtttataactaaagtaaacattaactgcattaatcagaacaatggcgtggtaagtgcaagcaatcgaatgtggcatataaacaacgacgaatgctaatatatttgaatttgcaacaggttgatcatagatcagttcagatgttggccagatggagtcgcgagtacaatataaaaacgatgctgcaggaaatccgtaggattatgaccatgaaagagaacctgaagctggcacagccgccagaaggtagctgtttttagtcgacaacatccgttagcaacaccagcagcagctgcaacagcatcgaatgcaacgcgagcgggagcagcatccacacccagtaagagccggaaaacgaaccaccatcatcagtccaaaagtccaagaccaaggtggccacacgtgcgtggaattaaaaagagattgtgtggcggctgctccgccgagttgccatcggtggcagcgtatgcttattaatgaacgtaataaagatcgagtgcggttattgtggcaagaacaacaaccaaatgcaagctatatactataagtaaagggaacagcagcgaaaaatgcgataggagcgtcactatgaagaggtcgtcgtcgtcccttccgtcatgaactatgtcatcgtgtttggttaccttactcttcttactacttcaacttcagtccccaaacaaaacgaaacgaaaatatgagaacttcttttgaataagaaataaaacagcagcaaaagaaacaagttaaatgcctgaatgtttcagattcaaaacttcaaatcgaaaattcgtaaactaatcgaacagaaaagtaatgcataacaatgataacgattaatcaagatcacagcgtgagatccgagcgtaattattgtttttttttgcctaaactaaaaatttattaattatatacataaagcaaaatatatattaatttaaataaaaccaacatgtcgaacacaatttttgtagacggcgccagtacgaacgttttttttttttgtttatcattgatgaagcgattttgtagttgattttatattctattctttcgaaaatcttcctcccgaatcgcttgggacgagggacgcgatttataatcattgaattgtggaaattatagatatatatatatatatatagaaacacacacacactaagccgatgagcaaatcgagcggacagaacgatgaacgatgattaaaataatactttaatttaagcttctaaataaaacaattaatccaataaaacgtagtgtatccatgtaatctagtggggttacttaaaaacttataaacaaaacaaaatcaagtaacaaattgaaacattttgatgtcccgcctagaaatgattttccaaccaaccatcatttccgtttatttgtcaattgtttattgttttaaatacataattgatttatcgattctatacacaatcaatgtcacattatccatcaatcatttcgctaggctcctgtagtctttgtagcctcaatcccccgctcattgaatcttccgatccgatctttgtttggttaccatcagtaggttaccaaggatgttttagatttagctatttagttttattttgaatcgtttggttggctggctctcgcatattgggatagtatttgtgtttatatttttcagcggagagaacattgacttggtggttgcggatgttgcttgttcacttgtgtgtgg

SEQ ID NO: 22334 - DNA, 888 bp, DROSOPHILA
caatggcgaatacatcaagtaccggcgttgtggtgccacggaatttccgcttactggaggagctggatcagggccagaagggcgtgggcgatggcaccatatcgtggggcctggagaacgacgacgacatgacgctcacctactggatcggcatgatcatcggtccgcctagaacaccattcgagaatcgaatgtattcactaaagatcgagtgcggcgaacgctatccggatgagccaccaacgctccggtttataactaaagtaaacattaactgcattaatcagaacaatggcgtggttgatcatagatcagttcagatgttggccagatggagtcgcgagtacaatataaaaacgatgctgcaggaaatccgtaggattatgaccatgaaagagaacctgaagctggcacagccgccagaaggtagctgtttttagtcgacaacatccgttagcaacaccagcagcagctgcaacagcatcgaatgcaacgcgagcgggagcagcatccacacccagtaagagccggaaaacgaaccaccatcatcagtccaaaagtccaagaccaaggtggccacacgtgcgtggaattaaaaagagattgtgtggcggctgctccgccgagttgccatcggtggcagcgtatgcttattaatgaacgtaataaagatcgagtgcggttattgtggcaagaacaacaaccaaatgcaagctatatactataagtaaagggaacagcagcgaaaaatgcgataggagcgtcactatgaagaggtcgtcgtcgtcccttccgtcatgaactatgtcatcgtgtttggttaccttactcttcttactacttcaacttcagtccccaaacaaaacgaaacgaaaatatgagaacttc

SEQ ID NO: 22335 - protein, 145 aa, DROSOPHILA
MANTSSTGVVVPRNFRLLEELDQGQKGVGDGTISWGLENDDDMTLTYWIGMIIGPPRTPFENRMYSLKIECGERYPDEPPTLRFITKVNINCINQNNGVVDHRSVQMLARWSREYNIKTMLQEIRRIMTMKENLKLAQPPEGSCF

SEQ ID NO: 22336 - DNA, 2594 bp, DROSOPHILA
tatacgcctatatatatatgtatatatatatatatatattagtacgtttaaagtaagttttccatttctaagttatacagtttatcgttctctttgtgttccttttccttttttgcattgcgttatgttgcaaaaaaaagttgctgtcatttggcgatctagtcggtagcagcaagtctccaatggaatcgatgccccaccactccatcatcatcttcttcttcttcctcatcttgttggtgttattggtgttatggtgttgtggccgttgcggatgctgttccaagcgctgttgcatgtatcctcgtattgttgttgttgttgtagttgctattgcacgcattgttgcatacatcaacgtgttgttgtcgttagtgttgcacgcattgatgcatgcatcatcgtgttatttggttttatatgtatgtatcttgtcgcatcgccgtccctttaggtattggaactaaatgccgcctgacggagcagcacatagatcttctccttgatccaatccttattgtagggcgcataggtattggtgctcttctggtaaaccatgcagctaatgtccaccattgtgtcgatgaaatcgaatagctggctaatgtcatacgtaatggtcggagtgtttggattgcggcgcttcaggtgctcctcgtagatcttgcacacgccctccatgcactcgttgacgctctcgtagtcacagtaagtgcgggtctccggacgagcacccggctgtaccaataggatggtgtgcgacatggtgatctgcaaggcaaaaatggaacattaatgttattggcggtgatctatgtactcaagcgatatgtatgtatgtatgttactagtgtgcgtttcattacattacgtttcatcttcatcacttacatccttttttttaacaagcgttttttctatagcaaagtccgaaagattccgagactctcgaagttgaagtttacttcgccagctctgcaaaaattgtgcataaatatttattagaagcatagagagctgtcagcaaaaaaaaaaaagacaaaaaaaaaaggaaaagaacaaaaacgaaagagatggaagagatatgctgttgccgcatgcaacgcatcgccccatctcgctcgcgctctcgccgcaacaccaatacacgcgcaccacacatgctggccagcagaacgctctttgattttccaatttgcaactgggaaatagactaagatggcacttccagcatggaaaacgagtaatttgtgtgtgaagcgaatgttggcaatggagaaatgcgtacatttgtacaagataatgcacgcttatgccgcttcactaaaacacaaacattcggaagcgcgaacagacacgcacacacatgtacaaggagtaacggccgccgcgtgtgtgtaactaactgtatgcaatcacttgtttttcttccttttcaccgatttttctcgaattttaaataattcccatgtctcccgtttagtgttcaacttacccgttcgaacgccggactatatggactatgataatatgctgattcagtaaagagattcggtaaaatcagcgcttgattcgtttttttttattttgccagttctatgggttttgaagaggaggctgaagctagagatgagcgcttcgctgcgtgcctcgccgtgacaaaataatcgaaagatatcgattaatactaacatcttttatttgatatacattgtttaataatatttaccaaattaaatgacaattgtgattttttatacttaattgtatcaatgtatacttgcatttcaatttgtatatgtatttgattccatattatgttcattcacttttttattgaaaagcacactttatgtatattacgcctttaggtataaagcatgtttttcaatgcatattttcatttcatttggcgtaattcattccatatttagtcttcagattttttaaataaaattaactaaagcttttaacatatactcatcatagtaatacattacaataactacggaaattatttatttattatttttattttatatatttataaaaaaattataattataatgtcaaattaaagtggattgcattatttatttaggttcattttattttgttattacatataaatattaggtattacgtttatttaagttagaataaaattaacgcccatcaacaaattatggtcattaaagtctttatgaagtaaacttaatgtacaatcattttcacttaaagtgcatattaaaaagcatatttttacattttttagtattgtatttaatataaagtcaaaagttacttttaatgaaacaaaactatcgcccatcgccagctccgcagtctggccactgttctcactgttcccagtgctgccagacagcggcaatcgaagatccgagtgcccaccagctgtttgatctcaattggaccaattggaagagcgcggtgtcgcgggcagcgcagtcgagcggcggcagagcgatcggcaaagaaatcaacaacaaaaagcaaaatctcgtctcaacattatttacgtgctttttgttttagtgaaaagtgaaggcgcagccgcagcagcccgtgtttcg

SEQ ID NO: 22337 - DNA, 541 bp, DROSOPHILA
ctggcaaaataaaaaaaaacgaatcaagcgctgattttaccgaatctctttactgaatcagcatattatcatagtccatatagtccggcgttcgaacggatcaccatgtcgcacaccatcctattggtacagccgggtgctcgtccggagacccgcacttactgtgactacgagagcgtcaacgagtgcatggagggcgtgtgcaagatctacgaggagcacctgaagcgccgcaatccaaacactccgaccattacgtatgacattagccagctattcgatttcatcgacacaatggtggacattagctgcatggtttaccagaagagcaccaatacctatgcgccctacaataaggattggatcaaggagaagatctatgtgctgctccgtcaggcggcatttagttccaatacctaaagggacggcgatgcgacaagatacatacatataaaaccaaataacacgatgatgcatgcatcaatgcgtgcaacactaacgacaacaacacgttgatgtatgcaacaatgcgtgcaatagc

SEQ ID NO: 22338 - protein, 104 aa, DROSOPHILA; identical to SEQ ID NO: 2667

SEQ ID NO: 22339 - DNA, 4034 bp, DROSOPHILA
gtaccactgccacaacgtcttcctcttcttcgctgctctctcgcggaggtggtggtgggcaactcgctcgtttgccagcgaatcggaatcggcgggggcgatattttggtatttttaaacagatattttaattttattttattattatttttttatttactgtatgatatttatttataatatgatattaatgtatgtataatttaaataatacatttaaaatatcactttttatttttttcttttttaataaatatttgttacacagtgtaccttaattgcttttagtgttttttttttctttcatgttctttattatatcttcgaatttacggttttccaacttgttgattcaaaatacttcataatctaattggaactacttgttgacattaagttggattttttgattttttagaaaccacttgatgatttcataagataagttgacagaacagctctaaaaacagctgccttagccttagccaaatttttggttgctgttatgtaatttttcatgtttcactgcgctgttatcacaaaaaaagattttaatttttattattgaattcttttcgaaatatctataaaattcttaaaagccttgaaaaaggattttcaaaaagtaaaaataagtacaattatcgcagttcacaaaataaccttcgattgcttatatcacaggtcaatattataattttatttttatttttgctaattgtttttatatatatattatttaaaaaaaaatatataaaattattttgtctcactgatgaatagatttttccgctggtctggcatccttctcgcccgtttttcgcacacttatcgataacagctgaccacccgttaatgattcgccaacaaaaaaaacctagcaacgcataaacaaatgcgagaaaaaaccccctttattgatttccactaagtgcggtcagcgcaaatagtggttaatagctttcactagacgaggaataaagccaggacgtagatcgccatgccgcaggaggaggcaaatgcgggaacaacggcccaactcgatgacgaaatcgagaatgtgcgtgtggtggtgcgaacgcgacccatggacaaaaatgagttgtccgcgggagcgctaagtgcgatttcggtggataagatcaaccgggccattacggtgatgaaaccgaatgccaccgccaatgaaccgccgaaaacgtactacttcgacaatgtattcgatggtggctccaatcaaatggatctctatgtggacaccgctcgtccgattgtggacaaggtgctggagggctataatggcaccatcttggcctacggacaaacgggcaccggcaagacgtataccatgtcggggaatccggattcgccgcaaacaaagggcatcattccgaatgcatttgcgcacatctttggtcacattgctaaggccaaggagaatcagaagttcctggtgcgcgtcagctacatggagatctataacgaagaggtgcgggatctactgggcaaggatgtgggcaagagcctggaggtcaaggagcgaccggacatcggtgtctttgttaaggatctcagtggctatgtggtgcacaacgccgatgatctggagaacatcatgcgtttgggtaacaaaaatcgtgccgtgggagccaccaaaatgaaccaggagagctcccgctcccatgccattttctccattactgtggagagaagtgagctgggcgaaggtgatgtccagcacgtaaggatgggtaaactacagctggtggatctcgccggctccgaaaggcagtcgaagacccaggccagtggacagagacttaaagaggccaccaagattaatctttcgctatcggtgctgggaaatgtgatcagtgctttggtggatggaaaaagcacccacataccgtatcggaactccaagttaactcgacttctgcaggactccctcggtggtaactccaagaccgtcatgtgtgccaccattagtccagcggatagcaattatatggaaactatatccacacttcgctatgctagtcgtgctaagaatatccaaaatcgcatgcacatcaatgaggaacccaaggatgctttgcttcgtcactttcaggaggagattgcccgacttcgcaagcaattggaggagggcgacagcttggaggaggagccaccgagctccgaagaggaggaggatacagcagatgacgaactggaggcaccactggagatcgaattggaatcatcaacgatccaggctgtggagaaaaaacccaagaagaagcgcgagaaaaccgatgccgaaaaggaggaactggccaagcgcaaaaacgagcatcagaaggaaatcgagcatgctaagacggagcaggaaacacttcgcaataaactagtctcattggaaggtaaaattctcgttggcggcgagaatctgctggagaaagcccagacgcaagagctgctgctagagcaatccattgcggagctggaacaacatgaaaagtccgaggaggcgctgaagcaaactctacagcaaaaggccaccgaaaggattgacattgaggagcgttactccacgcttcaagatgccagcactggcattaccaagaagatacaccgggtgatgcagatgctgatgggcgtgaaatcggagctggcggatcagcagcaggagcaccagcgcgaaaaggagggcatatacgagaatatcaggagcctatccagggaattggccttatgtgagctggtattaaattcctatgtgcccaaggagtaccaatcgatgattaatcagtatacgcactggaacgaggacatcggcgagtggcagctgaagtgtgtggcctacacgggtaacaatatgaggaaacacatctcggcgcacaagacgagtggcaaggagccagatttcctcgatctctcacatgtctatctcagctacaacaccgatggcgtgtccaatccaatgcgctccaaatccgccaggccgcgaacctcgggtgtgcccagaccgacgactgccaggcgatattgaagctagtgttggaaggacaatcgactgctagtccagctgcatgtcctcggcggtctgcgcgtccaattttggtttctgctcctgctaatcttgattttctacagcctcagattcatttgctcagcgaatttcctttttgttagaccttagtttttgttgatttattgcttaggacatactttttaggttgaacaacggtgcaatatatttactactgtgtttgtaattttactttctaacttatatttattttataatacttacaactaagtagtaacaagattttacccgattaggcacaaatatataactattgtgtgctcttggcttttaaataaaaatatgatactcacacgtaattattttatattcttacttcaaggaattatgcgtaatttctttttattttttagcagcttgaaagcatgctttaaattttccgggcttgctgaagaaaactgaaatttggccgacctactcataacaggttccatagtgtagcggttatcacgtctgctttacacgcagaaggtctccggttcgatcccggatggaaccacgttgacaaaagtatatatttttttaaattcattatatgtttattaatttttattacgacagaaaacataaattcaagttttttattcccacaaaatactaaataatacttaagtaaaaacaactgatttttgtgtatactatgaacacgaaagaattatatataacatattatatacttttgtttgctaaaactccacttagtaagcgtttaaaaaaataaaaataaaaaaaagttacttcctcctggttccatccgggatcgaaccggagaccttctgcgtgtaaagcagacgtgataaccgctacactatggaaccagatgccaatcgcttgacacaacgcaaacaaagcacagcgccaaaaaaggttctaaggcaaaatgaaaaaagtcaatcgtaaggaatttaaaaatctgggttgctgataatttaaaattaaa

SEQ ID NO: 22340 - DNA, 2034 bp, DROSOPHILA
atgccgcaggaggaggcaaatgcgggaacaacggcccaactcgatgacgaaatcgagaatgtgcgtgtggtggtgcgaacgcgacccatggacaaaaatgagttgtccgcgggagcgctaagtgcgatttcggtggataagatcaaccgggccattacggtgatgaaaccgaatgccaccgccaatgaaccgccgaaaacgtactacttcgacaatgtattcgatggtggctccaatcaaatggatctctatgtggacaccgctcgtccgattgtggacaaggtgctggagggctataatggcaccatcttggcctacggacaaacgggcaccggcaagacgtataccatgtcggggaatccggattcgccgcaaacaaagggcatcattccgaatgcatttgcgcacatctttggtcacattgctaaggccaaggagaatcagaagttcctggtgcgcgtcagctacatggagatctataacgaagaggtgcgggatctactgggcaaggatgtgggcaagagcctggaggtcaaggagcgaccggacatcggtgtctttgttaaggatctcagtggctatgtggtgcacaacgccgatgatctggagaacatcatgcgtttgggtaacaaaaatcgtgccgtgggagccaccaaaatgaaccaggagagctcccgctcccatgccattttctccattactgtggagagaagtgagctgggcgaaggtgatgtccagcacgtaaggatgggtaaactacagctggtggatctcgccggctccgaaaggcagtcgaagacccaggccagtggacagagacttaaagaggccaccaagattaatctttcgctatcggtgctgggaaatgtgatcagtgctttggtggatggaaaaagcacccacataccgtatcggaactccaagttaactcgacttctgcaggactccctcggtggtaactccaagaccgtcatgtgtgccaccattagtccagcggatagcaattatatggaaactatatccacacttcgctatgctagtcgtgctaagaatatccaaaatcgcatgcacatcaatgaggaacccaaggatgctttgcttcgtcactttcaggaggagattgcccgacttcgcaagcaattggaggagggcgacagcttggaggaggagccaccgagctccgaagaggaggaggatacagcagatgacgaactggaggcaccactggagatcgaattggaatcatcaacgatccaggctgtggagaaaaaacccaagaagaagcgcgagaaaaccgatgccgaaaaggaggaactggccaagcgcaaaaacgagcatcagaaggaaatcgagcatgctaagacggagcaggaaacacttcgcaataaactagtctcattggaaggtaaaattctcgttggcggcgagaatctgctggagaaagcccagacgcaagagctgctgctagagcaatccattgcggagctggaacaacatgaaaagtccgaggaggcgctgaagcaaactctacagcaaaaggccaccgaaaggattgacattgaggagcgttactccacgcttcaagatgccagcactggcattaccaagaagatacaccgggtgatgcagatgctgatgggcgtgaaatcggagctggcggatcagcagcaggagcaccagcgcgaaaaggagggcatatacgagaatatcaggagcctatccagggaattggccttatgtgagctggtattaaattcctatgtgcccaaggagtaccaatcgatgattaatcagtatacgcactggaacgaggacatcggcgagtggcagctgaagtgtgtggcctacacgggtaacaatatgaggaaacacatctcggcgcacaagacgagtggcaaggagccagatttcctcgatctctcacatgtctatctcagctacaacaccgatggcgtgtccaatccaatgcgctccaaatccgccaggccgcgaacctcgggtgtgcccagaccgacgactgccaggcgatattga

SEQ ID NO: 22341 - protein, 677 aa, DROSOPHILA
MPQEEANAGTTAQLDDEIENVRVVVRTRPMDKNELSAGALSAISVDKINRAITVMKPNATANEPPKTYYFDNVFDGGSNQMDLYVDTARPIVDKVLEGYNGTILAYGQTGTGKTYTMSGNPDSPQTKGIIPNAFAHIFGHIAKAKENQKFLVRVSYMEIYNEEVRDLLGKDVGKSLEVKERPDIGVFVKDLSGYVVHNADDLENIMRLGNKNRAVGATKMNQESSRSHAIFSITVERSELGEGDVQHVRMGKLQLVDLAGSERQSKTQASGQRLKEATKINLSLSVLGNVISALVDGKSTHIPYRNSKLTRLLQDSLGGNSKTVMCATISPADSNYMETISTLRYASRAKNIQNRMHINEEPKDALLRHFQEEIARLRKQLEEGDSLEEEPPSSEEEEDTADDELEAPLEIELESSTIQAVEKKPKKKREKTDAEKEELAKRKNEHQKEIEHAKTEQETLRNKLVSLEGKILVGGENLLEKAQTQELLLEQSIAELEQHEKSEEALKQTLQQKATERIDIEERYSTLQDASTGITKKIHRVMQMLMGVKSELADQQQEHQREKEGIYENIRSLSRELALCELVLNSYVPKEYQSMINQYTHWNEDIGEWQLKCVAYTGNNMRKHISAHKTSGKEPDFLDLSHVYLSYNTDGVSNPMRSKSARPRTSGVPRPTTARRY

SEQ ID NO: 22342 - DNA, 13673 bp, DROSOPHILA
taaggcaaaatgaaaaaagtcaatcgtaaggaatttaaaaatctgggttgctgataatttaaaattaaaataaacccaagaatgtgaaagctttaagtcgaacgataaataagaatgtcataatttaatagtcctttcttctttttttgatgttcgtttcgcttaaatgccgtccgttcaggtgttatttcgataccggattactcatcccacctgcaggggatgcgattgtttgggcaggtaagcctgcgataaggaaagcaaactgtacttttatccattatttatttacctttgtgcgaatttctacgcctgtcgcagcttagattttaggctacccaaatgaatctggctgaaagcatttccgctttatcagtttgctcttatcgccgcacgttttgtttgcccatttagctgcagctagttgcgaattggggggcggagctccactcagcggacagcggtatcgcagtaagacgtcacgaataactgttcaatttacatatattcacattaaaccaatctgccaagtgaaaaagagaattgcgttgccaggtgaaagaaaaagatcggagtgaaaaatcaccgagagcaaggtaaagttactcactccactggcagccaattgagtggaaacaaataaccgaaacaccaagctacaaggaaatagtaatcatgatcaatcatgaagctatcggttttattaggacttttttagaaacttgaatatcagatagcaggttcattttaatttagtatatatttctgtataaaataaacaagattcacatagcatttcatatagactatatattaaattcaacaccatattcaaaataaatgactgttttgttgtcgagtgtagttgagtggttgctctcgcactttcggcggacagaccgaaccgagcgatcgtaaaactcttcggccccaggcccacaatatcagtctgtccgctgcgcatagtcgaaacggaaggaaaatcgctttaattctctgtgatctgtgtttgcgtgttgaactcgagttttcagttcgttgttatctgttcaatttcatttggatgtgcaattgccgacgctaaaaatatatacgtaacgcgtgcaagaaattgagagtattgcccgacgctcaactaaattacaaaaaagaaattttatttcatatataaacgccacgttctcgcgttctaacaaactccccaataaaaaacacactcaagcagcacattacatatactcgaccacgctgtataattagttactagccgttgatatttccaatacgccgcatagcaacaataaccatatcaaacatttcgataatctgatgtgacacaagtttttgcatcgaaatagccgtgtgtgtgtgtgtgtgtgtgtttggttcccattcgccgccaatcaaaccaatcgcattgagagtgtaatccgggaaaagttatacacacctaaacctgcgccttttcaatgtagcccttcatggataattaacacgtgagcgttgtgtgactatatagcaaaatcgtgttaaaatcgtgttcgcagtggctgaatttagcagcgatccaacgaatagtgtcatctcgaacccagacaccccccacaccccctgcgaatttctcttatttgtcggcgcggaatttgcctgagtcacgagccatttcaattttccggtaagttgtcttcgctctcaatctcgatctcattccgaaaccgaatcggtagaagagtgctgaactcgagtgttaagtgttaactgttagtgaaaacacttccattgtatcatttattgacctcgaaatgccatcgcaaaaatcaggaacgcgtcgcaatatctgtttaccgacaaaaatagggtcaacatattccgattgtctggggacgttttttcccatcattgtctgcgatagatagacatatgtataaggattatctggggatcggggttcgaaagacgacgagtcgcaataggggtgactgtcctttgagtgaaatgggttttccatttaaaagaagtggatcttgtcatattttcaaatgtaaaccaatttattctgagttcaaagaactcatagtttgatctttacgcttctggatttctttgacattctttaaaatagatcatagattttaaaaatagatagagtgaaccatcaaagcgtgtataaatatatttcgatgtatatttgttaaaaatatattttcttcttttccaaactaaaatgtgctatttgtgtgagctgctttcggcactcaacagtttttcactaaaagtttaatttctacatatgcgaatttttttgtgatatttttattttccgcatactcttatcaaagttcagaggggaaataccaatggtgccgcttatttttagctcttgtcgcctcttcggaagcactgattaagttccgtgaatgactctgccgctatcggttatcggctagactttaccccgaagttgaggcagccgttaaataacaacttccacatatatttcagatatctgtatctgaatcgtaacagatcacatgagtgtcgggcaggcggttgacatgggtgaggacccagtaaacagagctccacgcgagatactcactgaacttcaagcgtaggtttgccaaataaacatgtcatataacaattaagacatagggcatccaaaaatacatcgtacttgacgtatttacgtagattatccgaccgttttagtgtcttttccgctgaaacatcaccattatctccagtagataacgcttttttttttgcacggcatatgaggattccaaacatatcaaaatcggtggcggtttagttcaagctatacacctgagcagttcggtttggccaacaagcaaagtttaagaaaaagttcattgaaaagtaaacctctacgaaatgagaaccttgccaacgagtacgattctgtttgcttgaacaaaagtaagagttcaacctcaaaagccaatggcctagaatacaagctccacaaaaaatactatataagaaaaccaagacaaaacttctcaagttacctcaaaaaaagaaaaaacgatcgtcgtggaacaaaggggtaattttgccgcctagcaacaagtttttttttttgcccctgttccgctgcgcatgcgcggctcatttcaatgaatgttcttcgaagtctcttcggtctgagcaaacaaataaaggcaataaaaactattaagcaagaggggggcaggtctttccgagaagtggccaggcggcccggcggcatctcctgctcacattctcgtgttcccacagcgccagacaaatgaggtcaaaatccttgaggttcttgtccttactgcctgagcgtacagtagagactccctacctctaactgacctcaatagattactgttcgaaaatatagttttcaatgaaattgatttcaatataaattatataggtgacatctttaagaacgattaactaattagctcaaatatgatttagcttagagcagttaaagttatagaatgtctactgtatataagctacaaggaatgcagacgatccaagaagaagaacaggaaggcacagagcaatgaaccagtatgaataaagggaatgtttaaacaggctatctagagactgtagaaaatccacccttttgtacagatcacttttagctttgatattgaccgacaattgtcaataaaatggcttgggaaaaccaaaagagataaagactaatcaaggttatccccgccattcgatttgcgctctagaaatgtgaatatatgtatgcttgatttatgctcgagctctaaaatgtcgccatttcaattcatttcaattgagaacatgtcgccaagaatttttgttgttgattgaccccaaaatgagactcttatcaatttgccgagcaaagaaagtgaaatgcactagaaagcattgggtgagacaacgcaagagaggaagctgagtgccccacaattttcatgggaaaaccattttcaattgcgcactgcaatgcggctcaattaaatgtcaatttcaattgtaaaactgtagccaagcggaaacgcttgcctgtcagttagcagtttgcatggacaagtgtaaaatgcgcaaataaatcagccatactggccataaataaatctgaccaaagaaccttgcgtaattaacccaagacctcgcgttccccaacctatgaattttcccttcttaggcagagataactgactggctgtctatatggcgcatatagcacctgccaatccgagaaaaacccaagcgaaccgaacctcttcctcgaaaatggcggccaagttcaatagaacttttgattcggaaagacctggcacaaaaataaaagtattttcccaactataagatacccagttttaggattgtcccaattctttgccaaatgctttgtcataaaacgaaagttctgaattttattttcaaatatattgtggaaattccaaacattattttaaaagaacagctgatatgtgcgaacaattaatattcaaagaaaaatgtgaaatctatatatctcataccaaaaatatatgcataactaatttatttgattaagatagcaaagataattttcccaaattaccaagtaggaaaatttaccacatacccgtgaatttttcagctagcgggtatgaaaatttcgcacgattttcccgccatcatcggcgtggctagaaaaacccgagagaagacgaaagacgaaaagccgagcgccgaaaaagcaccgacagtttcggtggcaacgtcaaggcattcgcacgatccgaacagaaactgggcgatcgggctaagagattgacgtaaaggagattccgctgtatcttcaagatacttatttggtgcagatttttccggttaatgtgaaatacaaacaatcttaatacaaattaagtcgcaatcccatcgtatttccagttaattgcagttaattattaagccaaatagattttggtaagtgacttttcgaaaggggtaaacgaacttatcaaccgtgggattccttcaaataaccggtttcggttgcatcagaattttgtgaaccgattagattttgaaaggtctcaaaaatgtgtatatgtaacaattagtttgctgtgccattgacattcaacaataaaaccatattgcgacttagtgaaggaaaataaatactttaaaaatgaaaatgcatcacaactgttaaagaacacagatcaaatacaaaaacattttcttattaataatttagtactgtacagttttatggtgatgttcttatataaaggtcagcccttcaaaagggcgtaccattcaagttatatcacttacttatatcatgagttcgatagatcaccttcctctgggaaaagagattcatttggggacaatgaaattgctttgaatatgcctaattattcacgaattcaaagcgatcgcagattatgaacacaatattgtccgccgatttcattagcatatactaattcagaatttcccgcacaagcccctagctaatcaaattgttgccatattctataatctgattaaatcagcgaactgaacgtatcattcacaactcagtttgcaatcatctggatgggttgttagcatctcgattatcattcgattggagcgtgttggatcgaatcagctgagatgagtggacacggtagtatctggatggaattctacgcctttggcttattacaatgccctgttcactgttcagacgatcccccataaattcagcgcccttctccaaactatctaacctgtctcgtccacgtgcggaccatagaaattccgactgttctgatccccagatcacccagaatcgccagattcgccagtccagacgtcgcgacgcggcgcttgtggttttgtctgtctgtcagtagtctaaacactggacagggctccagtcggaaaatgtgcagttccaacaaaagataatgtatctgcattgcaggaaaaataaatggataaaagcgaatgaactaagatatattgatattatatatatcagattaagtatgttaaaagatttaatattatagggcttgcttctgtttctcgatagaatagaatcaatagaacttgtaggattaaagtaaaatcgatatatattatagcatatttgtgctcagtgtatgccctcgcagtgcggcgctgtctggctttacaaaacgggtgcacttgcaacttagttgtccccggcatcagtttacacggcactcactccagactttagactcggcagcggtgatgggctcatcaaaatctgtggcgttgtcaactgaatggcggcgcgtggcagcggccaagttagcaattttcgcgttacctgaatcgaaagccatggaaaagcgaacacacggccaaaatgattttgcagcgttgacgatccgtgcggattcattcagtgattcccacaatcgttggggagtgaattgaattggttatccaatatgctaatgatggcattatttcctgaataacacacgtggcacgttcggtgatcgacatgcctctatattccacttaatgccacatgtggcgttcggaattctacgaaagattatgaatttgttgtggaggaattgagcagtgtagacataataaaatatatagcaagaatgtgggttatattcaagtgtttacttcgtgcgcatatatattttaaatggatgaacaatagaaattattggcagccatcaaaagtttccgtttccaatggaaaatcattaataatcgtgaaaataagtaaatatacgctggaattatggaaaagtttttagagaatttgtgggtggtttctatttagttcataaatttccaaaattgatgtgctacttacttattgttgaaaaaagaaattagcaagatcaatactttcttcatttttacccattaaatttcctcggttgtatggaaaatttaatcgcggctagactaagaattatcttatcagagaaaattatatagaactccgctgattgaacttacgttcttaatatgccaaaagctagacacgcatatctaaatattgatctcataaatatgctgacaatcttatcaatattcttcacttggcgacaagcgaaagtttaggtgcggacggcatgtgtaaactatttactccgactaagttttgattgatcaactgacaaacatacatacataagtgcatatgataattttgtcagggctatgaaaacaatggcactacttagctcggtagcgcacagtgaggatttatatggatacatatggatatggaaaacaaaacaactgtgtttgcacagcgataatgataatagcgttaatcgagttaagtagttaaatgagacgcaaagacgtcagtgcgatctcatcacaacctttccccacttttatgctccccgcgctattttggatctcaagtttgcatttagctttcctgacatgccgctaatgcgtcagttgaggtttacttcgaacttttcagttgtatctgtctatatactgtgtctactatatagtagtatacccatgatattgacagctttgttgtgggttgcagccttccatgagggcaagtcaattaagttctgttatggattacctttaatatgtttaaaaatataaacctactactatggcatcgattgatgtgttgaggctgactcttttccttaaatcttgattgctgtttattttcacagcgaactgaaatggaaatgagtgaaatgaaagaatttccgttagtacttgtgatatttttttcgaatttgcaattccaaatgtttacactgggcctttaaataattgcttatagctcactgggttagtcacacatccgaaagcattacttcattaagagtcttccaaacaggtgatttgcaatgatttgcttgaaaattcaactatatctgcttaaaggtgctatttaaataagctttaaaaaaggtgcgcaaggtgtaattaaaattgttttacaaaaatagctcagttgccaggcatttcagttaaatgacctacgttacagtacttggaactgaaatttttactgaaaattcattaatataaatactcaatgccataagttctaggcccctccatgtgtcataataattaagtgttttgtcataaaaaattccatgtcttaagattattaatcgcaattaagactataacacttattatactatgaataattaggaaaaagattattagaatatggaaatatctattgatagatcgatgatggatttctcagaactttattacgaaccttccatacttcaacaaaaggccaccagccaattggcgatcgtatatcatatcgcatatccaaccagtaattgccatgatcaacattttgtgacaaaataagccaataataataagcgcgtgcgcctgctcagtgatgtccattataatccaaaataaacagaataaactccagactccttactatatgtcggcagaaatcagacaaatcacgagacttgcgaccatttggataaataaagaaagatacgaattaataatgcgttgaccgaatgtctgagaaaatgtttggatcaatatcaaattcactaatgagttggtttcctttttttcagttcttcaaatgggttgacttgtgatattgctgcttcctggacccgggaaacaaaaggtaagacttatgtttataacacgtttttacacctgttataagcatcaaattagtcgtaaattaataccaaatatccatataaatatttgcgttttcatataaccaaaagtcacgagaattttgctatacatttagaaacaatcagagaaaacaatacgcattcgataaaaatttttaattgtatcagcgtgccgactgattgatgttaataccattcagaattgttcaaaaatttgcaaagaaaacaaaatgctcgtatagtgtactaatactgatggtttggaatgtttgccccacgtgtccgatgtacacaaatgcgtattgtttacgccagattataatagtactggtttaatttggaatttccgattagaatttccaatttacattatggattaagcaagatcttcaatgtgcttttggcattggctttgaaattgtaatatttatagacgccagagcaatttgcctttttgtaatcataatgttgtttattaattaactaaggacagaccccacaagacaggctaactaactgattgaaagttttccgctgtttcccagcttcaccttcattgcgctcttgtggattattttattatgtagatttttctgcaagatctgtagaggcacctgcttatctttgttcgcacactgcttaccatttgcccagctgctgttttagccatatagcaattcggccactcgacgagttctattcgagccataaaaataatttattagttttacaaatgcttaaatttgtttacctctctctcgctctctggatttgcaaaaaaaaaaaaaaaagaaatttccttcgccaaatgtagcgaaagtgtgagataaacgcttgggattacgagtatggaatcagatcagggaaagtgtgttaatattggaaatggttcaagggcggaactttggaagattccggtacggtttataatatttaatgagtgtgtagtaataaacacaaatcattagatttgtttgtttagtaaatatttacatcgatgaatggatgttattgtatatgggcatgcataaatattccatcgagacgtcatagtctctgctttatgagcatattttcaaatatattaattatggttgttcttttccagggatacaaattgaacctcaaaagacatagccaagctgcaataaaaccatcgccaaaccaccgccgccatttaaagtcaatagttagcacgaatataaccacctagaaaccgttggaatctctgcttgaaagcagcgcaccacccatgaaccaatcggccaaggcgctcaacagcgtggccaccgagatcagcacctcctgctcctccagcaccttcaccaaccatccacagaaccacctgcacactggccacctgattgcccatcgtcttggacactcctacgccgctcgtgccgatcacaattatctgggataagttctgcaattggaatctgactggtgaaacacgtttctcgagaggattttccatttttgcatcgtagcagcttcacgacggccggcacaatgttaaaagtcgttggtgcatcgtggcaaaaaacgcggatagggacctacatcctaatcggtgctggtctcttggtcatcggagccttcttcattggatatatggagaggccggagtacgatggcacctactgtgccaccgctctgtggaccaagcaggtgggcttccagattgaaaactggaagcagcagaatgatctggtcaacattcccacgggtgttggcaggatttgttataaggattcggtttatgagaatgggtgggtgttaaagcacataacaattcgcttatcatgattctaatatgccattgttattccgtagttgggcccaaatcgaagtggagacgcaaagaacttatccggattgggtgcaggcctatgccgccggaatgctggagggctcgctgacctggaggaacatctacaatcagtggtccaagtaagataactctatatctattttttcttgatattaatatatatttttttacgatttcagtaccatttcctcttcttgcgagcgcgatgaaagcacccagaaattctgcggttggctcagggaccttttgaccaccaactaccatcgcctgaagaggcagactgaaaaggctgagaatgatcactactggcatcagctgcatctgttcatcacccagctggagggcctggaaactggctacaagcgaggagcatcccgggcacgatccgacttggaggaggagataccattttccgattttctgctgatgaacgccgctgccgatattcaggatctcaagatctattacgagaactatgagctgcagaatagtacggaacataccgaggaacccggaacggatcagccaaagaacttctttctgccgagtgccaccatgctgacgaagatcgtccaggaggaggagtcgccgcaggtactacagttgctctttggtcacagcacggctggaagttactcctccatgttgagaatccagaagcggtacaagtttcactatcacttctcgtcgaaactgcggagtaacacggtgcccggtgtggatatcactttcactggttatcctggcattctcggatccaccgatgacttctacaccatcaagggtcgtcatctgcatgcaatcgtaggaggagtgggcatcaagaacgagaatctgcagctgtggaagacggtggatccgaagaagatggtgcccttggtggctcgtgtaatggccgccaatcggatatcccagaatcgtcagacttgggccagtgccatgtccagacatccatttacgggagccaagcagtggatcaccgttgatctgaacaagatgaaggtgcaggataatctgtacaatgtccttgaaggcgatgacaagcatgacgatgctccagtagtgctgaacgaaaaggataggacagccatccagcagaggcacgatcagctaagggatatggtttggattgccgagcagctgccgggcatgatgaccaaaaaggatgttactcagggattcctggtgcccggcaacacgtcctggctggccaatggagtgccgtatttcaaaaatgtcctggagctaagcggcgtcaactacagcgaggatcaacagctgacggtggccgatgaggaggagctgaccagtctggcgtcggtggataagtatttgcggactcatggattccgtggtgatctgctgggcagccaggagtcgattgcctatggcaacatagatctgaaattgttctcctacaatgcccgactgggcatcagcgatttccatgcctttgcgggtccagtctttctgagattccaacatactcagcccaggactctggaggatgagggccaggatggtggtgttccacccgccgcatccatgggcgacgaacggctcagcgtgagcatcgaggatgcagatagtctggcggaaatggaactcatcacggaacggcgatctgtgcgaaatgatatgagagccattgccatgcgaaagattggcagcggacccttcaagtggtcagagatgagtcccgtggaggagggcggtggccatgaggggcatcctgatgagtggaactttgacaaggtctcgccgaagtgggcgtggtaggcgctgaggagcaggtttcttcttttaacccgtagaacccaatcgaatttgtacccaaaacccacctccatccattttgaaaactggaaagcaataattgtcctagatttggtaattagtgtcctgtcttgtctcgtataatttgtgtgttcctagttggtacatatcttacgtccatagtcttctagtgtctactgtacttatgtatgtatgcgtgtccaatcgattattgtcttccagctgtacagctttttattttccgtaggtcttttgtaaattagcaacgaaattggaaatatattttttagcaacaaatttttgtactttagtaactattaacaaattgtaaagaaaataaaaacaaaatcatgaaaaacaacagaatgtgtttgaattccattactgcaaaggtcaataatgattttggaataaatttgcattttttattagacttcatgtaaattactaatctaatttttgtaacttttgaaaagtttgtgcttagctaaggcaaaaaccaatcaagaactatttaagccaaaagctttgccgagagcttttgaaatagaattggtaaatgttccatctaattaaattaatatgatactacctaatgccaacaattttaaaataccgcaagcgcttaaatattttatattgatttattgaaaatataaaaaggtaaatgtttaataagtaatgatatttttgatctataatctatgtaaaagtaacactaccaggtatacttaacacaagtttatattaacatgcgttatacattttaattgtttagcactgctctaattggccagcccaagttaactcctccttttgcttactttactttacagttactttcattgggggccttcctattggccctagtcgatttgccaatcagctttggccacacccctttgccaacttttaattggtcagttcgtttccgctcctttttgctatcaaatttaaagttaattaatcaggttactttcacttttaaatgtaaataacaaatactttagaaaaatattaaagaagctgatcaaaactcatactttttgtctcaaaaagcatataaagtgctagttgatttttcgcacgcgccttaactgcgtgtcttaaactttctttcgaccctttgtctcaattacactccaattcttcgcaggatgaaggaccacagtaaagtacgagctggaagttgtcaaaaacaattcgaagaggagccccgcaccaattaccaaactcaaatagatctatttcgaaattcaatttgccctcgtagctcgcaaccagggcagccaacaaacgaggccaattactttaaaatatttcgttgagcaaacttggtcgacaagtttcgaaaaacaaaa

SEQ ID NO: 22343 - DNA, 3491 bp, DROSOPHILA
gatctgtgtttgcgtgttgaactcgagttttcagttcgttgttatctgttcaatttcatttggatgtgcaattgccgacgctaaaaatatatacgtaacgcgtgcaagaaattgagagtattgcccgacgctcaactaaattacaaaaaagaaattttatttcatatataaacgccacgttctcgcgttctaacaaactccccaataaaaaacacactcaagcagcacattacatatactcgaccacgctgtataattagttactagccgttgatatttccaatacgccgcatagcaacaataaccatatcaaacatttcgataatctgatgtgacacaagtttttgcatcgaaatagccgtgtgtgtgtgtgtgtgtgtgtttggttcccattcgccgccaatcaaaccaatcgcattgagagtgtaatccgggaaaagttatacacacctaaacctgcgccttttcaatgtagcccttcatggataattaacacgtgagcgttgtgtgactatatagcaaaatcgtgttaaaatcgtgttcgcagtggctgaatttagcagcgatccaacgaatagtgtcatctcgaacccagacaccccccacaccccctgcgaatttctcttatttgtcggcgcggaatttgcctgagtcacgagccatttcaattttccgttcttcaaatgggttgacttgtgatattgctgcttcctggacccgggaaacaaaagggatacaaattgaacctcaaaagacatagccaagctgcaataaaaccatcgccaaaccaccgccgccatttaaagtcaatagttagcacgaatataaccacctagaaaccgttggaatctctgcttgaaagcagcgcaccacccatgaaccaatcggccaaggcgctcaacagcgtggccaccgagatcagcacctcctgctcctccagcaccttcaccaaccatccacagaaccacctgcacactggccacctgattgcccatcgtcttggacactcctacgccgctcgtgccgatcacaattatctgggataagttctgcaattggaatctgactggtgaaacacgtttctcgagaggattttccatttttgcatcgtagcagcttcacgacggccggcacaatgttaaaagtcgttggtgcatcgtggcaaaaaacgcggatagggacctacatcctaatcggtgctggtctcttggtcatcggagccttcttcattggatatatggagaggccggagtacgatggcacctactgtgccaccgctctgtggaccaagcaggtgggcttccagattgaaaactggaagcagcagaatgatctggtcaacattcccacgggtgttggcaggatttgttataaggattcggtttatgagaatggttgggcccaaatcgaagtggagacgcaaagaacttatccggattgggtgcaggcctatgccgccggaatgctggagggctcgctgacctggaggaacatctacaatcagtggtccaataccatttcctcttcttgcgagcgcgatgaaagcacccagaaattctgcggttggctcagggaccttttgaccaccaactaccatcgcctgaagaggcagactgaaaaggctgagaatgatcactactggcatcagctgcatctgttcatcacccagctggagggcctggaaactggctacaagcgaggagcatcccgggcacgatccgacttggaggaggagataccattttccgattttctgctgatgaacgccgctgccgatattcaggatctcaagatctattacgagaactatgagctgcagaatagtacggaacataccgaggaacccggaacggatcagccaaagaacttctttctgccgagtgccaccatgctgacgaagatcgtccaggaggaggagtcgccgcaggtactacagttgctctttggtcacagcacggctggaagttactcctccatgttgagaatccagaagcggtacaagtttcactatcacttctcgtcgaaactgcggagtaacacggtgcccggtgtggatatcactttcactggttatcctggcattctcggatccaccgatgacttctacaccatcaagggtcgtcatctgcatgcaatcgtaggaggagtgggcatcaagaacgagaatctgcagctgtggaagacggtggatccgaagaagatggtgcccttggtggctcgtgtaatggccgccaatcggatatcccagaatcgtcagacttgggccagtgccatgtccagacatccatttacgggagccaagcagtggatcaccgttgatctgaacaagatgaaggtgcaggataatctgtacaatgtccttgaaggcgatgacaagcatgacgatgctccagtagtgctgaacgaaaaggataggacagccatccagcagaggcacgatcagctaagggatatggtttggattgccgagcagctgccgggcatgatgaccaaaaaggatgttactcagggattcctggtgcccggcaacacgtcctggctggccaatggagtgccgtatttcaaaaatgtcctggagctaagcggcgtcaactacagcgaggatcaacagctgacggtggccgatgaggaggagctgaccagtctggcgtcggtggataagtatttgcggactcatggattccgtggtgatctgctgggcagccaggagtcgattgcctatggcaacatagatctgaaattgttctcctacaatgcccgactgggcatcagcgatttccatgcctttgcgggtccagtctttctgagattccaacatactcagcccaggactctggaggatgagggccaggatggtggtgttccacccgccgcatccatgggcgacgaacggctcagcgtgagcatcgaggatgcagatagtctggcggaaatggaactcatcacggaacggcgatctgtgcgaaatgatatgagagccattgccatgcgaaagattggcagcggacccttcaagtggtcagagatgagtcccgtggaggagggcggtggccatgaggggcatcctgatgagtggaactttgacaaggtctcgccgaagtgggcgtggtaggcgctgaggagcaggtttcttcttttaacccgtagaacccaatcgaatttgtacccaaaacccacctccatccattttgaaaactggaaagcaataattgtcctagatttggtaattagtgtcctgtcttgtctcgtataatttgtgtgttcctagttggtacatatcttacgtccatagtcttctagtgtctactgtacttatgtatgtatgcgtgtccaatcgattattgtcttccagctgtacagctttttattttccgtaggtcttttgtaaattagcaacgaaattggaaatatattttttagcaacaaatttttgtactttagtaactattaacaaattgtaaagaaaataaaaacaaaatcatgaaaaacaa

SEQ ID NO: 22344 - protein, 624 aa, DROSOPHILA
MERPEYDGTYCATALWTKQVGFQIENWKQQNDLVNIPTGVGRICYKDSVYENGWAQIEVETQRTYPDWVQAYAAGMLEGSLTWRNIYNQWSNTISSSCERDESTQKFCGWLRDLLTTNYHRLKRQTEKAENDHYWHQLHLFITQLEGLETGYKRGASRARSDLEEEIPFSDFLLMNAAADIQDLKIYYENYELQNSTEHTEEPGTDQPKNFFLPSATMLTKIVQEEESPQVLQLLFGHSTAGSYSSMLRIQKRYKFHYHFSSKLRSNTVPGVDITFTGYPGILGSTDDFYTIKGRHLHAIVGGVGIKNENLQLWKTVDPKKMVPLVARVMAANRISQNRQTWASAMSRHPFTGAKQWITVDLNKMKVQDNLYNVLEGDDKHDDAPVVLNEKDRTAIQQRHDQLRDMVWIAEQLPGMMTKKDVTQGFLVPGNTSWLANGVPYFKNVLELSGVNYSEDQQLTVADEEELTSLASVDKYLRTHGFRGDLLGSQESIAYGNIDLKLFSYNARLGISDFHAFAGPVFLRFQHTQPRTLEDEGQDGGVPPAASMGDERLSVSIEDADSLAEMELITERRSVRNDMRAIAMRKIGSGPFKWSEMSPVEEGGGHEGHPDEWNFDKVSPKWAW

SEQ ID NO: 22345 - DNA, 4352 bp, DROSOPHILA
ttcattccagccacaataactgacgtcgactgaggcgctgactaagcgcgaatgtttacaatttttgccgtattttcaccaccctcaacaacaagtttttctttttcccagaatttttattttcatgtggtccgccagcgtgttgttgttgctgccgtaagttgaaagctgtttaaatgaaagaacgttcccgtgaaaaaaagccaaagcaacgcctgttggccattagaggatgccaaatagatgttgcctacaaagcgagcacacctggagggattgcaaggagtctggtgaggggattggattgggctacctaaaaacgcagcaaacgagcaacatcagccccagattcgtaccacacaccgcccccatctcttagtattatgccgcagaagctttgaatagtttattatatggcaaacatatatacaacatatacaccaagagaaattggaaaaaccggtgtagtaaatatactatatcgtagatattatggtttattaattagatttgttttttattttaactttttattgatagataagatcgtatataaagatcccttaacaaattttaccatatcgtttgctgtgcattcgtataacacgcaggtaaaccggatttcgtcagttgaggaaggacgaagggtactacttacaaatgttgcctttgtgcgatttccatttcatgctttacatttttttttccatttttttcattttttttttgtgcgttgctgatgcttagaaagcaaatgcataaattatgatggaaattacacaatgcacaaaacattacacccccttaaaacgtgtaataccattgaaattagcaaaaaggaaatccagctaaaatgctcctttctttgctggccagtaatgatttttcaggtataaggataatgtggcactattggcccgattctctcatcgagagattagactgcctgcactgcaactgtcaggaaattgatggggaaaatggttagaagaaatccatatcattgccaggccgtggcagccgcatcagcgagagcaattttccactcaaatgcgtactcggttccctctggtttctcgattcccacagtttttcccccgtgatttttcacccattttcgtcccgcatttcccggatttaaaggacgctgcgtatgacacatgtcgattgcagtggcgccccctatcggccgcaaggcaaaaatggcgccttctatgtggaaagaagcatcagaatcaaaaatcatcagcctgagtccgatttgaatgagcgattgagtgagtgactgtgtgactgactgaatgactgactggcgagagtgcgaccgagtgagccgtttgattgcttgattgatgcacgaagctattgattgattgatgcctttgttgatctctgattgcttaaatgtttgcccaacactttttttttaacaggctatttcgaattgctttcgagtttcgaaggggtaatggtgactttctacgttttaagacttaaatcattttcgtaaaactgtacacttcagttaaataatagatattctaatattgtctgtattataaagatgcaatatgtatttgacttacgtttgaatagttctgggatctcggaatctgcggcggcaattgctgggcattcgatggccccctcatgctaacgcctccacctcccccgccgccctgctgctggtgtggcggtccgcccatctgttgctgttgctgagggggcggggctgggctgtatcgtgggtgcattttttctagtttcttaatagcactcttaaattgacttgtgactgcgaaaaggggagtaaatgagataatgcagattagaaagaatgagtcataattgtaaatattctataatcttaagacgttgcagatataaacatttgcattaattggagatacagtcttaactagaccccattttttatacagatcaactgctcaacctaaattaattatgacagtttgtttgtaattaattaaatcattattattattaaataataaaacaaagattatatattttaatgtataaaatgaggtcagtattttttctgctaattaaacttttcgtctatttttctaccacttttttacagcccaacccgtttgctctgactgccgcacggcaacactgttctctgcactcttctttctctctcccactctctatttttattgcttctttttagcattctgtgccatattcagcttattttgccgtgcttataatttgttattaatatttcactagcaactttgttgattattattagcaccacccgtcttaaattgttttttttacttgcaacggagcattcagcgagttattttagcactgtttctgtctctttcccgcgcggcagttgcaacatttgcattttggcattaaaaatagcacacagcacaggccagccaattttttttggtttgcaaatttatttatatgccgccagacagccacaaacacacaggaacacacaataatttattgatatgcggaggaaattattcaattgtttttacgctattgctttttatcaattgcacttgttgttgttgctattttttgttattgcttatttaaggacaatgacagcaaaatagagaaggagagcgcagtgcacaagagaaagagagtagagagagagagaacaaagagcgggtggaaagagcaccggcaaacaacaagtgagcaaagcaaaaggtgaaaaataaatttgcactgcgataagatttaaataattattgctctctctctctttctctcatttgactttttcgtttttcccagttgtattattgtttttcgtctgctgtgctgtgccgttcttatttttgtatttttatgccattgctttatgtattttttatcgagtgcattgctctaaaacaacaacattcgctttcaattagctgagagccgcaaatttgttgcttttgccattgttacgtctgctttgcggggcttccaaaggtagtttttcctcttgttcgatttgcttttggattttagctttgcctaaatgttgcttacttattgaaatttcgttttattgctggtttgtcagctgctgatggctcttcttcttgcttcttgttgcacgttctgttttttttttgcacacaaacacacgcactcacagtcgcacaaacacaacacacacacacaatctcacgcccacgcacactatttgcacttgaaagtaattcgactcgttttcgtttcgatttttcgcccttttattttgctgtcttcgttatttgtttgttgttccgtcacgcgttttaatttatatatttatgcaaaatattacaacgacaaaatataagtttgcgcagccgaaaaaaacgaagaaagcgcaacgcgacagcaatcggcaatggtatgagcttcttcttcttccttttctgccggcaatgctctcttcgctctctcgcttaatttacagcaatctacagtagcggaaaatagtctaggtgcgactcataatattaaatattttcttttactctatgtagtttaaacattgtgtaaaaaagaattttcagcggcgagtagcataataataaaggtcttaataaaatagcacaagaactttaacttcgggttggatatgtggccgtgtagcaaatatattctgtgtacatactcctttttccgctactgtatatatttcttctcttcaaattgtactctcttagaaaatttctcttcttattgcctcttattagcttgcgctttgctgtttaacgaaactctttcgggtttctactgtattatttataacaattttattaatttcatgcattatattttttttattttctggaataaaattcaagattattaattaaaaaatcgaaataacattgtaaatattcgaaaatatgcattgcatacaaagttttcgtcattacatttcgtcactaatcaaaaataaagatccgatttaaccaattaaaatcaccattttaaaagcctattttcagtgctaagtttatataactttcctttttcaaatttgatacacatggttgtcagttttcccaatcccattatatcagttcattacgcaaatggcgcaaaataaaaaaaaaaataaaataaaaacgtgtgcaccaaaaactgtaaagccagcaacagcatctagtgtgttattttgaaatatttaaataaaattaatattctcaacaagtgcgtcgcataaaagggcgacacacaccacacgtccttccgcccgcttttcaccaaccaccacccaccgccccatagcttttggcacataacaaaggactaagggactaaacaaatgatgcatgatgacgacaacgaaaaataag

SEQ ID NO: 22346 - DNA, 670 bp, DROSOPHILA
ggctgcgcaaacttatattttgtcgttgtaatattttgcataaatatataaattaaaacgcgtgacggaacaacaaacaaataacgaagacagcaaaataaaagggcgaaaaatcgaaacgaaaacgagtcgaattactttcaagtgcaaatagtgtgcgtgggcgtgagattgtgtgtgtgtgttgtgtttgtgcgactgtgagtgcgtgtgtttgtgtgcaaaaaaaaaacagaacgtgcaacaagaagcaagaagaagagccatcagcagctgacaaaccagcaataaaacgaaatttcaataatcacaagtcaatttaagagtgctattaagaaactagaaaaaatgcacccacgatacagcccagccccgccccctcagcaacagcaacagatgggcggaccgccacaccagcagcagggcggcgggggaggtggaggcgttagcatgagggggccatcgaatgcccagcaattgccgccgcagattccgagatcccagaactattcaaacgtaagtccgtcctttaaatccgggaaatgcgggacgaaaatgggtgaaaaatcacgggggaaaaactgtgggaatcgagaaaccagagggaaccgagtacgcatttgagtggaaaattgctctcgctgatgcggctgccacggcctggcaatga

SEQ ID NO: 22347 - protein, 91 aa, DROSOPHILA
MHPRYSPAPPPQQQQQMGGPPHQQQGGGGGGGVSMRGPSNAQQLPPQIPRSQNYSNVSPSFKSGKCGTKMGEKSRGKNCGNRETRGNRVRI

SEQ ID NO: 22348 - DNA, 11140 bp, DROSOPHILA
aaggaaaagggcgtgaaaaccgcgtaataataaaatatgatacgaaaaccttgtaaagcgactttcagacaatttataacggtcagctgcagtcgaaggagtaagaaaaactggggttttgcacccctgttccgtttggttttccattaaagagtagggagttggcgaaaaaaaaaataaagcgggagaaccaacacaaagtaatagtctgatattggatttgccaaagctaatagcataacatgttcggaataattgaaggaaactttgtgtaaaggatactttcaaacttgaacataaaatggattataacatttggaaatgggattaagttagtaaaataataatttgtctttgatatgcaaatgtatcaagggggtattttcatatttcttactactaatcttattttttaaattcaaatgaatttaatactatctaagattgataaaatgtgtgcgcaagtgcttttcgcatttaattacacacatttaattgcacgtaactcggtcattaattaaattgcatcttaattgaaatatccatagcattaaaaatttaaataattattttcgataaataaatacgtacatttatcggcccgtacgcccttcccaaccgcaaaagaatcgcccgccactcgaatgcattgcaatcaaatttattgctaccgaaatacaagaaaaaaaagttgttccgtgggaacaattgaagaggaaaaggcaagggaatcctgcggatgcagtgcagcaacaggaagagcaaagtggataatattacacacccacactggacgagtacggcatgggttggttggcgtgggtggaaaacgactaagcatttttggggtcaccggaaaaacgcccccactgcatccgcatctgtggcttccatttcaattttttctcctctttttcttttttttttttttattgaaatattaccctcgagtcggctgcactttgaacttcctacccacgcagaagactgctgcaaaatgtcaagtgtcagcgcgaatgttggccagtttttgtgggccgccgccaaatgtcaggatgcgtggcacgtgcggcaattgccgcagttgcagcaacgtcgcaactcgctgctcgccaccccgcagcaacatcaccaccagcggctggaactgaaaaagcagcagtggcttgtcacttgcagttaagttccataatttgcccagaccaagccaacaacttggagcccaatgccccattgcattagccacaggcagctgttgtggcagatgctgccattccagggagaccgcagctttaaggatgcaacagaacacttgcttctatgctattgcaacggagctcgaaacagtttcattttaaatgcccatcaaaataaatggtaatttgtgagtgggtgatatcagtatctaattatcaagcacgcttaatgatatctaactgctgcaaaagttactcgctcaggtgtctaaaactgtgcaatgaaaagttatgacgtttaagttttggtaatagccagggtatttttattttgtgattctttgtgattttaattgcttagggggcatttaatttaatttaaattatttaactataaatatgtttggtggtaagagccatgtatcttaaaaatagattttatttccatctctcccaagcttttctcgcttccttttagtttgttttgctggatggggtcgaagcctcatgtttttggtcacttggttaaggcatgtccaggcggagttggttgttgtggccttcgtcccacttgtttttggccagccagccatccaaccagccgggcaacggggcgtatgcgtgatctgggcgggatcctttgtcctgttctcgccgtagtttcgttgcctgtttatttgcattgttcgcaggacactgtgtcgctgtgtccttgtgctggtaatgttggcgtgtggcacttctgcactttgtcacttttgttttaacgcttacgctttattgagttaatcgctttatgtccggcatttctctccgctgtttgcctttctgcacttttgccagctcagcacttttaattaatccagcagcccgagatagtttctcctgctttttcccgcttttacaacttttcctgattttccctacctgcattgctattacagctgcttccctcgccggtttaatcgctacgccttttcgttatttgtcccctttttggtaaataaagtttaatgtgttttcattgattacatcagttcgtgtgtacgcctccattttcctctctctctctgtggtcattatataaatatacgcgtatcccccaataaacttctctttttttccctttggccagctggaattttgattgagcatgtttgttgatttatgtgcaccagttgtggaatttatatgcggtcattgtgaagtccagtagaaaaaacaataaaggcagcgacgagagtaacgaaattaaataaaagtgcaactcgcacaaatggtatgataaacatttcatttaagatgcccaaaaacgaaatgttaattttatattaaatatgtgagataaatgattttaaaaatattactgctctgcttttgtggatgatatgcattaaacgttttaccacagattgaaggggttgaatgctcgatttcagtagttaattgaaaagaatttgtgtaaaatgagcataaacccagattcagattacagatttaaaacggttggatggtattaaatgaattttaatgctggcaaatttttttatgcgctaaattgattttatagttgtgtaggtgtgaaaagcaaataaaacatatagtcggaaaagtgtttattaagtactttagatggcatatatcatattgcagtataaagtgaacagctatttgaatttgaagggcataagtctctgaccatttcagcataactcaatttatattcaaatgcaaactgtgaagtttaagccagtactttcaattctattcttccattaccccgtttatcccttttatgcggcttgaacaaattcgcatttctattgaaaatttcataactctcgtttgccagctttgcatgccaaaacgagagttgatgatatattatgttgcatttagttgcgacacatttgcataacactcatacgacccgtgagccaagccagtgctgggcagcgcaagaaggagcggcgaggatgatagcgaggcatggaacgtggaatatgtaaataatatttcaacaataattgcttttgaagccaaagtgcccagagacgcgtccaactgtcttgatgttcgggcaaaacaaaaaccacctacacaaattgaattttctcgtgagatgagcgtgtgccctgtgcagccaactcgattccactgctgctggcagctaaaaataattaaaatataaaacggaataaaatgcacaagaataacatttacatttatgcgtttctgtcttctgcttttcttgcgctcaacggaacacaattcaaattcaacaagttggggcaaaacggaaggaaagcagcaaaacgctctcaagtgtgcagatctcaaaggagccaactgaatatacatggactagtttaaaattaaactaatgtttatagttattgcaaaactaaacagctgcccaagagagcggaaccaagttagatatcgtgtcctcagaacggaaatgtaactgaacattgaatagcaatgaagaaagcttgcattgcctgcgattgtaatcacgtcttctctggattttcctcttatttccattctttagttatgacaaaatgctcaagaaacggccagaaggaaggacatctgcttgtgctagcacagttgatggttataatcttatgtattctcggaccaaacgcatttccactcaataactaccgacttgaatagggcccgaagacaattggaattggaatctgcattataatgggggaaatataggcttggactaggctaaattgtatttccaactactacatataataatgctcgtctctgataaataagtaaaatggtacccagaaaggcagcatttcagtaagtatgattagactttggttacaaagaggatcataagtaaacccagcattcatgaatctactaacttttgcctagcaacaatcgcaaacaaaactaattataattaaagaagtttcacttcaatttttctaccacttttaatccaaacattcggcgagccaaacaatttgggtaaacacagaaagcgacaccgtggggctaacgacactcaaatcaaaagcgataatctatggccccccggcaggaaaacctttcataaaatacaggagcgtggaaaaaaaaaaggaaaacgaaataagtagccgcactttatatttatgagcaacattcgcatgcagctttaatggccatcgaactgaaactggaactggacaacaggagacgactaccactacaaggactacgagaactacgaggactacgatgacgatgacgcccacaaaaaatacatttccttcttggattatttaactgccattgacgacgttgaatgaatgaatgaatgcctggctggcaggaggatggagccaaaaagagcgaagcgaagcaaatagaaataaaagtgggtggcatgagtggcatggcccgcaggccacgaaaaccgaggaaaatgcaagaatttttccgaggaaaactacctgaaggggtggcgcgagttcgttcgttcgttttgtgactggttatttatttgctcgtttattttcagcactttttcggcgcatttattagaagttgttctgccttcgggccaacaacaaaaaaaaaaaggggggatggcagcaaactaaaagaggaaccaagaaaaactccttgaaaggctgcgaatttttcttcagccgcctccgaattgaaaatcatttgtaaatcaaattgaaaacgctgccaaagagatagctatgaacataacagctgtgacgacggggttggttgctaaatttgtcagcagcagccagcgaacatcattcgtcatgatggagcccccagtcgaatcaatcgttctcggtttttgggctgtggcatggattatatttgcacagcagtgaacttttgagcccaagtggagttcgcaagtggaggaggcaaaaagctgggaaatgagtggaagctagataatgctgattaagtcgttggcacacaggccggccgtttcgacttgtcaactcctatccacgaaaattcttaattgttcgttattaatgatgctgctgatattgcgcctgttctcaaactctcaaattgaaaatgactcgactttgatgaatgtccgagtgtgaaaaaccacaaacgggctaattgattgccaaaggacttggctgtgactgtagattctatttttcttcatcataggacacaaatcaaaacgagggccaggcaaattaatgccagctggcaagtggagggcatgacaatcgtgggcagtgtccgttattggtgaaacgagatgacaatcatggaggaacgctctttagctagagtgaatgagaatcacagaggaaggacctgcagctgtggctagaattgaaaagaaaaatatgaatcgcagcacaaaatacctcttaactcgaaaaatgtgaatcgcagcgacgcagcacaaacatgtttgaatgggaaaacagtgagtgccataaataaattgctgcttcagcagttttcaataaatgacaagccacttcttccctttactatcggttgtcaaactgaggaactacacttgacaatcaataagtcggagcaagcaagagtcggagcagcgagttaataaaggtagttcttggaagtgtaaaaacacttgagttccatttgcctcctgatggacgcacataaattttcgattatgcgcaccattagacatgaattgaagaattcatcaaagtggatttttcggcccattttacgtgagcgaaattttgctgattcttcaatcttgccatttgttaatgggtttcgttggaatgaggaatcgattaaaacgaagagtttgttgtaagttatttgtttacaatgcggcatagcaatatttatgtaaaaaccatgtaacatcaatggatgcaatgtttgaataataagtaatatttaagttttataagtgatttaaaataatacatataactaatggaattgaacactcaccgtggttgtggccggtgtcgtggccgtgtgcggcgtataggcggcatacgccggctggggcagcggcgccgtatagcggtaggctgcctgctgggcaacagcagcggcggctgcggcagcggccggggcataaccctgcggggtccagctggcggcaccgcgataaggtgcaccggcggccagggcggcgccagcggcagcggctgcgggacttgtcatggccggtggccgctggggtagagcgcccttgagtgcgacggctgaggcggtgagcggggcgccggggaaggcgctgcgcgatgttagaggtgcggcggcggcgctagacgagctcccctgaaaaaaccacaaaggaaattgggttcttaacgattgcaaatttgtataattgtattatttatttatttatcttttaacactttgaaatgctagtaccgtttctataaaaagcattatagtgcctatcgaagggaacaggctttccactctgtggtttagtttcggcataaataatctggtgtgcacgggttttttgttttggcgtaaataaaaccgcaaaacgccatctgcggctccgctgaaaggcttttgtttaccgctagaaaaaccgccatgacatccgttctaatgcacacatggcagataggtaggcagtgcacatgaatcatggcagggagattttgttttattgagtgccagttgcgcactcattgcaaaaatataatagaaagttaaactggaaaatacatatatagtgcatactctactctgtagtgtattcaaaattttacaagccagaaaagcagaaaaaagttgttcaaatatgtttatcaaaaagtattagaatatcgaggtatcaaaatcactgcagtttggcaagcactttaaaattctctattaagtcttcaaaggttttcacataaagaaataacagggtatctttatagaaacacgcctgccataaataatgcccgcccaactcccacttctgtggaatggagcgcagcacatgagaagtgggcggcgggcggtgggcgtggacagatgcaacagtcgccgggtgtccttgctgccgggtcgcttcctgtgtgagtgtgtgttgtgtgctccagttttgcattgcaaatgcatttgttgctttgggccattttttttggcgcactcattccctcaccggttctttggggtcacttggcataaacacaaataaacccgcctctgtggttcacatataaaaatttatgtgccactgaaatatacaaggcgaaatatgtgatgtttttggggattctcgatgtcgttttgtcgaatctttcgtggcacaaacagaacgaaaagaaaatatcaccctccccacaaaaaaaaaaaaaaaaaaaaaaaaaaatggcgaaaacaaatgcaacaaaaccggaaacaaacgagctccgccatttttattttcggcatgatcgaggtaggaaggaactcatgtatgtcctggtttctaaaaggattcaactgaagccttgcatgctgtcgctgatttttcaattgcaaaatatggcaaatatttgattttcagtttgtttttcaccctatttttccgcatgctcctctcacttagtacacgtttttcgtatttttttttttttaaatgcggcttcacgttttcagttaattttcgtgggcacgcaattcgaatgcggttttcgcggggaacgaaggctgagctgtgggtgcctgtaatttggcagttaaatggcagagaacgagtaataatggtttgccattcgaattggagtgttggtggacgtgtgtgtttgccaagtggaaaaaatggagtgaaagcgtagggctgagaaaatatgcattgaaaaatcgagggaggcgtgacagcattttgacataaacttcaggtcgaagaattggattttttaaagccaggctacatgaaggtgcgaaggcaatatgaacaactcggttactaagctctgaactaataaaatgaaaactactcattgaaaatgaatcactcctaggagacgaattatttaaaccaaacatgttctttctaaaatcaaataaatggcttagctataaatattagagcaatgaataaataattattatttttttcagctcccaaattttcatggcgttatgcaagcgaacttaaataccattgttgtcagcaaaatcatctgaaaagtaggcttcagaaattcggtgcaagcatttagccatagattttccttaaaagttgactccaaatccattccagccatcacatttccccatctattgcgattttgctgtagaacatgacagccaaaaaacaccaccattgccattgcaacccatcaattgccttcggtgggtcataaaatggaatagccaaacattttaagcgcacaaatgctataaatttaagccgctaaattagacacgtttggcacatcgaacccaagccccacccaccctaagcacacacacacgtacacagctcagcaaaatagcccccaactttacggccaccgaaaataatcataaaggtaattattttatcgttcgttcaaattcgcttaattttaacgttgactgcaacgacgtctggcggctggaaaaatttctttacacaggtgtatatatagatgtatgtatataaaaggtaaagcggaaagctaatggaaaatatgaagcctaggaggtggctggcctacatgctccactcttaatgggcagctgtggctgttttttttttttgtttctggagaggaaggggcacgagaatagaaacgaggacgtgattaattaccaaattgggagccattatcgcgtgcacttcgagggtgtttgtaaagtttttccgactcacgcacacacacagatacactgcgaatattttcggtacttcaataataaactatatgactagcataagtgtatatatgcctaaaaattatatgtttaaacattttttagatttaaaaactggcctttatatagagaacaaaaggcgttgccaccttttacacacccgaaaaatacatgtaagcttagagatttgttgtagtaatgtagtagtgttaagtaatatcttccaattacaaaatggtattgactttgaattgctcaagtttcttctcatattacacaatttccaattattttaagtgcacgaaaggctctgcttgctagtaacttggtcgtgtcccaaacatttctgttgacgcttttgttctatattctattaccccgaaaactgttcaccgctattggtgttcgcttaatttttatgcaaaaaacgtttcgtttgggtcctttcgaccgttatccgacggtcgtccttcctgggggcaaaatcaagcgcaaaatattaatgataataatttattaccaactgacaggtggagaggcaggaggcacgcaaatgggcggggtagcctgttgtcttttgaggttttcggctttttcggagttgctacatggggcgggtatcctccgataaacgctttgtgattagcggtcgttgttgctggtgtagcttcgtggcaacgacgacgagcctttgtcatttttattgtcatttttcgaaaatttatgcgcaaattcgattttgctgcgggccaatggaaatacgtgagctggtataatgcgaacaaaaaaaaaatgaggaggtgggagttaagctctgaattcctagacactttaaggacatagcatttaaatgcgaggtatttattgtgttttaattgaaattctgtgaaaatggaagtcagcaaaggaatgtgaatgcacgcttcagtaaaacaattaagtataataaccactttgaacatgtttttaaattttaaacccttttttaaaaagtttggagaacaattcaacccattcaaaacgttttcaaattacttaatgcaaaaactagttgaatagcagatggaagatatataaaaaactgcaaacaaaactgggactcggcacacgactcacttgccatgcaaaggcaccaaaaaacgacgaaggtggaaaagcataaaacaaaaaatatttgcattttcctcaagaaatgtttgcacacactcatagacagacgcacacacacacaaacacacaaacattgctgtctctttgtataattcatattttccaaccacttattgtttaaactaaataaagcaaaaactttttccataattaaaaccgacggcagtgacgtaggcagcaacaacaatttcccaggggaggggaggcatggaattttcccaggggcttgcaaatggggcgaagggtgaggggcatcgtgggtaggcgcaagagcggaaaacaaaaggatttttcttcattttgttgctgcctttcaggcgcaaaattttcgcttattttttccggacttttgcctattttaattctatgcggtaaattaaattttcgtattgtcccatgtccacccaacccactcgccctctcttattttcatcattttccgcataaaaattcacgagtgaaagcgcttaagggatgagaagtgggcgtggcaatgggcggaatatatagacaaggatacgaacgactcgagggctaaaaatagtcagccggcagaagaaaagctgcagctaaaaatgaaaatgaggcgcagtgcaaaactgccttcatgtgtatgagtgcatatgatatgcaacttttcctgcctattttgcatatttttctataacaaaaaaaaaaaaaaaaaaacagggaaagcatatttttttcgaaattattttatttatactttttctgcgctgcggaagagttgggcatgaatatgcatagattgcaaatgaaataaaaaatttgtttggcagagtaggcgactctgttgctatttgttgcttcgaaaattttatgcaaacattttgcaaattgaacagtgaatttatataaattaatttagtcttaatcacagttgcaatcttattaaaatatcgaattaaatcagttgagtttattaattctga

SEQ ID NO: 22349 - DNA, 622 bp, DROSOPHILA
atggcaacaaaatcgaatttgcgcataaattttcgaaaaatgacaataaaaatgacaaaggctcgtcgtcgttgccacgaagctacaccagcaacaacgaccgctaatcacaaagcgtttatcggaggatacccgccccatgtagcaactccgaaaaagccgaaaacctcaaaagacaacaggctaccccgcccatttgcgtgcctcctgcctctccacctgtcagttgggcgctctaccccagcggccaccggccatgacaagtcccgcagccgctgccgctggcgccgccctggccgccggtgcaccttatcgcggtgccgccagctggaccccgcagggttatgccccggccgctgccgcagccgccgctgctgttgcccagcaggcagcctaccgctatacggcgccgctgccccagccggcgtatgccgcctatacgccgcacacggccacgacaccggccacaaccacgttccagccgctggtggtgatgttgctgcggggtggcgagcagcgagttgcgacgttgctgcaactgcggcaattgccgcacgtgccacgcatcctgacatttggcggcggcccacaaaaactggccaacattcgcgctgacacttga

SEQ ID NO: 22350 - protein, 204 aa, DROSOPHILA
MATKSNLRINFRKMTIKMTKARRRCHEATPATTTANHKAFIGGYPPHVATPKKPKTSKDNRLPRPFACLLPLHLSVGRSTPAATGHDKSRSRCRWRRPGRRCTLSRCRQLDPAGLCPGRCRSRRCCCPAGSLPLYGAAAPAGVCRLYAAHGHDTGHNHVPAAGGDVAAGWRAASCDVAATAAIAARATHPDIWRRPTKTGQHSR

SEQ ID NO: 22351 - DNA, 20693 bp, DROSOPHILA
acttcctggctcaaagaaaaaaaggagcagaatcggacagaacaatttgttagtcaagttgctactttttccacgttttatttcgcgggggttgctaagcgtatttttttttttggctatcttgtgtgtttgagcgttggtgcgaactttgtacgtgctcaaaaatgcaaatccaacggaataaaacgcaacaataataacagaataatgcaaaagaaaatgtaaataaaaatagacggtcgaatagcgtaaaaaatgaacaaataatgtgtacaaaacgcataaaatatatggaaataaagcacagacaaacaagcttggggcatatcaataaaaaatacatacatacatatattaaacaataagaaaatggcaaaattttaccattttatatcattgaattgatagcataaatattgtatggtatgctggccatttagattattctgaactctgccctttattgaaacacaatagtttacattaaaatgaaagtccatttagataaaatatcatatttaagtttcccttgcgtcacgaaaggctctccgggtttttccatcacgacaagtctcgaatgaccatcgagtttaaagtttccttttcatcggaaagtcacttgacatttgctgcgataaagttgaaattgtgtttttcccctttttgaaaaaatatgtatgtaactctcaatgcaaacggaaaccattttataaatccaataaacttcaaacgcatgaaggtggattccttgaatgtacaaaaaattatatatttgcagcggtggaaagcgggcggcgggggtggcaaaacccccacccagctcattttcctcccccgataacaatatcgagtttagtcagcccccggcgataacacaaattccccacaaacagaaatagagtaaaaaaaaagaaaattgttgcttatcagtttgtggaaaaaagtacagagaacattatgtcaactgtttgacaaaacaagagcgaaagatactatatgtatgtatgtatatggccgatcaagtgacgtgactgctgtatcaactttttcaaaaaggtgagtcaacgtcgaggtatgagtagggcgtttataatcagattgagagtgcctactgggactctgagaccgcgagacttttcccttcgggctttgagcgagctgcgattatgataatttcttgcaaacatttaaagataaatttacctggggcgtgttagttgttcaatgacagtcatttggaagtgacgcattttatcgaaactcttgttatagtaacaatgttctaaagtgggtctccaaccactatcattagttagtaaaagtatctaaggccttcgagtaagttgcctatgtttgatagatacttattataacatctgtaaatatttctgtcctttttctggcattatacctttctctttccggatttcctcttctttcttccgccgcattttacagcttcttgcaaagatgattgaattttagtggttcgcttttgtcttggccacaaaagtgttgtcaggtgctttttatggtttttgttttcctgccttttctcttttaaaggtcaattcgcttgcgtttttttttttttgtgttttgtgtgtgtttcgattttacttcgtttgcttttataaatgagtcattttcaattcacacaaaaacacaaacacacgcagccagaggcttcactttgctgtagttgttaaagttcgtttattccgccgcttttgctggccagtgtaattaacgtaggcgttttgtttgcactggggacacatttgtctcgctctgaaactcgccctatctctgttcctcgccggcacatgtggcgtatgagtgataaaacattttgtgtactttcctccattaatcgctggccaaaacagcaacgacaacaacaagaacagttgcaacctgtgctctggttttccagttttctggcttccagtgttgattttgtagagtggccaggtaaaatggtcgagctaaaacgttgaagataatggaaatgaagtcgtttcacatctggccaattgttaatggattgtgtgtgtgtgttgcagttcaagttgtcaggaaaattgaaatgtacttcaattcgagggtatattttcaactaattatatatcatatagatttttctaaggaaaggtataaaaaaaccttagtttaatttattcaaaagggttgcaagttttactacttttaaaagcaatctagttttcgcattcaaaaaatttgtaaagcctattgaactaaagcctacttcattttcctcgcttcagtacctcgccaccctttttgtctgctcattatcctttgtacaacccccttctggccatcccccccttttgattttcccagtccccattgaacagttcaattaggttgaaaatctgttggagggggcttttcaccttagtaaatgttgttgtccctcctaatttgcactaaatggagaaacaaagcctgtcacttcactatctccctttaccgtcctcttggtgcgacactatatccctcatttcgacgacccccttaaaacgttagtagcctgaccaaaaaaccacttagcgaaagagagagggggatagttggggagaaagagacgggcgcagagcgacagccagcagaattttaggttttgtgcttgacttgacttgctttcagctaagttttcctttttgtagccatatatggaaaagctgtgtgctgcgctgagtgttcttagggaggggatggagggacacacacttctgcacttcctgtctgtcacagaaagagacagacggtggcgaaccgaaagagacggagacttacttaagggggagatgtcaagaaaccgctttgctttcttttttgtcagcttgcaaattaaatttaaatacccgcataaagaaagagaagtctcggcgaatgtgtgcgagtgagagagtggccatgggtttttaagaggccactgtaacttttagcagcacgaaacgtgttgtctttgtcacttttcgggctgccattgtccgtgtttctatggccgtgtgtgtgattgacacgcccgtgcaagtgtgtgtgcacgcgtgtgtgtttgtggagggctttacctcccaataaaccccgggcatcatcaccctcatccatcttttggaacagactcgtgctcgtgtttgagttaagtgttacttccgctacacacgcattcgtcgagacttgattcattcattatttatgggaagagaggtgtaatatggaatgggaaaaaaacagtaggtattcttctctacataggaaaaaaaatataactgatcttaactaatctaatagttcgatgtcagagtaccaaactctttaaaatctcttctatttctttcttgtcttaatcataacttcttattaaataacaataagctttttgaagtgtttaaaagattttccgaatctccaagtttgagtaactgaaattttttgtgtccggtgtcaggtttggatttctgaacctaggcttatgcattccgtggcatttttctctgtgcagttaaaactgttaaagagtaaggggcaaaactgaagcgattatttgttgctatttctcattgtatcgcctcgggcttaattcaatttaaatgcagcatatttgtgtttaattggcagacaccgctaaaggggggagatgcggaatcaccaacatgcatacatacatatatgctatccatacttcccgctctgggtgtccaaaacccacttgaccattctttaactgcggcttccgatcacgttcaacagctttatttgatttattatttgcaatcgctattgctggtcaccatccctttcctacccctctatttgattctttttggcacccactcacactcagtggtttctgcacgttgtcacataaattatttttcacccaagtgcaaaaatatgtaagttgccatctcgctctctgtgattagtggtcattgctaatgtggcaacgttggtaaatatcacgcgccatatatcatgtaataataacccaacaaacatatatcttataacaaacatatttattttaaaatctttaaagttgtatatcctttactcaatgcccaaatagcattcttttacaagacttgaatatcaatcgacattttatcccatccccgcagattcaacacgactcactttaatcagctgtatactttgaattgaattagcatttgattgacatgcccaactaatttgatcgcattatgccgttcgtaggccaccttcattgagactgccattttgcttttgcccagatgccaatcaagctttaacctttctgcagaaatgagtttcgtatacaaaattgacaggagcaattatgagagatgcccccctgtccaatcaggtggtattacacctggaaataccggtgatgtgcccaggcgccccactttgcacaactcagtgggcctatggataactaactttacaagtttttgtcgcagcagcaacatgcaaatgtcaaatgcacttggcaggcagacttgatgaactttggctttagattagcaatttgcagtttcatcattgatggaggatgagtacaggagatactttttatggtaccccctttaatttttgcataagccttcggggggaattcgagaagaagtggctgcaacagctgcagaattcatcagtagcttccattaatattccatttcctgctaaaagcttcaattaaaatcttatttacttgctgctgtccattccacctacacaaggagcaacaacaagaactctggctcaatcatacactcaattaatgctaaaatttattatgccaacagacaatcgctttggagacctgcagaccttcggccccccaagagcagacgagcgggtctcttaaccccacaataacccccttcactttccctaacaagctgtctggccaagttccatatactatatatacacgcatatatatatgtacatatataccattttgttgccccttgttggactaatcgcgctaaaatgtttttactgttccatttcggcgataaatttattgttgtaccgtcctgtccctctccaaccagtcatgctctctctttccttttgaataggtcgtccctctttcacctttcgtatcgataaatgtttatcagaatggcgtgttatctttgtcagttggctgaagcaatggcaatcagtgcaaaaggttgagaaacaactggttctgtctgattatgaatattagaacagcgcttttgatgacgcattttccatttcggttttagctcgcaatcgatatggcgtttcttatcgtctgttgctcatttggtcaatgggttatgatttaatggccctaatcacgcatgtgatagaaatggaaagtcgtcagattggaaatacccttagagcttttactttatttcttagctatatgcttaccttttagttgttaagtggttgtgaatcataaataatgatcattcatacactgcttcacctccattcaatgtgattatttctctactttgaaattctttcatgtaagaaacgcattttgccatcttcgggttcttgactcatcgcttctgggttcttttccctctaaatgccaagatgcattgtccgttttctccccagcttcttgcattgggctgtccactcaattgagttatctgctttaattcaataaatttattgcattttattgtgagactgtcgccaagtggctgctgctgagttgaaagtctgggtcccgtcgtctgctcctcatatatagtacatatattccgcatatttgcgtaggccccgcattgactgccacccactcgatggatccaaccgactgctgcattcatgtactatatgtatatctgtcgtatctgtatctcgagctattcgagagtatctggcgttgacatgaaatttaaactgcgacccattgtcgggttacacacacattttccctcggtcggcccggcacatttcaatatcaaaactcagacatgacttttgctatctgccagatacttttcccgtctgctttttctctctgtgtgtgtgtgtgtgcaacaaaatgtttgcggttaacttggatagtgaaaatgcggtataatcgaggggacggacgtagagtagcatttccagtgtacacaagcgtagtcaacatttgtggcttttattatcattgtgattatggtttcaaaaggggcgtatgtacctacaattttatttgctgatatagtaatgattgaaaaatatttaaattggcaaaacatatataataataacatacaagaggattacaatttagaaatgatcgttttgtaataacaaatgcaaagtacacataaataaccagcttgtaaaggttttcaaccgaaataagatacatcttctacaactgcttataaaatgtatctttgagttccatcgcctcttctctttccttcaagtgaatgagcacgtgctcattgcgacttccaatttaagataataccgcaccaaaaaggaaaaagaagtagaaaacctgctcaaccttttccgaatcacgtagaacaaacacagaaacctttccgcttgattaaagtctttgctctcatggcattccaatccgttctttaccccctttttggggtcacaatcagaggttctgagagtttccctttgattagatatccaaaattatgcaaattaatatgcatacatacatttcatcaagaaaaaggctttacaagaccgcagtgaaatgcaaaatttgtcaacaatttttcccatctcgctatttatatttattattcaaataaaacgcaaaacaaagcgaaatttattttaaaaataaaacaaagtgaaaacaatgcaaatttgtgtcagccaataaactcgcagtgttggcaaaacgaattgaacgaaaaaacctaggaaaaccagaaaggaaaacagccacttttcatatagtgtcaatttaaaagtcaacaatgtggcaataactgggattcaatagaaaaaaaaaaaacaattggttgcaaacacaaaaaattgaaaacaaaaattgactttatttcttatttttcaatataatcgttgttttaatattgctgtgcacgatgtacacacccacatgcattattaaatatacatcatatatgaatatattttaatataaataatttaagaaacgaattgtttaaactgcgccaagaacatgtatttataaacgtgaacttgagttcgtatttatgaggtcactagaaactgcatacgatttcttggaagaaactcataaatttcattgattacaaccttatcgcgatgattataaaagtttgctggcaactcttttcagcccctctttattttgaaggtcgggactaataaacttttttttccgtctgctaaaacaaaagaacaaagaatatgtcgttaacctgctagaaaaagtgctgcctacaatttgaaattgaaattccttgtcaaaatggaattattgcatataaagcgtttttttttcttgctttttgatggtggaactaggaaatttcataaattcttttttttccgagtaaaattccacctgcagataattcgaaattccttgccattggcatgtcaaaaatatttgcagagccaaaagctgccctcctaacctccacaaaaccctggcatgacttgcttcgattattggggagcgggggagaaaatctcatgccacacaccccactagaatttttctgggcggtttctgctgactgttatctgacgcctaacatttcctttccagcggcaaatgaatccatctacccgtctatcattttcatgccagcttccacagttgtgtgggcgcccgaaacgcatttaatttatataagtcacgtgagagacattttttatgtggctttcggcaaggagcaagcagcaacgagcagcaaaaaccctccccaatcagagaaaaagccggatttggttgccttgatttgatgagttttgcaaccctcatcccaaaggggttttctacgaaaagtgaaatccgctcaggcaatacacaatcgcctcgaagaattgtaagcggacacgcagctagctctaatttgattccccataattccccacaatttcacattgggtcaatggccagttgggcactacttctgggctggctctttcgtttttggcttgatttcaacctacatacatatgctaaccaattttgacaggctggcaagcatttggacaaataatatctgtcactaatcatgacggagtggatttatgcgacaactgatttagtgactgaaaatgagtgcactccgtatttcgtatgcgtctttggtctttgcattttgatttattagtcaaggcccctgatggaaatgggaaggaggggggggggggggtcgaagggggctctgggacccctccgaagaaagccaagagaagactgcgttcggcttaagtgaataatatattttatgggtggcgctcatgtcgtggagacatcataaatcaaacaaaagtccatttggtatttcacacttctggcacgtgactctttcaagcggatatccaaagatctttcggtttcagtttctcggaatgttttttggccttattgtggctaataattgttgatggcttcttaatggcgatgcatggagaagatgttgtgattgaaatcggagtggcagtattcactgaaaatgaaacttgtcaagtgtttgaatgctacgtttttgaagaaaagtaattaattaatttaaagtaattaattaataattttaatttaaggcaactttttgtattcaactattttatcttaaacctctgaacattttggagcataaaactgaaaataccagctgacgactatcttcataatcgatttataagcgactgtaagctccaagttccccccactaaaatagtttccttacgtccctccgacccattctaaaagtccgtaaacacccatttccagtgaaaaccaattggaagaagaacaaacgaatagtcataagttcaggccattaacaattgcgtgttctgccatcgtcatcgtcatcgaatggaatcgacgacgacatcactttatatcatttcattccattccaattcatttcatttcatttgtgtcccatcgctgccggagcgggcaatcaaaaagttgagcttatgccattaaattgtatttttagtttgtttcgctgccgcttcgtgcaaatgcaataaataagtaaacaaattaaatgcgcataaataacagcggagcggcaaagaggttaacatatcccaactaccgtgctaatgtgcataaacttttgctcaaatacagttggccaaagtctggggagacacgtgtgggccacaaaaatcatgtggaaagcatgagaaacatgtagaaaataatagctagcgaaacaggcagcaaaacgaaggacaagataacttatttaaaagcgaaaaaccgcgcagatttcgcagcgtgaaattttttgcaaatgacgcaatttttttttgccaaaacaaaaaaaaatgtaaacaaaaaatacaaaaaactagaaaaaaaagctaagccgacgagcagaaaaaattgaataaaataaaaagccagccaagttgtcgtttgctcactttggcctgacacacataagaatacatagatagaccaccacaaaacatatattatgtacataatatatagtatacaatttgcgattgttcgtcgttgctgtgcgcataaaattattagaacgatataatttcattatcagacaagcgacgatgaggccgcgagctgaaagtgaagagagaaaagttcattggcacacagggcgtatgagtgttggcttaagtattttcgcacactcactcactcactcatttcggggtttcgcacacacagcggcagataaacaattgctgactacaaaaactgctggctgaatttattatttaattatgttttgcatgcgagaagaaaggaagctatttcatagctaaaactgtacaaaatgtatcttccagattgcgagaccttgtggagtaacttaacgagttttgggagtcaaagtttatttggacttggcccagagagatagcaaacgagtagggttttatgatttgtgttggttgtttgcttgccgacgcgtgacattcacgtctgaatataaagcggaaaaaagaatgtacagcaggaaacatgtgtgaagtacatttgaacaggcaaaagcagagttctcatggaaattaagtatacgacccgtgtatcgctatcatttgaaatttgttaaaaatatttgtgttggaaatttcaaaaagacatttataacagaaaagccaaaagatgcgaacaaaggtttttcaatttttctatacataactgctcgctttattttaccttcaaatggcatttcatttccaaacaatagcgagagtaaataacatatttcgtatactgtgaaaatcaaattaatacttgcaacaaacaaattaaaagtggagttttatatgtaaagcctcacttgatttttatcacctctggggatttagattttttcaaaatcaaattgttttaccgacggaagtattagccctaagagaaggggcaacatgacacggatcaattagcgagaacttttcaacccgaattcagtggctttcatgcaaatggattttgcggccggctaaaaagttttcaaagcccacaaaacctttattcgccgcctgaaacaatggaaaaaatccgaacgagaaatgcctcgcttgattttcagtttgcaatttttgcagaatttgcagtggaacagtgttttttgttgttgtggtctgcatattttagcatttcccgctgctgctgctctgctgtgcgaataaactaatgtttttggcaaattttcaaaaatgtatcaatggcaaagtttgttggacttttttttttttgtgcgcttgtatgagtgcggagccattgtttgttgcatacaaattttatagattttcaacgccttcgactgcagctgccaaatatcctgcagccttatatgcaaagctcgagctccacatccttcgactttattcgtgtccctctggcacatgtgtggcattttaagtgaaaaacgccatcgtcatgcctgtcgtcagcatgccaatgtgcctgtctctttcttcccgtgcatctgccacactaccgctctctttctgcattcttcctcacctccgttttgggtctctatctatctggctggctggctatcgccatctctatccattgtgtgggccaagcagcattcaataacttcgaatggcagctattccagttggaatttcaataaaaatacttgcactgccttcagtgttcgctactccgctcccaatctatggattgttggagccaaatcgcttaatattatcgacatacttttgctctatacattttaatattgcctacagctgtgggctgctcgaatgtatggagtgctttgaccatctaacgtttgtgtttccgcacaagtagtattcatttaaaatggtgatggtaatgcatatttggggatattaccgaaccactttgaggaccaattgaaatgtatttggaatatacatatgggaaaacaccaaaaggtgaatacgtatcaaaggataaatcattggaaatatttttaatgaatatgtataagatcatatttattgcgtaatcagttactaaaaccattttttttgttctcattctttgcagtacggtcagcgagtgccgacggcagcctcaccgagcaacaccaactcgagcagctcctcgaacactggctcccagagcggcaccctgagcaccagcctgagcaacacgacgaacaccaacacgaacatgggtcccaacggcacggtacagaatcagaaccaacagggcggcgagcagttgtccaagacaaatctctacattcgcggtctgcagcagggcacaaccgacaaggatctagttaatatgtgtgcacagtgagtacagccaggacatcaacataacatatctgaatgggcttccaaaaaaaaaaaaaaaaaacaaaacaagaaggaagctgcaacccattcaaccactttgattgccattcaaatcagattcaggctacgatatggatgcaatcaagccactcagtgatttgtgcctgtgcctgtgcttgccctgcggttttgtatcttgtctcagcggtccacatatcacattaaattgcattatatctgggcacacagctccctgcgtcaggccattatgcaaattcattttaattgtttttgcagctcggggcttttactggcctgccatagatttgctaaataaatttgccttcgagcaaaccatgcagaaatgatgttgcctttgagctagaagcatctacatcttgttttaattgaacgtttataatgatatttgcttgtggagtaattctgatgctttcataaatttaagattcagtttggatctcgaagtacccaccactattaatttgaaaagctgtgtaaataaattgttctgccatccccaaaatgtttgtatccgtttttcgatcctgaatacatttgtaaaattgaaatatattcgctcctttctttcgttgtctgagcagtatctttcggatacgtttgtatctttggtgtcacatcatggcatacgaaatgccatccatacgaaatgaactaatttcaaatgtatgtgactgactattgatttgcccaacctcagaatgatgtggtgtgtgtttttgagacggatcggaacccgaaatccatttccatccgctccaccactgccgccccccccccacccatctgctaatgagcggcttagcctcagtccattccgcttggttgcgtttccataaaagcaccccgcgtcctttgtatcctttgcccggaaaagtaacccccaaaaaagcagccacccctgaccttcttgatggacgaggccaattttctgcaaactaaacaaaatccactaattagtgcgcacgctttatcaaaattatttttttcggtatccaaaaaaggaaatcattttgtggtgtacgaacaaacttattattatatgtgtattacgcatacgcactgttggccaatgcttgtgtgcatacgaaaataacttattttgcggcgtcacaggaacatgcaaaccaaacgaaatggcagggctccaattccactcgtcgtaagtcaagtaattaaattgaaggctaatttattttgcttcttttttaccgcggacggggttcattctcctcctctgcaggcaatcaaaataagcggcttattactaggagctagtggtggtgcggggggctttaatgttattatgactatgtatttatgagtcggtgggcaggggggggggcactagtagtgtaactaagaagatatcgattttatttcagccgacagtcaaaggggcatttacacacggactaagtcaattattatgccaggctcaaatgagcaaagtaacgccacaggagttggggaaaagatagccaaagggttgtgagaatttccattgcctactttggcgcgcacgagcataaaaattgcattttaatgacactttaattgcttacggtaaggtaaactcgacccaatcaggacgaactagcaagctaccaaactgtgaaaaaccagaccccctgctccttaaaaaataacaagaatacattgtggcacgtggcaccaggcgcacgcacacttcgacaccctgagagacatgaatgtgtttataatctgattatcctttttccactctttgcaatcgttgtcatgcaacaccatttcccattgtccattcgaagcggaatgctatttaacccacctgtgtctcttcttgtttacaactttcagatacggaacaattatatcaaccaaggctattttagataaaacaacaaacaaatgtaaaggtatttttttcttcaccattctcatcattattttatttatgtgtgtttttgtataagaattattagtatgtgtttatgtaaaaaaaaaaaaaaaaaaaacaaaaaagatatccaaaagaaacgcaagaaaagaaattgtaaacaaaccaaaaactgaaatttcattgattttttaagtacctcttagttggcttataaatgctgagtgctcttggaaaaattctttaattcatttttttttttacttttgattaatcagcatttgcactttttgatattatcagtttcttactgatttactcaaacatttcaaagaacactcggcattctcttttctttttttaagtaatcacaacttattgcttgttcgttatcgtgtgtagattcatttcgtttcaatatgtaaaattatactttgaaattaaaattttccaaataagaaattggcatttagcagtttgtacttcattttcttctactgtttttgagtttttcagtttgattcctgatcatttcacaatcgtgtcattcatgcatttcactctactattacgaatactatctgctactgatgcacttaactaatgctaataataatgataacgataatgtgtaaatacgccaataactgaacaatctgtaaaaatagtaaatctatcaaagactgctctctataaatgtgtgtgcgtgtatcgatataaatatatttttattgagtactttttccacttgcgtttggactccattttttttgttagtgcttaagtttatttaaattaattattaatttaattttcacccgttttttttcttctactcctcttttcttgttgaacgaatattttgtttttgttcgattttgtttttgttgcacgtgacccgatgcgaaaattcgccatttttttcggttctttattgaattcaatttcaattttcgatttgtgtgccaaccaaatattggaatataaataaacatattttcctctcgctctctttctcgctctgtttctgcaaatatatttatatatatatttatacatgcaattaaaaaaaataaaaataaaattcctccccccacccgcaacacacaaaaacaaacaacaaaaaaaaaaaaaaaaaaacaaatatataaacaaaaacaaaaccaacaacgaaaaacaaaaacaaaatatgcttttttgcaggttacggcttcgtcgacttcgagcagccagccttcgccgagtgcgccgtaaaaggattgcaggggaagggcgtgcaagctcagatggccaaagtgggtatctgggtgcttcataggccggccattgtacgtttgtttgcatgcaagtaatactcaccccacacaccgcaaaatgcccaaaccccccccccctcttccggaaaaacccagtggttcccattcttcccaaactccaaaccgaaagatccaccgccccttagtcattcctgcatttcgtttattgtgtgtactgacccctcagttgaattttccatcttttattattttccctttgttaaggcttaaattagtttttattttttaattaaaccccagtattcgtgccaaaaaaacaaagtacctaagaacattatcatcttagatgattgtatcttgcaaccaggcttataagaaatgaaatcttatttatattttattttgcgtttatataagttttacacatttcggcggcgttgttatatgcatagatacaggagcctaaaaattaagtgggtttccacttcctgagaatattcatattctcaaacttacaaactcagaaggcgtcaaaattatatatatatacatatcttctcacaccgcagggtgtgcatttctttattttacttatctttgttttataacttcccaccctagaacccaaatccgataacccctatgccaaaacccaacctctagttcgtagtgttgttccaaaaactctctttgtataaccgtttgtcgtataccaaaaaccacacataatatctctatatataacctactatatagacgaaaacatatttctagaaaacctcaaaacatttttagatttcaaattttccttttttttttttaaatctttcttttcatagaggtagttcaattgatagcgtaaaacatatttttagtaatatttttcgatttcaattgggaataaatgcatttatttatggcattagttagttatgaaactgaaagtcataaaataaataatccttctctttaatcttcctttagcagttgatatatgaaccccaaaataatgacattaagtgagaacaattaaagttttttagcagacttgtttggtaaattaattgcattaagagtatacagtacgggtatatttatagtttagtgtaaacatattctccataaggtattcgaccaaatatagaatgcagtacatccaatggaaaacccgattaatatcatcattatctagctaaggccctattcatcaaggtagacttcgaatttgggtacacattatataatttgagttttatttcttataaaatgcgggtattaaaaagaaatcatattagaaaaatcatgttttcatacaaataatgtgttttttatttaatgtattcgtttcttcgcctatatagaaacaattaactgaagtatcttaagttgttaggcaattctttaaatattttttagtgatatattgtagcttaaaacgtaaatgggaaattgggctttagacgctaaatttaagtagcttttagtgaaatttatcagaaaattaagtagatatagttacatttaaactgtatcttttctatccccgatttaagttatagatcaaattgtaaacaacccaaatatagaagtggtaaatccttatcaataattagcagccatttacagcgatttacggatgctggaatccggtatcaatttaaatatttccattcatccgagcatattaatttgtatacaaatcgaaaagtttttcatttaaagagcttagcaactttgttcactcccccctctcggtagcttttttcaactttataatccgatggcattaaaaaggctcattaaaaattatagacaacaacataaaggaaagtttgctgtataaacaaaacacagacaacacgtatttgcgtaggcattaatgattgtaatctagaattgaacaacactgacacaaaatagaaacagtacaactagcgtataactctcttcatatctgatattctatatattgaatctgtatattcaactgtataaactgtatactcgtattttgaagttatagccagccaagtatataaccaacctctactacttcaacctactacaaagtttgttgtttgagtacgcaaattgctacaaacctgtgccggccaaaaatcaaaccaaaaaccaaatacaatttaaactctaagtataacatcaaacagatctcattaaattctaagacataattactgagcaggtatttaacttagttaagcattcgagatggcaaatcatgctgtattactatagatactaaatggtaattttttttttacacttaaattatctgtaaatcgatcagagcaggttaagaaatcggaaatatcgaatttgttaatcggaaagtgaattttcgcagagtagcatatctatggtaccatcaatgattaccatctcttattaagaattgttgagggcaagaacaacacttcatcttcgagggggtaacgttttcataggtctactttttaataaggtattatccgataagtctgaggcattacataacatccacacccacacacaaacaccttcgccagagtcaggcacacttaacactcccactaacacactgacaacagacaaacagtccaaaaagagttgacaacagaaacatttttggcaagcaacttgaatatttactaatgacaaaatctctacgttcttaatttctctactcccctctctctctcgaaataaaaaaaaaataaaaattaaacaaacacacacaatcgaaacaacatcacaaacacaacacacacacaaccaaaccacacacatcaaaatgcatacgcacaaccaataaaatacacatgcttacgccaattgcttttgtgtaacgttaatttgtgtgaaaccgaaacaaacaaaccgaaatccaccatcgaatccaacaaaccaatttaaatcgattcaatttcaacaacacccgaccgtccacaatcaacaatcaacaacaccacaccaccctgatctgacccaattgcatacaacaaccacacagcaacaggaacaggatcccacaaatttgtatattgcaaatttgccgccccacttcaaagaaactgatctggaggcaatgctatcgaaatacggacaagttgtttcgaccagaatattgcgtgatcagcagatgaactccaagggtgagtaaatatggttcgcaaacacggtttccattattgagcctctaattaattcaattggccaccgtgtttgtgggttctttttaatgatcaatgaattttaactaatatatcgttatttttcgcttaggcgttggctttgcccgcatggagagtcgcgagaagtgcgagcaaatcattcagatgttcaatggtaacacaataccgggtgccaaagatcccctgctggttaagtttgccgatggcggaccgaaaaagaagaatctcttcaagacgcccgatccgaatgcgcgtgcgtggcgtgacgtctccgcggaggggattcccgtggcctacgaccccacaatgcagcagaatggagtcagcgtgaacgtgggcacacccatcggagtgccctactcccgcttcagcgccccccaggtgggtggctatccagtggccggctcccaatggattccgggttacatgatgactcaggtagatgatcaggtgagtagtggatatacatccattatgggtgtatttgacactggactgaattgcatgactgaaaactgtcgattatggatgatttatttaccatttgttttggtcgatttataatgcttattgcggttttcaacttatgcttcagtccagtgtcatgtgggattaataagagctttaaaaatgtatttcaattagacttcgtattctccacagtacatgcagatggcagctgcccctccgctgggagtaacctcatacaaaccggaggcggttaaccaggtgcagccccgtggcatctcgatgatggttagcggtgatacgggcgtgccatatggaacaatgatgcctcagttggccaccctgcagattggcaactctgtaagccatcgatctctgatctcctcccgaaagtcgagactttttctttcagatttccttgattagaggcagatatacacatggttgtagtagaatacacatgtttatatctgctggaatccttgtcgattgaaaagaaagaaaaatagtccgaatccatacgaatattctcagtgcgggctgtgtataataaatattaaatgttgagacctaatttgtactttttctactcctttcttttattccaattaatttcctcttattttgtattgcgattccttttcgaatttttatttttatttattttgcgtttttattttcggtttattttatagaacttttctccatcgttacagtatattagtccaacttatccatattatgcaccaccaccaactattataccaacaatgccaatgacagattccgaacaggctagcacagctgcatcacccgacgaggcatacacacagtatccacatcaagccgctcccaaataggtcttcgcgaggtgagtgaagtcttctcagctactgtcttctctctgttcctgtctctgtcacagtcctacaggattaacatttctgtttgcttctcaatctctggccacgtttcccacaaaataaaatccttagatcgaattttgtttacttgaaccttattgctcatgttaactgaaacgtgtatgataagtaaaaaaacaaggttcaagttcaaaattattcgcttaattgctgtttaactgcgtttaccaacactgccttgcatgtgaactttctgcttttagagctctcgtactttcaattattcgcgtcccgttcacccttaaacaaaagcatctaagtcacccaatttcatttgcatttactgagctttaccttaaaaacttcaaggcttcatcgtttcttttaacacttaaacacgcttaccaacactgcaccttcaaacaacacaaaaaacacttaaattgactatcatcggcttcatgtgttttgtgtgctctgcttgttgttgcttgcctgtttgcttcagatctgttcattaccgatacttttaaaacaattcactaaatactaaacaaatatattttacttattttcttaccaaatttctgcggcttctttttgatacaacaacatggctctctttcttatatagtataggtactaaacagtctattcactggtaacccatactaggtaaacatcatttacttctcattcagctcatgtgcatgtaacccagcttaaacttatttctgtgctttaacagatattgaaaagactccctctaccctctcccatttccctaaagctaactatttcttaaattcatgtgtacttatatagactttaactcttttagctataatatattagtaccccatttgagtactatataaattggacgagagtgagagcaagccggaggcggagaagcggaaaagccaaggagggaggagaatcaacatcaaaagcagaggatcggataaaggagtct

SEQ ID NO: 22352 - DNA, 1308 bp, DROSOPHILA
atgtatgtatatggccgatcaagtgacgtgactgctgtatcaactttttcaaaaagcttccacagttgtgtgggcgcccgaaacgcatttaatttatataagtcacgtgagagacattttttatgtggctttcggcaaggagcaagcagcaacgagcagcaaaaaccctccccaatcagagaaaaagccggatttggttgccttgatttgatgagttttgcaaccctcatcccaaaggggttttctacgaaaagtgaaatccgctcaggcaatacacaatcgcctcgaagaatttacggtcagcgagtgccgacggcagcctcaccgagcaacaccaactcgagcagctcctcgaacactggctcccagagcggcaccctgagcaccagcctgagcaacacgacgaacaccaacacgaacatgggtcccaacggcacggtacagaatcagaaccaacagggcggcgagcagttgtccaagacaaatctctacattcgcggtctgcagcagggcacaaccgacaaggatctagttaatatgtgtgcacagttacggcttcgtcgacttcgagcagccagccttcgccgagtgcgccgtaaaaggattgcaggggaagggcgtgcaagctcagatggccaaagcgttggctttgcccgcatggagagtcgcgagaagtgcgagcaaatcattcagatgttcaatggtaacacaataccgggtgccaaagatcccctgctggttaagtttgccgatggcggaccgaaaaagaagaatctcttcaagacgcccgatccgaatgcgcgtgcgtggcgtgacgtctccgcggaggggattcccgtggcctacgaccccacaatgcagcagaatggagtcagcgtgaacgtgggcacacccatcggagtgccctactcccgcttcagcgccccccaggtgggtggctatccagtggccggctcccaatggattccgggttacatgatgactcaggtagatgatcagtacatgcagatggcagctgcccctccgctgggagtaacctcatacaaaccggaggcggttaaccaggtgcagccccgtggcatctcgatgatggttagcggtgatacgggcgtgccatatggaacaatgatgcctcagttggccaccctgcagattggcaactcttatattagtccaacttatccatattatgcaccaccaccaactattataccaacaatgccaatgacagattccgaacaggctagcacagctgcatcacccgacgaggcatacacacagtatccacatcaagccgctcccaaatag

SEQ ID NO: 22353 - protein, 435 aa, DROSOPHILA
MYVYGRSSDVTAVSTFSKSFHSCVGARNAFNLYKSRERHFLCGFRQGASSNEQQKPSPIREKAGFGCLDLMSFATLIPKGFSTKSEIRSGNTQSPRRIYGQRVPTAASPSNTNSSSSSNTGSQSGTLSTSLSNTTNTNTNMGPNGTVQNQNQQGGEQLSKTNLYIRGLQQGTTDKDLVNMCAQLRLRRLRAASLRRVRRKRIAGEGRASSDGQSVGFARMESREKCEQIIQMFNGNTIPGAKDPLLVKFADGGPKKKNLFKTPDPNARAWRDVSAEGIPVAYDPTMQQNGVSVNVGTPIGVPYSRFSAPQVGGYPVAGSQWIPGYMMTQVDDQYMQMAAAPPLGVTSYKPEAVNQVQPRGISMMVSGDTGVPYGTMMPQLATLQIGNSYISPTYPYYAPPPTIIPTMPMTDSEQASTAASPDEAYTQYPHQAAPK

SEQ ID NO: 22354 - DNA, 4583 bp, DROSOPHILA
agcaccaattccaactccagctcctgccaaaccaccagctgatcccagtggctcataaaaacagctgactccaattagccacatggcaccggtaccggcatcctcatcggcatctcggactcttctctccgcacgcacatggtcaactcaaagcccatgcaggagaattcccatgcagactttggagcgattaagtttaacgagccggcaatgaggagttttcggtttcggagagcatagaacgtgcataaaaaaagaaggtggagctctgacacaaaacagggaatatggctaaagtgaattctaaataaaagttactggagaattggctaagatatatgaagtatcgattctgaagtatatgcttcaaaatattattatgccacattaattcatatgcattttttctcttgtgtactgtgcttgaaatcagtggttcaccttgattaactcatttgatggaaccacttaattgaaaaatgtcttcccttttaaatgtgctctaataaaaggaataaataaaaattgctggaataaataagaatcatcatgtgagttttttatcatgggtaagtttatatcaagttttattcattaattgttcaaatattcaatgctataatcacaatctgttttagttgaatatggccaacatctatctcaaacaatatcaaataaatacattcattttaaaaaaagaaaagattgtagagtggggttccaattgtccacatgttttacttccctatcgtcatcttatttgtataaaagatcattttcttatttttcagccccggcgagtggttcgtgtcagagttcaattaattcaattaagtgattgggtgcgtgtaaactcagatcaacatatcagatcaatgggcagcgccacagaacgcagtagctttctacgatagctttgaataatgaatatagtccgctgttggtatttattcatatctttatttaaataatgcaattttaggttctacttaagtggagtctactccggcggcgtgttgtcgtgaatccactcggaaaagtgggccacggatgtgtagacactcgggatgcgcagaccgccgcagttatcagatccaaaggacatgatgccgatctgtgggataagttacattaagttttagttgcagataaatacatatataaagtttttcaagcactagatagcaataaattatgatttattgaacggtgaatcgaatgcgtttcattacctgtgaaaagatgccgttctcttgtatgaaaagcggtgctccgccgaatccttggcagacgtccttgccctcgccgccggcgcacatccattgaccctcgatggagttgggcgattccagggcacccgtggagccgtagttgcgcaggcacaggtcccagctggtcagcggcacgtccagatgcgacatctccggctggcggacactcgacgtggacatcttgccccaaccggcgatggtagcccgtttgcccaccaccaggttggcgcgtgtcttctgcaggcagatgggctgtgtagccactggcggtgcgagattggaaatgggttggccgccattaatcttacgttcgacttctgatcgctacctgcccaaatctgcaacattgttttctggcccaaaggggcttgcgtatactttttcgaaagggggcttcccgaaacagaggcacttagtttgaaatacaaatgtatctattagatgagatctgatcgatgcacatagaattcgatttatcgtacaaaagtgcgacttcatttctttgatatttggcagcagctcttttagtgtctcaagtaataattttgtttgtgccaaaaaaaggagctccccattggaacacgcccttgctctgggcccattgatttatctcggaccgctgtattttattgggcattataaagcaataaggatgaacgcaaacaagttggccagccaactgggcgacgccccttttgggtcgccggtaatgatctgtttacgaactggccaaattgcaattagccaatcgattgcctcaccgatcgaccgtccgctgctccctaatgacccctattcgatatgctatgtgcaatatggttttacgcctccaaattcaatttcagaccatcagaatcacgttcgatgtgattcgagtccgcggcagcgggaacccacaatttgcgagtatcgtaaacacaagccaagttctctcaatgaagtgaagtgctgaatggaccaggattcctcgttgcgtgtgagaggagttacattcgatacattgggtataccattaccgaagccattgaaccgaggccaaaagccacaaatcaaagtggatccagtgaccaggtcgcgatcaacccattagttggtacagcaaacacgcagcaaagcccgacgccgcccaattaagtgacatgtggggatcggaagccccaacctcgtcgaatcagctacatgacatgtgagcttggagcggtaggtcgtgtggagtggtcggaaagatgacagaacaaaacgatttttaattaacgccgacactgccaagcgtaaccacccattggacttcgatatatatctatttatgaatctagatatatgtacatatataggggtgcctcctccccattcccgcccagaactcacccgaatagtttagcggcgttttaagcaccagcagagcaatgtcatggtgatactggccctgcttgtagtcgggatgcacgatcacatggctgatggcgtggttgaccgaccgcggtgcacagaatccggtgttggcgcagtccggatcgctactagtatcgtactcgcccacgcgcaccgatgacctgcaaaagtgcggagtgtgggagaaagtcgatcagatgccttgccaacccgtaaccatcgtgatgcactgcatccagtggccaacttacagtcggtgtccatcggccttggccagagcgcaatgggcggccgtgaggatgacccggcgggcaattacggctccggcacacggataagcaaaagctccagtgttgacatctaaataataatttaacaattaattaagaaacatgtagaaataatctattattgacacaaaaaatgtatatctggggactatatagctcttacgtttgaagccgatgcgcgcgacaaagggataggagcccagtcccttgtagaagtgcccctggaccagtgacttgccgcacacctggttcttctccaacggactgctggggcagcagacgtagggcagctcctcgctggatccgccgcagtagagcgacttgtcgccgtagtagcaactccgggcaacctcgtagatcagggcggtgcagtcgtggagcggggtgcactcggtgcccacggagcagcccgtctgtccggcgttttgcaccacgtcgtagtaggagcgggcggccaccgagtgtccagtagtctcgttgctccgtgctccgctcctttgctctgcgcttccgtggctcacgggcaccaggagtttctctgcaagatgtttatgttaggctgggtcttggtttttggacactaactattgggatttttcatgcaccgttcacatttaaatcgaatttcatgatacagataccatcacaggagtcattttaagattcaagatacttaatgatattatattaaaagttatagtaatattcattctctaactttgataatgttatatttatcacttttagtagcactattatccttttcttggcttatagagagcaaccactttttaaactttatcctaccgaattctcccgattccgctcgaacgattgcaaatagttgcaaaattggtaaaagtattgttaacgcgtacattttcttaaacttttggatatatactttatactctatagttgtaatactatttgtaggtaagggctcagaacttcggtttccggtaattcgaaccgtgcaggtgaacaaaactcagtcaactaaacgaggcgatgccccaactggccgatctggccaaatgaaaatgaaaatctacgtattcacacaagcagataagtgtatcgcacacatattaatttttttgttatatactggtctgcggttattaactgatttttatgacagtttggtctcgattcgcgaccatttccaggttgtaatttaccctccagccgttcagatagatacatatttctatggcatttaatggcagaactgcggatccgtctgtccactgcaagcgatctcgtgaatccgtccgcagtgcactgtgtgttttttttttctttctggccattagtggtcgttttggtaaaagtgagtttagggtcggtgggttaggccttaggaactatagaatgccctacaacatacacaaagtaagtggtatacataacaaaatagatataactttgatctgtatcatcaacttcagagcatttcagcttattacttaatagtttatatcactttcaatcaacttctttaaaattttccgcttttggtaggccactcccaagctccacttggcctacactttcccctgtttggtgatgtatgctattatttaagtgagattagcttacgtttctcgcattctattttgttttg

SEQ ID NO: 22355 - DNA, 1110 bp, DROSOPHILA
atgaaattcgatttaaatgtgaacgagaaactcctggtgcccgtgagccacggaagcgcagagcaaaggagcggagcacggagcaacgagactactggacactcggtggccgcccgctcctactacgacgtggtgcaaaacgccggacagacgggctgctccgtgggcaccgagtgcaccccgctccacgactgcaccgccctgatctacgaggttgcccggagttgctactacggcgacaagtcgctctactgcggcggatccagcgaggagctgccctacgtctgctgccccagcagtccgttggagaagaaccaggtgtgcggcaagtcactggtccaggggcacttctacaagggactgggctcctatccctttgtcgcgcgcatcggcttcaaacatgtcaacactggagcttttgcttatccgtgtgccggagccgtaattgcccgccgggtcatcctcacggccgcccattgcgctctggccaaggccgatggacaccgactgtcatcggtgcgcgtgggcgagtacgatactagtagcgatccggactgcgccaacaccggattctgtgcaccgcggtcggtcaaccacgccatcagccatgtgatcgtgcatcccgactacaagcagggccagtatcaccatgacattgctctgctggtgcttaaaacgccgctaaactattcggtggctacacagcccatctgcctgcagaagacacgcgccaacctggtggtgggcaaacgggctaccatcgccggttggggcaagatgtccacgtcgagtgtccgccagccggagatgtcgcatctggacgtgccgctgaccagctgggacctgtgcctgcgcaactacggctccacgggtgccctggaatcgcccaactccatcgagggtcaatggatgtgcgccggcggcgagggcaaggacgtctgccaaggattcggcggagcaccgcttttcatacaagagaacggcatcttttcacagatcggcatcatgtcctttggatctgataactgcggcggtctgcgcatcccgagtgtctacacatccgtggcccacttttccgagtggattcacgacaacacgccgccggagtag

SEQ ID NO: 22356 - protein, 369 aa, DROSOPHILA
MKFDLNVNEKLLVPVSHGSAEQRSGARSNETTGHSVAARSYYDVVQNAGQTGCSVGTECTPLHDCTALIYEVARSCYYGDKSLYCGGSSEELPYVCCPSSPLEKNQVCGKSLVQGHFYKGLGSYPFVARIGFKHVNTGAFAYPCAGAVIARRVILTAAHCALAKADGHRLSSVRVGEYDTSSDPDCANTGFCAPRSVNHAISHVIVHPDYKQGQYHHDIALLVLKTPLNYSVATQPICLQKTRANLVVGKRATIAGWGKMSTSSVRQPEMSHLDVPLTSWDLCLRNYGSTGALESPNSIEGQWMCAGGEGKDVCQGFGGAPLFIQENGIFSQIGIMSFGSDNCGGLRIPSVYTSVAHFSEWIHDNTPPE

SEQ ID NO: 22357 - DNA, 5013 bp, DROSOPHILA
atacccggacgcgccatcctccgtttccacgacattgagtaggcgtggaggaggatatggttccccatcaaggcattaactcatttaatatggatatctgttagctgtattcggaagacaaccgacaaaaccgacaaaacaacctgcaacctgcgacactctcgaagcggattcagaaatgtgcttattttgtagccggtcattgttttgtaaccttaattttggactgcagacgaactcctcgttttaattgatttagcgttttaggcatttttagtattatgtacatatagattgtgatttattttatttgtaagccaccaccatgattctacttttgcaaagtcacccatcacatcgccatattagccggagtcaaaattcggcggcttcttcaatgattttcgattaagcaaaaagcccagcagaagcggattacaaaataaatgttatacatactatacacgaaattgttacgcatgcgatgcaaatgtttgattcaattgcttgatgtttgtactcattacgtacccaacattatactctactcttattcacaaataaaaaccattaactatcaatccatgggggctgatctaggttgcaactgcttttcctgatatttcttaggtgcctccgtaggatggccaatttggcctctatatgctaatctttctttagcatactgttccttttttcaaaagatattgtaggcaatatcattcgattacaaagagtatatcatcgctagcataaaattgatgtatagatatcaaattagtttcaggacagactagttttagccgatgaagcttaaggtgcagcaaattttcactttaaaaacgttttttttttagtttcaaatgtaacagctatttttaaaggtgagcaacaaacagatgtggcaaccccataagcgcttctcttatggttggcagcccaagccggactgattggtgttggaaaacgccgcaggtggaattgcgccaaaaactgtaaacagcgcggcaagctgatcgcaaaagcaagggagtcaatctagtgaagacccaattgaattattgctgacgttggcgacttgttaagcgactgatagggaatcgcagcgcgatggttaataaagagaacgcccgcagtgtgggccagcaggtgaagtggatcggaagccaagacgaactgccgccggtgaagaatctggagcacaagaacgtctacttctaccagaagtgcatctacggtccgctgactttgtccgttggcgactttatactggtgtcgaacgcggatgccgccgagccggacacagtgagtggatgcgacgtggcccggatcctgcacatgtacgagctgcgcgagctgaccgatcgcgagccctgccgcgccatcgtccagtggtactcctggccgaaagccattccgcacaacaaatacgacgacgacgaggtggccatagactttagcctggaggtgatcgaggagcatcgcccgtacgacaacgacgtggccctcggtgccatctatcgcaagtgcatcgtgctggagggtacctcaaaaacgtcagcggaggagattctcaaacgacacgccaacaaactgaagtccacggcctgccccatgtttgtcagccggtacaggtttgtcaaggtgaagcggagctatcgcttgattcccttggaaattcacttggagcagccggaggacaatgccaggccaacccgctcatctcgcaaatccctaactgcacacagagaatccaagcgatcaatatccgcccgccacgatgacacagctggcaacaagggatcctcagtggaaaaacgacgacgtgcgtccatggcagcctcgagttccgtggagttcatcgatgtcaacagcttcatctgcgagaataaagtgtcgccaattaagatcgtgggcggacgcagtgtcgtccggttgtctgagaagaaaaatgctccggagatcaatgccaactatctgccggcttcgcctctcactgagaagaacgccaaggtggagacaccgaaatcccgggcctcggcagcccgccgcaacctaaatctcagcctggatcgcggagccgacaccacagccgactcagactgcctgaactactccattgttcagcagactcccgatcctaaaacgccttccaacgacatgaagatcaagctgcgcctttcggagagaaggcgttcggtgcgcctcgcatccatggacgtggatcccttgtcgttagaggaggccgtacaagaacccaatgcccagggacgcaagcgattgggcgtggccaatggcgatatctaccatacgcccaccaagaaatccaaagagcctctggaatcagctgcagctaccgagcaaacgccctcgacgaggcgtaaaagcatcctgaaatcagcaactagtcgattgggtaagttgtcgatcttccacatacataatagcacacactaaaatgattttcctcgatcaatttagccgagggcacgcccaggcgcagtattcacctctcgaacattgtggagcagcgcgtgtttgaggatgatgaaataatatccactccgaaaagggggcgctcgaagaaaacagttcaagacaatgacgaggactattcgccaaagaaatcggtccaaaagacgccaacacgaacgcgtcggtcaagcaccaccaccaaaacagcgacgacacccagcaaagggatcacaaccgcaactgcaaccccgatgacgccctcccaaaagatgaagaagatacgagccggtgaacttagtcccagcatgcaacagcgcactgaccttccggccaaggattccagcaaatccgaactgcagctagcacgcgaacagcttcatgtgtctgttgtgccaaagagtttgccgtgccgagaacgggaattcgagaacatttacgcctttctggagggcaagatccaggatcagtgcggcggctgcatgtatgtgtccggagttccgggcactggcaaaacagccactgtcactggcgtcatacgcaccctgcagaggatggctaaacagaatgagctgcctgcctttgagtatctggagattaatggcatgcgactgactgagccgcgtcaggcctacgtccagatctacaaacagctcacgggcaagactgtgtcctgggagcaggcacacgctctgctagagaaacggttcactactccggcgccgcgtagagttaccactgtgctgctggttgatgagctggatatcttgtgcaaccggcgccaagatgtggtctacaatttgctcgactggcccaccaagtcggcggccaagctggtagtggtcaccattgccaacaccatggacttgcctgagcgcttgctgatgggtaaggatcacctccataactgaaacttgtggaattccctaacgtgtattgtttttcctttaggtaaagtcacctctcgtcttggacttacccgtctcacattccagccgtacagccacaagcagctgcaagagatcgttaccgcccgcctgggaggatcggagacttttaaaggcgaggccgtgcagctggtggcgcgcaaggtagccgccgtttccggtgatgctcgccgagctctggacatctgccggcgtgctacagaaattgctgatacggctgcggtcaagtgcgtcacaatgctgcacgtgcagcaggcattggccgagatgatagccagtgccaaggtgcaggccattaggaactgttcgcggatggagcagatcttcttgcaggcaattgcagctgaagttacgcgcactggcgtcgaggagacgactttcatgggcgtctatcagcaggtggaaactattgccgccttcatgggcgtgacctttccaccaccaggacgcgccctgcgcttgtgctccaagctgggcgccgagcgactcatcatcagtgaacattcccgcaatgacctctttcagaaaatcctgctcaacgtcagcgctgatgacattcactacgccctcagagtggaagagatggtcaactaaggccataatgcaagaacaaacgaataagaagttaattaagcacattaaattctcatctccatttttaagactccaaatccaggttacttgacctatcacatttccaccatttttaaatcattcattattcatacaacattgtaatagcttaagcgtttttaaattatttctttttaagcgtcatgtttaaacaatttaaagtacaaactcgttactaaaaataccaaatagaacaccagcacagtgtaacagtcgtaaagtacttttggggaaaacacggagtagataaagaggtggtagcggaagccaaccaagaggcagaggtagaaggccgccggcaacatgattagcgcggcgtagagcggagctatcagcgaatccgcggctatcgagtacggaggatgtagctgcatgatacccacactgcgcagatccgagcgcagggtgtggacaactaaatagaggaatgcatgaatatccgcactgtacgtgttgagggtgacaaagatggcaacgatcgacgggttgtagtttgtctgtccgatataaccaggcgttaggtcaatggtggacaggctgttcgagttaccctggtagaagaagaacatcctggccaggaatatggtcatgatgatcttgtacacatgcaccaatcgcacggagaactttcgggcactggtgccgtagacatcgcacagcttgtacgtttgctgcagggccacgagaagtacgggtagtagtaagatgttgtggacccgttgcaaaagtgcagccaacagcagcgagctggtaaggttcgtctgcagcaactgcaataatgcacctgtgggcggcaccttcccaaagctgtgcgcttgaggcagtgccgcccgatagcccagcatcaaaacaagggccaaacagcaccagaagatcaccagcgtcggcaccataagttttgcactggaaattattaaaaatatactataccacaatattcaggctgaactcatttaaactt

SEQ ID NO: 22358 - DNA, 2885 bp, DROSOPHILA
cagcgcggcaagctgatcgcaaaagcaagggagtcaatctagtgaagacccaattgaattattgctgacgttggcgacttgttaagcgactgatagggaatcgcagcgcgatggttaataaagagaacgcccgcagtgtgggccagcaggtgaagtggatcggaagccaagacgaactgccgccggtgaagaatctggagcacaagaacgtctacttctaccagaagtgcatctacggtccgctgactttgtccgttggcgactttatactggtgtcgaacgcggatgccgccgagccggacacagtgagtggatgcgacgtggcccggatcctgcacatgtacgagctgcgcgagctgaccgatcgcgagccctgccgcgccatcgtccagtggtactcctggccgaaagccattccgcacaacaaatacgacgacgacgaggtggccatagactttagcctggaggtgatcgaggagcatcgcccgtacgacaacgacgtggccctcggtgccatctatcgcaagtgcatcgtgctggagggtacctcaaaaacgtcagcggaggagattctcaaacgacacgccaacaaactgaagtccacggcctgccccatgtttgtcagccggtacaggtttgtcaaggtgaagcggagctatcgcttgattcccttggaaattcacttggagcagccggaggacaatgccaggccaacccgctcatctcgcaaatccctaactgcacacagagaatccaagcgatcaatatccgcccgccacgatgacacagctggcaacaagggatcctcagtggaaaaacgacgacgtgcgtccatggcagcctcgagttccgtggagttcatcgatgtcaacagcttcatctgcgagaataaagtgtcgccaattaagatcgtgggcggacgcagtgtcgtccggttgtctgagaagaaaaatgctccggagatcaatgccaactatctgccggcttcgcctctcactgagaagaacgccaaggtggagacaccgaaatcccgggcctcggcagcccgccgcaacctaaatctcagcctggatcgcggagccgacaccacagccgactcagactgcctgaactactccattgttcagcagactcccgatcctaaaacgccttccaacgacatgaagatcaagctgcgcctttcggagagaaggcgttcggtgcgcctcgcatccatggacgtggatcccttgtcgttagaggaggccgtacaagaacccaatgcccagggacgcaagcgattgggcgtggccaatggcgatatctaccatacgcccaccaagaaatccaaagagcctctggaatcagctgcagctaccgagcaaacgccctcgacgaggcgtaaaagcatcctgaaatcagcaactagtcgattggccgagggcacgcccaggcgcagtattcacctctcgaacattgtggagcagcgcgtgtttgaggatgatgaaataatatccactccgaaaagggggcgctcgaagaaaacagttcaagacaatgacgaggactattcgccaaagaaatcggtccaaaagacgccaacacgaacgcgtcggtcaagcaccaccaccaaaacagcgacgacacccagcaaagggatcacaaccgcaactgcaaccccgatgacgccctcccaaaagatgaagaagatacgagccggtgaacttagtcccagcatgcaacagcgcactgaccttccggccaaggattccagcaaatccgaactgcagctagcacgcgaacagcttcatgtgtctgttgtgccaaagagtttgccgtgccgagaacgggaattcgagaacatttacgcctttctggagggcaagatccaggatcagtgcggcggctgcatgtatgtgtccggagttccgggcactggcaaaacagccactgtcactggcgtcatacgcaccctgcagaggatggctaaacagaatgagctgcctgcctttgagtatctggagattaatggcatgcgactgactgagccgcgtcaggcctacgtccagatctacaaacagctcacgggcaagactgtgtcctgggagcaggcacacgctctgctagagaaacggttcactactccggcgccgcgtagagttaccactgtgctgctggttgatgagctggatatcttgtgcaaccggcgccaagatgtggtctacaatttgctcgactggcccaccaagtcggcggccaagctggtagtggtcaccattgccaacaccatggacttgcctgagcgcttgctgatgggtaaagtcacctctcgtcttggacttacccgtctcacattccagccgtacagccacaagcagctgcaagagatcgttaccgcccgcctgggaggatcggagacttttaaaggcgaggccgtgcagctggtggcgcgcaaggtagccgccgtttccggtgatgctcgccgagctctggacatctgccggcgtgctacagaaattgctgatacggctgcggtcaagtgcgtcacaatgctgcacgtgcagcaggcattggccgagatgatagccagtgccaaggtgcaggccattaggaactgttcgcggatggagcagatcttcttgcaggcaattgcagctgaagttacgcgcactggcgtcgaggagacgactttcatgggcgtctatcagcaggtggaaactattgccgccttcatgggcgtgacctttccaccaccaggacgcgccctgcgcttgtgctccaagctgggcgccgagcgactcatcatcagtgaacattcccgcaatgacctctttcagaaaatcctgctcaacgtcagcgctgatgacattcactacgccctcagagtggaagagatggtcaactaa

SEQ ID NO: 22359 - protein, 924 aa, DROSOPHILA
MVNKENARSVGQQVKWIGSQDELPPVKNLEHKNVYFYQKCIYGPLTLSVGDFILVSNADAAEPDTVSGCDVARILHMYELRELTDREPCRAIVQWYSWPKAIPHNKYDDDEVAIDFSLEVIEEHRPYDNDVALGAIYRKCIVLEGTSKTSAEEILKRHANKLKSTACPMFVSRYRFVKVKRSYRLIPLEIHLEQPEDNARPTRSSRKSLTAHRESKRSISARHDDTAGNKGSSVEKRRRASMAASSSVEFIDVNSFICENKVSPIKIVGGRSVVRLSEKKNAPEINANYLPASPLTEKNAKVETPKSRASAARRNLNLSLDRGADTTADSDCLNYSIVQQTPDPKTPSNDMKIKLRLSERRRSVRLASMDVDPLSLEEAVQEPNAQGRKRLGVANGDIYHTPTKKSKEPLESAAATEQTPSTRRKSILKSATSRLAEGTPRRSIHLSNIVEQRVFEDDEIISTPKRGRSKKTVQDNDEDYSPKKSVQKTPTRTRRSSTTTKTATTPSKGITTATATPMTPSQKMKKIRAGELSPSMQQRTDLPAKDSSKSELQLAREQLHVSVVPKSLPCREREFENIYAFLEGKIQDQCGGCMYVSGVPGTGKTATVTGVIRTLQRMAKQNELPAFEYLEINGMRLTEPRQAYVQIYKQLTGKTVSWEQAHALLEKRFTTPAPRRVTTVLLVDELDILCNRRQDVVYNLLDWPTKSAAKLVVVTIANTMDLPERLLMGKVTSRLGLTRLTFQPYSHKQLQEIVTARLGGSETFKGEAVQLVARKVAAVSGDARRALDICRRATEIADTAAVKCVTMLHVQQALAEMIASAKVQAIRNCSRMEQIFLQAIAAEVTRTGVEETTFMGVYQQVETIAAFMGVTFPPPGRALRLCSKLGAERLIISEHSRNDLFQKILLNVSADDIHYALRVEEMVN

SEQ ID NO: 22360 - DNA, 3040 bp, DROSOPHILA
attcgtcatctgtgaagttcttggtaaaaccacatagggtgttcccgaatttcgacggaatatattaaaattatttagttttttattcaataatcttcagagattggtcacaaaacgaaagggtataatgggatatacatatgagctagggacgtggcgtggtaaaggcatcgttccagcttgcccaatgcttctccgtcttcaggctgtggaagccatcatgtgctctaacgtgtcgaggtccctttatatggcttcctggcttcacaaatggatctcctccattttcagggtcaggcgagccgttcgggtctgggttgtccgtgctattaaccatatcggtgctatttgttggtgattctgtgacctccgaccccgcttctgtggtctgagttaattctccgatggaactggcttctgtaactggagacgtttcgccatctgttggggacgctggagatgattcagccgcaggggtttcctgagcctcgagcgcggctaccaagaatatagcgattccaatctagaacaaagaaacgttcgattatgtgcaataatgagggaatgccccattggcactcaccagcttcagttcaagtttcgccatgcctatcgtcacacctgacacatagtatgtgtacctatactgcgtcgaaaccagaagcgccgactgggcaaagccaccttttatagtcgctgcgcaggtggaatcgattggagcagttctaaattgattgcgggaatcgctgcctggttctgcgggcagaactaattctcttagtgaccaactgatagatggcgatctttaatttgcgaacgcagtccgggaaattccggcagacgcatccaacacctgatgccaatcgggtttttcgagagagatagagagctgattgctctggggctgtctgtaattgttggcttaccgatttccataatggtgggcgattctggagctatataagtcagctatggccggcagagaacaatcagttttcgcttggcccttgctagttgaactcagtcggttgggatgttcatcaagttgcttctaattagccaggttggtgccagatcttggccaggacaaaatggctcgaactatgattaacttaacatacattttaattctagctgctggcgctgagttacgctcagttgtcgctcgacgaggctaaaaagcaaatcgatgcctcgctttacagcgaagaggagactaccgatgatacgcatctgccggagccccacctgcccccccaatatcagcctcatcatccccacaagaaggtgaccaccaccactcccgagccggaaaccacaactccaaagccagaaaccaccacgaagcccgcaatagagcaggagggtgaggccaccgctgctcccgatgacggactgggtcaactggatgatggcttgcaacaaaacaatgatggatctgcgcttccagagtccaccactccggaaccggaaaccacgacccctacgacgaccaccaccacaacgccaaagccccataagcatgagccccactttcatccccattcttatccgcatcctcacccctatccctaccccattcagtatccctacccccatccaggagtgatattctctgccgcgggacctaagcttactcctccatcgaccacaccgcccactgccaaagatgcggacaaggaatcgccggagctgtctggatatccctcctatccgaccttcagatcaccgtactcgccctaccaaccccaggtgttccctcagcctcgtaactggcccagcttcccaggatacggacctcccagtcccggtttcggatacccccacaaccacaatcacgatcacgaagaagactccggcgaagataagcccaaggacaagtctggtgaaaaggataaggacgaggatgtggctctgaagccaccaggatttagctacccgcaggtctatttgattccccgaagaccagtgatctctgtgcccagctttccgcgtccaggaggcggatatggttcgccctacggctacggactctactaacactctccgataaatactgtgaaaaatctccgagtccagatagtcaataatatcttagttttatttcaatcttgaaatgtacttcctaacacaataaacaacttttagattatattttcatgagtttttaatatttgcatataatatttaatgctttcgatcgtgtaaatctgagtacaaggttcttcactgaatgtgggactgcttggagttttctttcggtgcattaagaactagtaagtaagttaaaggctcctagattcgggaaaatgataattgatgatttgcgcatatgagattgagttatgggcttctgatttccctatcgtgtaatccccaggctgataaccccgggccccgacgctctcaccttggtgatttccagtcgaacgggttgggatcgtggttgcatttaattgcagcgcattccacccagtcaactcatagttctgtcgatcgtcggaagttcgagacgtgagtgtcagtcgagatctgcgagatgttgccgctccaattcgttttgctgggctgtctgttcatcgctcagggggtaactattcatcggtttgttccacaatttaggcttcaatgagttctatattttcagatatgccacactctgccggatcccaaggtaagtttgctagcaaacaatttagatagtatcttctttgcaatattccataatccacagctaagggtgcctcgtgaaactatcaacattcccacgcatctcttcaagccagtgagtccgaaatcgagcaacaaacctatttctaatagatcatccttaaatggcggaaacagctctgccctggccgaagcaaataacgatgtcgagtttctagaggtgagtctcatccaatacacttaatataaatggaaataaatatatatttattatccttgaagagatctagcggtgaagtggaggaggtgaccgacacctacgaagaggaggacgttccactccgacctatccccttccaacctcgaccgt

SEQ ID NO: 22361 - DNA, 969 bp, DROSOPHILA
ttggcccttgctagttgaactcagtcggttgggatgttcatcaagttgcttctaattagccagctgctggcgctgagttacgctcagttgtcgctcgacgaggctaaaaagcaaatcgatgcctcgctttacagcgaagaggagactaccgatgatacgcatctgccggagccccacctgcccccccaatatcagcctcatcatccccacaagaaggtgaccaccaccactcccgagccggaaaccacaactccaaagccagaaaccaccacgaagcccgcaatagagcaggagggtgaggccaccgctgctcccgatgacggactgggtcaactggatgatggcttgcaacaaaacaatgatggatctgcgcttccagagtccaccactccggaaccggaaaccacgacccctacgacgaccaccaccacaacgccaaagccccataagcatgagccccactttcatccccattcttatccgcatcctcacccctatccctaccccattcagtatccctacccccatccaggagtgatattctctgccgcgggacctaagcttactcctccatcgaccacaccgcccactgccaaagatgcggacaaggaatcgccggagctgtctggatatccctcctatccgaccttcagatcaccgtactcgccctaccaaccccaggtgttccctcagcctcgtaactggcccagcttcccaggatacggacctcccagtcccggtttcggatacccccacaaccacaatcacgatcacgaagaagactccggcgaagataagcccaaggacaagtctggtgaaaaggataaggacgaggatgtggctctgaagccaccaggatttagctacccgcaggtctatttgattccccgaagaccagtgatctctgtgcccagctttccgcgtccaggaggcggatatggttcgccctacggctacggactctactaa

SEQ ID NO: 22362 - protein, 311 aa, DROSOPHILA
MFIKLLLISQLLALSYAQLSLDEAKKQIDASLYSEEETTDDTHLPEPHLPPQYQPHHPHKKVTTTTPEPETTTPKPETTTKPAIEQEGEATAAPDDGLGQLDDGLQQNNDGSALPESTTPEPETTTPTTTTTTTPKPHKHEPHFHPHSYPHPHPYPYPIQYPYPHPGVIFSAAGPKLTPPSTTPPTAKDADKESPELSGYPSYPTFRSPYSPYQPQVFPQPRNWPSFPGYGPPSPGFGYPHNHNHDHEEDSGEDKPKDKSGEKDKDEDVALKPPGFSYPQVYLIPRRPVISVPSFPRPGGGYGSPYGYGLY

SEQ ID NO: 22363 - DNA, 5373 bp, DROSOPHILA
cgtcctcgacggcgcttaaccggcgatggttcagatggcttacatctaggagggacaaaaagattagggcttatagtgctattatattagacttactcctcgttttcgctttccactggatgctttacttttcgagagcttcgacgtagatgatacgacttcttttccacttgatctctttaaggaaattaatgttatattgtaaagacggtaagtttgaagaacacttactcatcgctttccggaccagaacaaaattcccgatcgctgccactcgccggctgccacttaagttccaaagccgtcgcttcggtgtcgtccacttccacttcggacttgttaccgccatcatcgaggtctacttccgtttttatgttctgttccgcaggaatatcgatgggcaattcgtctagacattccctcaactgagccagcagctctccatggacttttctggcctgttgcacaaaggtataggcactttccattcgtctccagcactcgctgcatatatgttgcggcaggttgtcatcggtgttttccagctgggtttaaggatcaggattgttacaaggttaggaaggtatgttctaagaccaagttctgttaacagactcacatcgatttgcgtcaattcctggagcaccgcatagtagcttttggaggagtctttgtccaggcaagtggacaagggcagcaattggctgttctgcaccgcacaggtgcggcacacgtccgacggaagcattttttccgtagtgagctcgcttagctcatgattttcaactagaatgtttatgaaaatcactgaaaaacaaattaaacttataaatgcaacaagagcccttttgagtgtgaccgatgtttatgcaatcagctgtttcacaatgcaatccgcgtttttcagcactactcactcagctgttttttcagttggctaaactgacactttttgctctttaacttggttataaaaaaagtaaaataaatgcgttaggagatgaccaggacgtgcagagtgtgtggctgcgacgacggacgctactggattgaaacgcccgtggagaagtacgcggagaagaccttcgtccagctgctggtcgagctaacgcgaatcgaggtgggtgaattgtccttttgtcattcaattggtgccctcatctatattaatttactttatttaaatggtactaaaaggtggtcatggcgcaagctgagaagttcccacagtggctgtgctacgcgtgtgccgagaagctggagagcacctacgattttgtgctgcaggcacgtcgaacacacgagctgtggctgcagaaaatcggggattctttgaatggggatgacgagatggagggcactgcggccttggaatgcctgcgtgagacacccatccacctgtttgagattgaaggcgtgaccatcaagacggaggaactggcttcaacgcaacaggcgcccaaggcagatcctttagtgcgcccgcgcattgtcaaacggagtattgtacactttagcgattccgatgaagacctggatgatgtgcctctgcgtcaacgtaagatagcagcctcggtctgcggctctgacacgacgaaggaaaatgtttgcgagctgtgcaacaaggtcttcagatatgtcaccaatctgtatcgtcacaagcagagggaccacggaattctgggcaagaacggagaggagtatgaaacaactttatgctagctagatagccatctaaaagttttttattgatagttatgaagaagactattacaagtgcgatctgtgcgataaaacctacaagtacgtgatggcgctggtgaagcacaaacacaaagagcacggatccagtctcctgtcgaataattccgggcgaaagatgccgtcaactttggccgaagatgccaatccatacagtccagcatccatctctgaaacatccactaatcaaagcagaaccaacaacgactccctggtacacagcatcatcaaggcagtggtgtaagattaatgtcattattcattatgcgggtgccacaaatatcacatcaattccatagtaaaatccaaaacggaaatcttttgtatcgcaaaatgtgtctaataattgccatctgcccgcttgattgctagtccatttacctaattgatatttgcactattcttttttgcagactctccgatgaggatggccacagtggtgaagatagctactacaattgcgatcagtgtagtaaatcgtacaagtacattgtcagcttgatcaagcacaagcacaaagagcacctagacaaggagtcatacaagcagtcggatgacgaagacgatcggcctctggcctccacatccgcctcggcaagtgcaccaactgcgaaaccttctaggatcaaccgaagagtcgacgggttcgactttcatcgcagcgagccaaacggagccaaggaaatcaagtgcatgatatgcttgcgacggtttactaaactacgggagcttaggaatcatctacagaaccatcccactgatttcgattttgaggcgcatggcgagcctatcgagcgcattgcggaaggatttttcaaaacagccgttgagtccacggcagagggcttaaagcggcgaatatttagagatctcagaatgggcgtctatggacgctactattccatcacaaatcaagcgcgttatgaaatgaccctagatagctcggatacggacagtgatggcgatggcgacgacaatgtcgtcatccgacgaagttactcctgtgaattgtgcgactctccggaggctaggtggccgcgcaagtacctgctacaccagcaccatcagaaggagcacacatggctagacgcccctcatgtctgccagcgctgcgactcgcggtttctcaatctccagcttctgaagcaccataccagccagctgtgtcaaaacactttgaagcgctttatgtgcgacaagtgccctcagcgattcttttggcgtcgcaatttgcgcgcacaccttgtcgagcacaagtgcaaggtgaggccatcccgatctcctgtgaaatatttaaataattagataatttaaattaattttagtttattcttcttataatttattaaattgaaattataatgtatcatccaaagcctatgaatttatgttttaatttatctgattaaatgcttctaattaaatgctaaaccaaacttattttacttttctgtattcttacagcaagaatcttatccatgtgaccaatgctctcgtagctttcaagacaagagcgccgtgaccaaacataagctcatgatgcatcgggatagtaacatggagctccttccctgccgctggtgcacccgtacgttctaccgtcctgccctgctgtacaagcatttacagagacacggattcactggtcaggacctacctctggctgaaaccttgctagcggatgcgtcaaagccggcgggtcccaagagcgtccagtgcaagatttgtgacatccagtttgtcagcgtggcagacttgcgaaggcacatatctatgcagggccacagcgatcaaccctcggcgtacatgattagcacagcaactggctttgagctcctgctggacgacacagacgacagtgatgaggaaacatcgggcaggacgtactcttgcgacctttgtgatctgaatttccgacgccgacgagagatcagcgagcatcagtactccctccacagctttgacaaactgccacataactgcgagcactgcattttcaagacggttgataaggtaattttcatataaattgcatttcggaataggtgtttaatttgattgcttttatctactctcagaacatgctgcatcagcatcttcgcacgcagtgtatgaacaccgaaaagaagtttgcctgcatgcgctgcggctacaagttcatgtgggaggagaacttggcccagcacctttccacccagcattccaagcaacccgccgttccggaacagcagccaccgctgaggagaaagaggcgcttccgctaccagtgcccccattgctggcgttcctttgtcgttcagcccagcctggataaacacattcgggacatgcatgtggccaagaaaaatccaggaaaaaagtatctctgctcgctgtgcggcctggagtcactgacccccaacaagcttaacatccatatgcggcgacacacgggcgagaagccattcaagtgcgatctctgcgacatgcgcttcacggtccactacgagttgaaggtgcaccgtcggaagcatactggcgagcgaccctaccaatgcacgttttgcgacaaggacttcgctcgaccagacaaactaagacggcacgtcttcatgcacaacgacaagtcgtagactcatgattttgaaatgggtcatttgtatattgattttatttctatgtaatacgtacgtaagtaatgacgaattttctattcatcagccaaaaattaaaaattatttttaaaataatgtaagtaaactaagtataagaatgcttcaaaggttttgttgattcaacttatcaaacacataaaagacacgatgaaattactttataaaagattttataataaattaaaacaatactgtgtgattaaaaggggaatagtttgtagtttgtaatattttaatatctcgggagatataagatagaaaattaaaattttaaacaagctctattaaaatagagtattctgtaacttatagataataaataatagatatatataataatacgagtcaataaaaaacgtgtataaaatgtaaaccaaagaccatcatttcagccagatgataagaaattcgaattccaaatgcaattccctctcttaaaagttcggtatcttttaaacagagtatgatgtcacggaattgaagagaacacaatatatcgagcttttattcagcgacgcattttgtggtccagtaactacttggaaggcaataatatcggacgttagcgcatctaaacaaagttaaaatgactgaccaaccaactccacagtgggtgaccaaggagctattcagcagcttgttggaacagagtaatcgaaatttcaaggcgatcattaaatttgttccaacatcagcgattagcaaaggggaaaactatttgacgatcgtgctgcgcatacaaattgaaatgcagctgaaaggtaagctagaacaacaaaaatatctcgtcagataattaatgataacatttagataacagcatagaagatgtcagctacatactgaagattcctttagtcccggaagatgagaagaacgacttccacgaaatgttcgatgccgaactggacatgtacgatcatctgataccagaattggaggatctatatgccaaaaa

SEQ ID NO: 22364 - DNA, 2802 bp, DROSOPHILA
atgaccaggacgtgcagagtgtgtggctgcgacgacggacgctactggattgaaacgcccgtggagaagtacgcggagaagaccttcgtccagctgctggtcgagctaacgcgaatcgaggtggtcatggcgcaagctgagaagttcccacagtggctgtgctacgcgtgtgccgagaagctggagagcacctacgattttgtgctgcaggcacgtcgaacacacgagctgtggctgcagaaaatcggggattctttgaatggggatgacgagatggagggcactgcggccttggaatgcctgcgtgagacacccatccacctgtttgagattgaaggcgtgaccatcaagacggaggaactggcttcaacgcaacaggcgcccaaggcagatcctttagtgcgcccgcgcattgtcaaacggagtattgtacactttagcgattccgatgaagacctggatgatgtgcctctgcgtcaacgtaagatagcagcctcggtctgcggctctgacacgacgaaggaaaatgtttgcgagctgtgcaacaaggtcttcagatatgtcaccaatctgtatcgtcacaagcagagggaccacggaattctgggcaagaacggagaggattatgaagaagactattacaagtgcgatctgtgcgataaaacctacaagtacgtgatggcgctggtgaagcacaaacacaaagagcacggatccagtctcctgtcgaataattccgggcgaaagatgccgtcaactttggccgaagatgccaatccatacagtccagcatccatctctgaaacatccactaatcaaagcagaaccaacaacgactccctggtacacagcatcatcaaggcagtggtactctccgatgaggatggccacagtggtgaagatagctactacaattgcgatcagtgtagtaaatcgtacaagtacattgtcagcttgatcaagcacaagcacaaagagcacctagacaaggagtcatacaagcagtcggatgacgaagacgatcggcctctggcctccacatccgcctcggcaagtgcaccaactgcgaaaccttctaggatcaaccgaagagtcgacgggttcgactttcatcgcagcgagccaaacggagccaaggaaatcaagtgcatgatatgcttgcgacggtttactaaactacgggagcttaggaatcatctacagaaccatcccactgatttcgattttgaggcgcatggcgagcctatcgagcgcattgcggaaggatttttcaaaacagccgttgagtccacggcagagggcttaaagcggcgaatatttagagatctcagaatgggcgtctatggacgctactattccatcacaaatcaagcgcgttatgaaatgaccctagatagctcggatacggacagtgatggcgatggcgacgacaatgtcgtcatccgacgaagttactcctgtgaattgtgcgactctccggaggctaggtggccgcgcaagtacctgctacaccagcaccatcagaaggagcacacatggctagacgcccctcatgtctgccagcgctgcgactcgcggtttctcaatctccagcttctgaagcaccataccagccagctgtgtcaaaacactttgaagcgctttatgtgcgacaagtgccctcagcgattcttttggcgtcgcaatttgcgcgcacaccttgtcgagcacaagtgcaagcaagaatcttatccatgtgaccaatgctctcgtagctttcaagacaagagcgccgtgaccaaacataagctcatgatgcatcgggatagtaacatggagctccttccctgccgctggtgcacccgtacgttctaccgtcctgccctgctgtacaagcatttacagagacacggattcactggtcaggacctacctctggctgaaaccttgctagcggatgcgtcaaagccggcgggtcccaagagcgtccagtgcaagatttgtgacatccagtttgtcagcgtggcagacttgcgaaggcacatatctatgcagggccacagcgatcaaccctcggcgtacatgattagcacagcaactggctttgagctcctgctggacgacacagacgacagtgatgaggaaacatcgggcaggacgtactcttgcgacctttgtgatctgaatttccgacgccgacgagagatcagcgagcatcagtactccctccacagctttgacaaactgccacataactgcgagcactgcattttcaagacggttgataagaacatgctgcatcagcatcttcgcacgcagtgtatgaacaccgaaaagaagtttgcctgcatgcgctgcggctacaagttcatgtgggaggagaacttggcccagcacctttccacccagcattccaagcaacccgccgttccggaacagcagccaccgctgaggagaaagaggcgcttccgctaccagtgcccccattgctggcgttcctttgtcgttcagcccagcctggataaacacattcgggacatgcatgtggccaagaaaaatccaggaaaaaagtatctctgctcgctgtgcggcctggagtcactgacccccaacaagcttaacatccatatgcggcgacacacgggcgagaagccattcaagtgcgatctctgcgacatgcgcttcacggtccactacgagttgaaggtgcaccgtcggaagcatactggcgagcgaccctaccaatgcacgttttgcgacaaggacttcgctcgaccagacaaactaagacggcacgtcttcatgcacaacgacaagtcgtag

SEQ ID NO: 22365 - protein, 933 aa, DROSOPHILA
MTRTCRVCGCDDGRYWIETPVEKYAEKTFVQLLVELTRIEVVMAQAEKFPQWLCYACAEKLESTYDFVLQARRTHELWLQKIGDSLNGDDEMEGTAALECLRETPIHLFEIEGVTIKTEELASTQQAPKADPLVRPRIVKRSIVHFSDSDEDLDDVPLRQRKIAASVCGSDTTKENVCELCNKVFRYVTNLYRHKQRDHGILGKNGEDYEEDYYKCDLCDKTYKYVMALVKHKHKEHGSSLLSNNSGRKMPSTLAEDANPYSPASISETSTNQSRTNNDSLVHSIIKAVVLSDEDGHSGEDSYYNCDQCSKSYKYIVSLIKHKHKEHLDKESYKQSDDEDDRPLASTSASASAPTAKPSRINRRVDGFDFHRSEPNGAKEIKCMICLRRFTKLRELRNHLQNHPTDFDFEAHGEPIERIAEGFFKTAVESTAEGLKRRIFRDLRMGVYGRYYSITNQARYEMTLDSSDTDSDGDGDDNVVIRRSYSCELCDSPEARWPRKYLLHQHHQKEHTWLDAPHVCQRCDSRFLNLQLLKHHTSQLCQNTLKRFMCDKCPQRFFWRRNLRAHLVEHKCKQESYPCDQCSRSFQDKSAVTKHKLMMHRDSNMELLPCRWCTRTFYRPALLYKHLQRHGFTGQDLPLAETLLADASKPAGPKSVQCKICDIQFVSVADLRRHISMQGHSDQPSAYMISTATGFELLLDDTDDSDEETSGRTYSCDLCDLNFRRRREISEHQYSLHSFDKLPHNCEHCIFKTVDKNMLHQHLRTQCMNTEKKFACMRCGYKFMWEENLAQHLSTQHSKQPAVPEQQPPLRRKRRFRYQCPHCWRSFVVQPSLDKHIRDMHVAKKNPGKKYLCSLCGLESLTPNKLNIHMRRHTGEKPFKCDLCDMRFTVHYELKVHRRKHTGERPYQCTFCDKDFARPDKLRRHVFMHNDKS

SEQ ID NO: 22366 - DNA, 4436 bp, DROSOPHILA
cctgaactgcagctgagctccaaggaactgtgctgcggaacgcatgcaaccaacaccagtgagctttcgtgcttctgcatcgtgaatctcaagcaaaccaatcgtgcgagattcgcatttaccgccgttgctggccaggcggcggaaaatgtgagtggacttatatatcgccttagactagtcatttaatcttcttactctgttccaaataggtgctgaaaacggctgccctgctgcgacaccgcgttgatctcctcgagaagcagttccaaactgacaaactcacaaacgctacggaggcggaactgcagacgattcggcacaacatgttgcacacggacattaaactgccatacgcttttaagatggacacgctggaacgcatcaccgagatgctgaagagaataaaagattcatcgcgcacaaccttaaagtaagtttaacttattaaagtaatgtgctccatttctaaactctacattttcagagaatttgtggacgtagagatgcgcacgctgctgcaggagaagccgttggacacacaccccttcattctgcactacatcaccagttccgcgctcgtggaggagattcctttgcaacgagccaccaagctgtgcccggatcggcccatcctcgtaatcagcgtgtgtgatagcgtggtcaaggctcgctgttgtgtaccagaaaagtgtatcacggagaaattcaacgcttccgcctggctgcaatcctttgccgacacctttaatggacaaatagccgcgcccaagggccaaaatccgcaggccgtgtgcaacatgaagggtcgacgggtgagcaatctgttcgaggaacagttggagcaggcaatgtccaaggcacatgcatacgctaagctttatctataggtataagttgtgattaccctccaaaatgtgctagctgtaagcttgccctttgaataattgctcatgtgaggagcgagtaaatggcgaagttttaaggaatttcagaatctttaatcactaatcactaccaggtcatcctcctcctcatcttctgcgttatcctcttgatcctggggcaccaagctggagttcatcaactcttcaaagacatccgcattatcggaactttgattgaagaagtaacttatgttatccaagggcttcactggcgttggaatcttttcgctgatgcgatgctgcatcttgaatcgctccactggcgtcctggccagcttctgcagatctcccttgaccagcagatcaaaactgtcctccaaggagaatcgcttactctgcggtagttgatccacttgagagagatctcttttcgtttccactttgggcgattcattcacatttcctagactcatctgcgccagacgtaagctcaaatcttccgccatgggttcgtaatgaagctggtgaccatcgtggttggtcagtgctggcttggcattcggattcgagataatgcctttaactatgtccgacatatcgaactcttcggcatcgcaatcgctttccagatcggagggcaggaacttggtgatgggggtggagcattgctgacgttgcggagcgggagccttgaccggagtaccttccttcttgcgccctaggaattggtgcagtaatggctggttctcttcaggctgagcctttatctttctgaccactcgctttggtttcgaattcggctcgttttccttattctcctcttcagatgcggttttcttctttcgcgtggttttcttggcgggcttctccttcgacttcaaaaaggccgctactaaatcgggatacgctgtctccagcatgtccaatggctcaatggtgtagtaaagttcctcgattcccttgggatgctccgcttcgtactccgcaatctgcttgtccggaataagacccttgaagatgccactgggatcgtgccagcgcaattctaagctgggcacacccttcacagttcgctttttgataatctcgtgtggctggataagtatcttctcctgcttcgattgctgcacctgccagcgtgtgagtatgggaaagaacttttggaagcagtatatttctggccactgcaagagatgtccgatttgtttgatgaatttgacaagatttggttgccgccagttgagatttagattgggaatggtgtcgggttcgctgagaaactcggcaatgatctcttcgttgggaaagtcaggagataatagggctttccgcctcaaagtcaactcggacttaatggatagtcgttgttctctaagggaagagtttaataaacaaatgtttatattagttttaggaaatagctcacttccagagactctcatcgcagcctttgtgtgtgcgacacacactgcagccactttttgtgtggctctgggtcttgccaatgtggccacaattgctgcagatggatttgtcgtccactcggatctccaaggcattgtatttatcggtttcaccacgccagcttctcattctgcagaaataataatcaaagcttattagctttaaaaatataatatatgtaacaatgtagtagactacctatccaaaatctcagtctccttgtacttgttgaacagctttaggacgccatccttgccaatgccacctatgccatcaggacaataatcacagccgcagagcaaagccatcacaatgatcttctgttggccaaagtccattcgggatgtgatctcccgcatgtcgtagatgtccacagctccgccggcggctgcctgggctccttgggtggaaacggagaagttgcgatagacacgaacggctccataggcaaagcaatccgagtcctggctaatgacgccgtccactagctgcggacaggaatataatcggatttggtacagagttcttgtgaggatgtagttgatatacgtacgccatgcttgttgagaaaggcacagtaggcctccgcctcgccgggaccttggacgcactggattcccatggagagcagcagcgtttcgcactgcttgagaacatggttgaaccggctgcgtcccttgtcgcccttggacggctgactttgggtgcactcaggcgaattcttgggcttcactccccgaaactggagctcattccttttggctatcacctggctcttgagttttggagcaactccctccaaaacgaaaaccggagtaacttgctcccaaatcaagtagcaagtgcgaaagaagaggttcctgttggtaaagcgtaaatattaatattttaaaagaatataaggtattaagaattttttaaacctactttaaatgatgccttggatgcacaaagtagtccacaacattaagagattcgcacacccagccggccaggtcgatggccactttctttccccgcagttcattaatgggtttacgttcacaatggggcgttaaaacaccccataattccttgacgcccatttaaataagctaaacaaaaaccccgcgagaaattcgcaacaaatttaaacaatcgcttcttcgtcagagttgcccaatcagttactttctagctacttgaagctatattcaaaagcagccaagtgcaaagttgtgacaataattggcaatgataacttttttaacaataatacatgatgctattttcaataacaaatattatacatataaatgtcatcttattcgattttaagaacacatttcgtttttagctttttttgagcttgtctctagctacatttgacagcactgcgacttccgccagtcactgcgaagcatgctcgataaccgatagcgggctttgttttgacagctgcacaagcgaccgctgcgaatggccagtggtcagcagtctcttcttcttccacgtcgacgtgtcgtgtcagccaaaagaaagtcgaaataaaatattgaattgaagctgcccctttgcgagtaggcccgacaaaattcagaagctgccagtcgtccgtacgccaaaccacacacaaccaccaccggcaagatggttctcgcggatttgggtcgcaagataacaacggcgctgcactcgctcagcaaggcgaccgtaatcaatgaggaggcactgaattccatgctgaaggagatctgcgcagcgctcctggaggctgatgtgaatatccgactggttaagcagctgcgcgagaatgtgcgtgccgttattgatttcgatgagatggccggtggcctgaacaagaggcgaatgatccaatcggctgtgttcaaggagctcgtcaaactggtcgatcccggcgtgaaaccctaccaacccatcaagggcaaggccaatgtggtcatgtttgtgggtctgcagggctccggtaagaccaccacctgtaccaagctggcctatcactaccagaagcgcaactggaagtcgtgtctcgtgtgcgcggataccttccgtgctggtgcctacgatcaggtcaagcagaacgcc

SEQ ID NO: 22367 - DNA, 2181 bp, DROSOPHILA
atgggcgtcaaggaattatggggtgttttaacgccccattgtgaacgtaaacccattaatgaactgcggggaaagaaagtggccatcgacctggccggctgggtgtgcgaatctcttaatgttgtggactactttgtgcatccaaggcatcatttaaagaacctcttctttcgcacttgctacttgatttgggagcaagttactccggttttcgttttggagggagttgctccaaaactcaagagccaggtgatagccaaaaggaatgagctccagtttcggggagtgaagcccaagaattcgcctgagtgcacccaaagtcagccgtccaagggcgacaagggacgcagccggttcaaccatgttctcaagcagtgcgaaacgctgctgctctccatgggaatccagtgcgtccaaggtcccggcgaggcggaggcctactgtgcctttctcaacaagcatggcctagtggacggcgtcattagccaggactcggattgctttgcctatggagccgttcgtgtctatcgcaacttctccgtttccacccaaggagcccaggcagccgccggcggagctgtggacatctacgacatgcgggagatcacatcccgaatggactttggccaacagaagatcattgtgatggctttgctctgcggctgtgattattgtcctgatggcataggtggcattggcaaggatggcgtcctaaagctgttcaacaagtacaaggagactgagattttggatagaatgagaagctggcgtggtgaaaccgataaatacaatgccttggagatccgagtggacgacaaatccatctgcagcaattgtggccacattggcaagacccagagccacacaaaaagtggctgcagtgtgtgtcgcacacacaaaggctgcgatgagagtctctggaaagaacaacgactatccattaagtccgagttgactttgaggcggaaagccctattatctcctgactttcccaacgaagagatcattgccgagtttctcagcgaacccgacaccattcccaatctaaatctcaactggcggcaaccaaatcttgtcaaattcatcaaacaaatcggacatctcttgcagtggccagaaatatactgcttccaaaagttctttcccatactcacacgctggcaggtgcagcaatcgaagcaggagaagatacttatccagccacacgagattatcaaaaagcgaactgtgaagggtgtgcccagcttagaattgcgctggcacgatcccagtggcatcttcaagggtcttattccggacaagcagattgcggagtacgaagcggagcatcccaagggaatcgaggaactttactacaccattgagccattggacatgctggagacagcgtatcccgatttagtagcggcctttttgaagtcgaaggagaagcccgccaagaaaaccacgcgaaagaagaaaaccgcatctgaagaggagaataaggaaaacgagccgaattcgaaaccaaagcgagtggtcagaaagataaaggctcagcctgaagagaaccagccattactgcaccaattcctagggcgcaagaaggaaggtactccggtcaaggctcccgctccgcaacgtcagcaatgctccacccccatcaccaagttcctgccctccgatctggaaagcgattgcgatgccgaagagttcgatatgtcggacatagttaaaggcattatctcgaatccgaatgccaagccagcactgaccaaccacgatggtcaccagcttcattacgaacccatggcggaagatttgagcttacgtctggcgcagatgagtctaggaaatgtgaatgaatcgcccaaagtggaaacgaaaagagatctctctcaagtggatcaactaccgcagagtaagcgattctccttggaggacagttttgatctgctggtcaagggagatctgcagaagctggccaggacgccagtggagcgattcaagatgcagcatcgcatcagcgaaaagattccaacgccagtgaagcccttggataacataagttacttcttcaatcaaagttccgataatgcggatgtctttgaagagttgatgaactccagcttggtgccccaggatcaagaggataacgcagaagatgaggaggaggatgacctggtagtgattagtgattaa

SEQ ID NO: 22368 - protein, 726 aa, DROSOPHILA
MGVKELWGVLTPHCERKPINELRGKKVAIDLAGWVCESLNVVDYFVHPRHHLKNLFFRTCYLIWEQVTPVFVLEGVAPKLKSQVIAKRNELQFRGVKPKNSPECTQSQPSKGDKGRSRFNHVLKQCETLLLSMGIQCVQGPGEAEAYCAFLNKHGLVDGVISQDSDCFAYGAVRVYRNFSVSTQGAQAAAGGAVDIYDMREITSRMDFGQQKIIVMALLCGCDYCPDGIGGIGKDGVLKLFNKYKETEILDRMRSWRGETDKYNALEIRVDDKSICSNCGHIGKTQSHTKSGCSVCRTHKGCDESLWKEQRLSIKSELTLRRKALLSPDFPNEEIIAEFLSEPDTIPNLNLNWRQPNLVKFIKQIGHLLQWPEIYCFQKFFPILTRWQVQQSKQEKILIQPHEIIKKRTVKGVPSLELRWHDPSGIFKGLIPDKQIAEYEAEHPKGIEELYYTIEPLDMLETAYPDLVAAFLKSKEKPAKKTTRKKKTASEEENKENEPNSKPKRVVRKIKAQPEENQPLLHQFLGRKKEGTPVKAPAPQRQQCSTPITKFLPSDLESDCDAEEFDMSDIVKGIISNPNAKPALTNHDGHQLHYEPMAEDLSLRLAQMSLGNVNESPKVETKRDLSQVDQLPQSKRFSLEDSFDLLVKGDLQKLARTPVERFKMQHRISEKIPTPVKPLDNISYFFNQSSDNADVFEELMNSSLVPQDQEDNAEDEEEDDLVVISD

SEQ ID NO: 22369 - DNA, 3619 bp, DROSOPHILA
gccttccagtgggaacactcagcctgggctccttcatacacgacgatctgaagctggtgcccaaggcgcccttcatcggacccgtgcgccagtcctgcctgagtaagttactcgcacctgtgaactcaacaacataactcaacagtcaacactcgtacgccccgcagaaaacaatgaaaaggtgctggatctgctgcgccactcggtggacgaacaggcgaccaaaaaagcagcgctgcagcacaagctggacatacagttgcgccgccacgagctggcctcgtcccgcgaggaattccagaaggttctggatgccgtgcggcactttctgctctatgtggagcaggagctaaccgcccaggcgccacgcgttgagtggctgaccggcgacgaactgagcgtggcggatatctcgctgggattgctgctgcatcgactgtatcagctgggattcgagaatcagttctggaccttcggaaagctgccgcaggtggaggcatacttcttgcgcttccggcagcgcgagtccttccaccgcctgcagccgagcaactttgccatactgcgcgaaatgtggacccgaacgccgggcaactataagctaggagcgggcgccggcttcctgggtatggccatgttcgccgccttcgcgcacaagtgagcggagcagcgggacagcagactttgttaacaaatccttttactgttaaagttgggcacatataaacacacgaacataagaacgcttaaagctacgcactgctgatgaaggatgcttggggtgtcatggtaagaatccggcggtggaggaggatgaggagaagagcgcgcgatccagtgccagcctcggctgcttgcttagtaatatcatcatcgtttcatatcatcgttgctgaatatacaaaaatttggtataaattccaatccgtcacctaactatcaattccttctatgcttgatggctgctctcccctctgttgacttgaccagggttcagctctcagctctccagcgtctgctgctcgcgatccctttcccgtttctgctgatcggacatcagcaaattggcggctgcactggccgccttggggctggtgaacagcggcattcccataaacgtgggtatctgctgatcccttggcactcccgtcgttgccgccttgccattgaggttggtcctcgaactgttggatcccgagctcgtggtggccgcacccgtggataaatgcgagggtcgcttgaaggggaaggtgggtatctctcgctgatagctgaagcttccgttgccaggcgcctcaggcagcagaccgggcgtgggataccagaagcgataggtgaagtaccaggtgagtatggcaataatgccgctgatcaccttctcgatcatgcggtgatagtacagcatggtgcccaccaacatgatgtcccacagcagctgcagggccgccatgccgatgaatagggtgcgaatgatcggcgtcaggcgtttgtacaagaactgcaggctgcgcatttgctcctcgttcagcgttctcagcggattcgtgcccgagttctcggctgtgctgcgattgtgtcgctcgttgcggatgtgctccttgatggtctcccagcggatgatgggacgcgcctcctcgatcagcaccaggctggagtggatcaggatgaaggcgtgtccggatatatcaaagcccttccacagatgaccagccttcaaacagctcgatttggtcgcataacctggaagcgcacacgcgatagttattattaaattcattacacgatgcttgtatacccaccctttgtggtgcagcgtccgtaggagttctccacgacgttaaacagcttggtccagaagaaccagaagaaggtggctatgacgatgcgcgggaaatggtgtcgcagcatccgtttgtggtcgccacacgtaatcgtataggccgagagcaccaggaagggcaccacgaagagcagcgtccagccccagccgatcttcacgaagtactggttgaacaggttgtccgatcgggcgaagtacgtcttggggaagggcacaaagtccccgattacggagatcacaaacagactgcccagatacaaggctactttgaggtccgtattgaagaatatggtcttcttgcacaaatggatgacgcccatgaccaggatctcgcggatgctagtgggtgcggccgtgggcctcgttccgcgcgcttccgacctggtgatgtcaggtcctccgggcctgaaattcatgttggaaccggaggaggagggacttcccgcagtaccgcccaaatttggacgcagcggacgtcgcttggtggccatagctggagctgttgctcgggtccaaagtgtgtcacttgaaaactgcgttgtttgctgccgtttttggtaatgctgcgagtgaaaagcgaaagtgaaagcgaaggaatcgtgcgtgtcaaagttcaacggttgccagacgcacttacctgtgaccaaacagtgccagcgcattcaaatcagatcaactggtcaatttgtttgctttttcgccgggcttagagcacccactgcgttgttctcagttgtaatttttcaattcttattttggcccaaatgtacgtgttgcgcctgtaaaaaatagaacagctgcagctggtgagcacgcttcactgtgactggcaactctgattggaatttttataaagagcgggtttcgtggcgaatggcaagccatgtgatcagctgttcgggcctgagatttatctcgagcatttttaattgccggtgcggttttaattgaactgcggcatgtacaactcggccaagcagctgcagcgcgtgctgacagcgcgcgagattcgtaaaacctttttggatcatttcaccgtcaatcatggccacaagttcgttcgctccagcccggtggtgcccttttgcgatcccactgtggctttcgttaacgcgggcatgaatcaggtgaggtaacaggcccattaaaagctattgttcgcttgtttatacgatggccttcgctgtagttcaagtcggtgttcctgggcacagcagcggcgccacacaagcgggttgtcaactcccagaagtgcgtccgcgttgggggaaagcacaatgatctctccgtggtgggcacggatggctatcatcacacgttctttgagatgctgggcaactggtcctttggggattacttcaaggtgggtgcgttcagcttaccctctatcacttctttctcacgagacctttgggttttcagcgggaggcgtgtgcaatggccctggagctgctccgtggtccctacaacattgatccaggtcgtctatacgtcacatactttgctggcgacaaggtgctgggcattccagccgatctggagtgtttcgagatctggaggagcctggggtaaagcttgttacataacgagaagttggtttcttaagtactcgtgctttgcagctttcccgcctcgcgaatactgccctttggctgcgccgacaatttttgggaaatgggcgctacagggccgtgtggtccctgcaccgaaatccacatagatcatcgcccggatttgggcagcgtggagcagcgagccaagttggtgaacgcaggtcgt

SEQ ID NO: 22370 - DNA, 1486 bp, DROSOPHILA
gcgcaacacgtacatttgggccaaaataagaattgaaaaattacaactgagaacaacgcagtgggtgctctaagcccggcgaaaaagcaaacaaattgaccagttgatctgatttgaatgcgctggcactgtttggtcacagcattaccaaaaacggcagcaaacaacgcagttttcaagtgacacactttggacccgagcaacagctccagctatggccaccaagcgacgtccgctgcgtccaaatttgggcggtactgcgggaagtccctcctcctccggttccaacatgaatttcaggcccggaggacctgacatcaccaggtcggaagcgcgcggaacgaggcccacggccgcacccactagcatccgcgagatcctggtcatgggcgtcatccatttgtgcaagaagaccatattcttcaatacggacctcaaagtagccttgtatctgggcagtctgtttgtgatctccgtaatcggggactttgtgcccttccccaagacgtacttcgcccgatcggacaacctgttcaaccagtacttcgtgaagatcggctggggctggacgctgctcttcgtggtgcccttcctggtgctctcggcctatacgattacgtgtggcgaccacaaacggatgctgcgacaccatttcccgcgcatcgtcatagccaccttcttctggttcttctggaccaagctgtttaacgtcgtggagaactcctacggacgctgcaccacaaagggttatgcgaccaaatcgagctgtttgaaggctggtcatctgtggaagggctttgatatatccggacacgccttcatcctgatccactccagcctggtgctgatcgaggaggcgcgtcccatcatccgctgggagaccatcaaggagcacatccgcaacgagcgacacaatcgcagcacagccgagaactcgggcacgaatccgctgagaacgctgaacgaggagcaaatgcgcagcctgcagttcttgtacaaacgcctgacgccgatcattcgcaccctattcatcggcatggcggccctgcagctgctgtgggacatcatgttggtgggcaccatgctgtactatcaccgcatgatcgagaaggtgatcagcggcattattgccatactcacctggtacttcacctatcgcttctggtatcccacgcccggtctgctgcctgaggcgcctggcaacggaagcttcagctatcagcgagagatacccaccttccccttcaagcgaccctcgcatttatccacgggtgcggccaccacgagctcgggatccaacagttcgaggaccaacctcaatggcaaggcggcaacgacgggagtgccaagggatcagcagatacccacgtttatgggaatgccgctgttcaccagccccaaggcggccagtgcagccgccaatttgctgatgtccgatcagcagaaacgggaaagggatcgcgagcagcagacgctggagagctga

SEQ ID NO: 22371 - protein, 423 aa, DROSOPHILA
MATKRRPLRPNLGGTAGSPSSSGSNMNFRPGGPDITRSEARGTRPTAAPTSIREILVMGVIHLCKKTIFFNTDLKVALYLGSLFVISVIGDFVPFPKTYFARSDNLFNQYFVKIGWGWTLLFVVPFLVLSAYTITCGDHKRMLRHHFPRIVIATFFWFFWTKLFNVVENSYGRCTTKGYATKSSCLKAGHLWKGFDISGHAFILIHSSLVLIEEARPIIRWETIKEHIRNERHNRSTAENSGTNPLRTLNEEQMRSLQFLYKRLTPIIRTLFIGMAALQLLWDIMLVGTMLYYHRMIEKVISGIIAILTWYFTYRFWYPTPGLLPEAPGNGSFSYQREIPTFPFKRPSHLSTGAATTSSGSNSSRTNLNGKAATTGVPRDQQIPTFMGMPLFTSPKAASAAANLLMSDQQKRERDREQQTLES

SEQ ID NO: 22372 - DNA, 3652 bp, DROSOPHILA
caagcaacccgccgttccggaacagcagccaccgctgaggagaaagaggcgcttccgctaccagtgcccccattgctggcgttcctttgtcgttcagcccagcctggataaacacattcgggacatgcatgtggccaagaaaaatccaggaaaaaagtatctctgctcgctgtgcggcctggagtcactgacccccaacaagcttaacatccatatgcggcgacacacgggcgagaagccattcaagtgcgatctctgcgacatgcgcttcacggtccactacgagttgaaggtgcaccgtcggaagcatactggcgagcgaccctaccaatgcacgttttgcgacaaggacttcgctcgaccagacaaactaagacggcacgtcttcatgcacaacgacaagtcgtagactcatgattttgaaatgggtcatttgtatattgattttatttctatgtaatacgtacgtaagtaatgacgaattttctattcatcagccaaaaattaaaaattatttttaaaataatgtaagtaaactaagtataagaatgcttcaaaggttttgttgattcaacttatcaaacacataaaagacacgatgaaattactttataaaagattttataataaattaaaacaatactgtgtgattaaaaggggaatagtttgtagtttgtaatattttaatatctcgggagatataagatagaaaattaaaattttaaacaagctctattaaaatagagtattctgtaacttatagataataaataatagatatatataataatacgagtcaataaaaaacgtgtataaaatgtaaaccaaagaccatcatttcagccagatgataagaaattcgaattccaaatgcaattccctctcttaaaagttcggtatcttttaaacagagtatgatgtcacggaattgaagagaacacaatatatcgagcttttattcagcgacgcattttgtggtccagtaactacttggaaggcaataatatcggacgttagcgcatctaaacaaagttaaaatgactgaccaaccaactccacagtgggtgaccaaggagctattcagcagcttgttggaacagagtaatcgaaatttcaaggcgatcattaaatttgttccaacatcagcgattagcaaaggggaaaactatttgacgatcgtgctgcgcatacaaattgaaatgcagctgaaaggtaagctagaacaacaaaaatatctcgtcagataattaatgataacatttagataacagcatagaagatgtcagctacatactgaagattcctttagtcccggaagatgagaagaacgacttccacgaaatgttcgatgccgaactggacatgtacgatcatctgataccagaattggaggatctatatgccaaaaacacttccatatcaccaaaattcaagcctgttcatctgaagtttccaggagagccggtaaaaagcgactacattcttttggaggatctgcggaagaagggatataggaatgccgacagaacccagggattggagcagtttgaagtggaggcggtcctcaagaagttggcacagtggcacgcagcctctgcaaaaagagtagtcgagctgggtgaatacgagaaggacatccgggagagttactttactactgagcaccagaaattactcgatgaattcaacattaatttttgtatgcccttcctggagtgcatgcagcaatataatcttgagccaggacagctcgttctcatagtgagattattttatatccatttagataaattgtaatcatttttattcagagcgactatacatctcaactgacggatctgaatattgagtttggtaagaacgatcctctggagttatctgtgttaaaccacggagatttttggtgcaataactttatgttcaagtataaaaacgcctcagaagtggaggacgtttgctttgttgacttccagctcccaaaatatggtaaactgaaggaaaattccaaaatatttaattgtaataataatactcctttccaggcacacccgcccaagatcttctatgcatactgatgacctcacctaagttttcaatcaaactggacaaattcgactatttcatagagtattatcaccagcagctagtcgaacacctcactatgctcaattacaatcggaatgcacccacactatccaagttccacgcccatctacaccgatatagtctctggggtaagatcgttattagaagcttctttcataggaattctatttgaaacctcacctacttgtttgtagctttcatatgcgcccagcgaatgcttccaattgttctgctcccgcccgatgttgattcacatataggcaacgtaatgggtaattcggaggaggcgatcgcgtttaagcgtaagatgttcctgttgccggcttacgtggatcagataaaagtcatattgccatggctcattaaccggggttacataagatagacggaggatgcaatgataaacaagtttctagagaacgaatagtgtaataataatattgtattgcattcatacaaacatgttgttcacaaactatctcaaaatgctaggtgttagtataagctaatacgagagggtttttttaaataaatgtgcatagttttacaaaaaattattttcaatttgtatgcaggctcaatttgaagaattacagtgaaatcgctcgttgtgaaataaacaaaggcaaacgacgctctttcagctgccaaaatatttagaatgcaattagcggagcttttgagagaagatcgagagaaatcggccgcgcactacgaaattaaaaagctccacagatgtgtagagtctaatactcggctttcatcagtctacgcaagaccgtcacactggacgtatatgtgttttctgctcgatttcaaaatacttatcccgattatctacaatggcggctggcaaaatacccgattgggtcaccgctgaacgtttcgaagatgttctcaaatcgaatgtggacggatattcgaaagtgcgaaatttcaaagcggaaatgggatccgcggcaggtgacaactacgccactaatatgttgcgagttaatatcgaagtggagctgcagggtgagttggggagtggactggctgggagcaccgttgacatcaaatttctgccttccagatggcaccaccaaagagttgtcatacatggtcaagttgccacgtcaaagggaaatcaacaaggaaatgatgaagcacaacatacgttctcagcgacaatgtgaacaagacgagcgccggctctctttacaacgcaacaatgcatacttttctttcgtctcaccgcaaatcggtgatcgagcaccctcaccttcaactaactcgaaacttttgccctcagagaacgtcagaccgcgttcttgctctcgctctctgcctgcttcggctcacaagtcgtggagcgaagaaaccgcctctcctaccccgctcctctcgcagcgccaaacgaccgtcccgggtaactgtaacactgcaataacgagtgcagtgacctcactggcaactgccactgctaccacaacatcaacttcgtcagcggcccaactaattatcgctgtgccagctgtaaataatacagcagcactgaccgttt

SEQ ID NO: 22373 - DNA, 1372 bp, DROSOPHILA
ataatatcggacgttagcgcatctaaacaaagttaaaatgactgaccaaccaactccacagtgggtgaccaaggagctattcagcagcttgttggaacagagtaatcgaaatttcaaggcgatcattaaatttgttccaacatcagcgattagcaaaggggaaaactatttgacgatcgtgctgcgcatacaaattgaaatgcagctgaaagataacagcatagaagatgtcagctacatactgaagattcctttagtcccggaagatgagaagaacgacttccacgaaatgttcgatgccgaactggacatgtacgatcatctgataccagaattggaggatctatatgccaaaaacacttccatatcaccaaaattcaagcctgttcatctgaagtttccaggagagccggtaaaaagcgactacattcttttggaggatctgcggaagaagggatataggaatgccgacagaacccagggattggagcagtttgaagtggaggcggtcctcaagaagttggcacagtggcacgcagcctctgcaaaaagagtagtcgagctgggtgaatacgagaaggacatccgggagagttactttactactgagcaccagaaattactcgatgaattcaacattaatttttgtatgcccttcctggagtgcatgcagcaatataatcttgagccaggacagctcgttctcataagcgactatacatctcaactgacggatctgaatattgagtttggtaagaacgatcctctggagttatctgtgttaaaccacggagatttttggtgcaataactttatgttcaagtataaaaacgcctcagaagtggaggacatgcatactgatgacctcacctaagttttcaatcaaactggacaaattcgactatttcatagagtattatcaccagcagctagtcgaacacctcactatgctcaattacaatcggaatgcacccacactatccaagttccacgcccatctacaccgatatagtctctgggctttcatatgcgcccagcgaatgcttccaattgttctgctcccgcccgatgttgattcacatataggcaacgtaatgggtaattcggaggaggcgatcgcgtttaagcgtaagatgttcctgttgccggcttacgtggatcagataaaagtcatattgccatggctcattaaccggggttacataagatagacggaggatgcaatgataaacaagtttctagagaacgaatagtgtaataataatattgtattgcattcatacaaacatgttgttcacaaactatctcaaaatgctaggtgttagtataagctaatacgagagggtttttttaaataaatgtgcatagtttt

SEQ ID NO: 22374 - protein, 278 aa, DROSOPHILA
MTDQPTPQWVTKELFSSLLEQSNRNFKAIIKFVPTSAISKGENYLTIVLRIQIEMQLKDNSIEDVSYILKIPLVPEDEKNDFHEMFDAELDMYDHLIPELEDLYAKNTSISPKFKPVHLKFPGEPVKSDYILLEDLRKKGYRNADRTQGLEQFEVEAVLKKLAQWHAASAKRVVELGEYEKDIRESYFTTEHQKLLDEFNINFCMPFLECMQQYNLEPGQLVLISDYTSQLTDLNIEFGKNDPLELSVLNHGDFWCNNFMFKYKNASEVEDMHTDDLT

SEQ ID NO: 22375 - DNA, 3147 bp, DROSOPHILA
aaataattatcgactgctactgaattttcccaccaaccataaatgtgaaaccactataaatatattaaatggagaaccccctaaaaacttaccatctacgcccatgatttcattactcattcaccacgaagcgcgtgcaaaacagctgcttgctgttttcgtatttactcctatagcgccaatcgaatctccgagtgaatcatcatcaggaaaacccatcacaacatcgtcagaagtcggaaaccttagtttaagatcgcaccaaatcccaaaatgttcaacaatattttcggaaagaaacccaccgtgaaggagcagcagcgggagaatgaccgatcgctgcgcaaggccaccagggacatcgaacgggagcgcaggaaaatggaggaggaggagcgcaagctggagctggagatccgacggaatgccgccgctgggaacaacgatgcctgccgcattctggccaagcagctggtggagatcaggaagcagaaatcacgcacatacgcagcagcgggcaagattcagtccattggctaccagaacaagaacatgggcgccaatatcgccctaagcgaagccatgggcaccacggccaagacgatgggtgaaatgaataaggtgatgcgaccggaggccatcggggaaacagtgcgccagttccaggcggccaacatgaagatggaaatgaccgacgagatgatcaacgacacgctggacgacatgctgaatgagtccggcgacgaggaggagtccaatgccgtagtcaacaaggtgctcgacgagatcggcatcgagatctccggcaagatgtccagcatcccggccacgggatcctcagactttgagacgagtggcaagcgcaccgagaaggacattgccgatcaactggccaagctgcgctcctcttagtccttacctgtttttcattctattttgtaactactgtgaacatcgctgttatccatagcccgtaagaaattatatttatgtacaccgcttacaaacgagctgtcattccaccgccagccacaatggactctccggtaatgtagcccgcatcctcggagaccaaaaaggagaccacgccagccatctcctcactggtgcccagacgacccatgggtattttgctcaaagccgcttcattcgccgactcattctcgtacagtgctttcgagaactttgtcctgatgactcctggagccaggcagttgacgcgaatgccctcgggcgccagatccttggcggctgccttggtcaagccaatcagcgcggtcttgctgacggaataggctcccagtagctatgcgattaagataacggagataagcattgaacaactgaaccgcagataaggcgactaacctcaaaggcatcatagccagcaatggaggagacgaaaacgatgctggagttcttttgctggcgcaggagaggcagtgcctccttggccagcagataggaactcttcacgttcacatcgaagatcttgtcccacaccttctcatcgcactcgaggacaccgccgaccgcaggattggtggctgcattgctgaccagaatgttgagcttgccaaacttgctaatggtctcctcaaagagctgtttgcgatcctcgggttcgctgacatggcacttcagaccgtggacattcaagttcagtttgcgcagctccgccagagcagagtccacattcttttgcttgcgactgctgatgaccactgcggcgccatcttcggccagccttttggcaatcgcgaaaccaatgctgggagggattaatcagaatttagtgggtgcgatcctctccagtttctattgagctgcttacccatcggtggaggcggtgaccacggctacttttcctgccaaacgcttcatcgtgccggctgtcgaactttgactactgctggacaagcgtttgtggcattgattgagattagggccaacaagttttcggctgtaattgttgctgttttgatcgaaacttgaactttgaccacttccactcacagcgctggcattcagacggatcttgggcgccctgaccaccagttgtttgctcagatgcaacatttttgaagtaggacttttgcgaaggatcttgagattcgttgcctaataattgattttccctattttaactacgaatctccaaactgtttactagttcttcttttcagcggtttgccattcacagtgaatgaaaaagctcattcgccggtggcgcgaaatttgaaaatttattaaagttatctctgcagtggcttagtaataaaaaccagattaacctacataataactaaaattagggctaaaaatatcatttatccctagtcaatatgttgtaatactccacttagggccactcagtcatgggcagataagaattcttgaaaagaaaatcttcccacagcaagataaacgctgcgtttcgtaataatataaacaaagataaatacgcatgacaaacaaaccgcaaaaagttggagaatcgcttgacataatggactgttttcggatccgaaacatatatatgtactatatatatgtacatacgagccgaaagtgcaaattaataggggatcgcagcgatccgtacgatctgacttcattatagacgcagtcgtcggcggaatcagcacgcaagtggagtctccggttttccaagtcaatccggcacgcgcttacggctttgttagttagcaacttttcgcaaccgtcggcggggcatgtgatacgaaaaaaggcgcccatgctagtgaaactaatcagcaaactaaagatacactaagccaaagaatattaagtgaaacacacatagaacaagatgagcgagcagacaaaggaaatcgaagctctgccgcccaccttgcaggacttcaaggctcccgatctgccggccaataagccagtgctcttcttccatccgtacaacttccatgcgcaaaaagttagtaaccgcttgctttcaatcatgtgatcattgaaaaggtatttgcccaacagatccagccgctaatgccgcgaaattacaaaactaatcatttccaaatgaaatcatcgttttatttactttttttctcgtatttcttttgtttttttcgatgtaataatggggtggcccgcgtcgaaggttctcca

SEQ ID NO: 22376 - DNA, 1022 bp, DROSOPHILA
ttaaaatagggaaaatcaattattaggcaacgaatctcaagatccttcgcaaaagtcctacttcaaaaatgttgcatctgagcaaacaactggtggtcagggcgcccaagatccgtctgaatgccagcgctgtgagtggaagtggtcaaagttcaagtttcgatcaaaacagcaacaattacagccgaaaacttgttggccctaatctcaatcaatgccacaaacgcttgtccagcagtagtcaaagttcgacagccggcacgatgaagcgtttggcaggaaaagtagccgtggtcaccgcctccaccgatggcattggtttcgcgattgccaaaaggctggccgaagatggcgccgcagtggtcatcagcagtcgcaagcaaaagaatgtggactctgctctggcggagctgcgcaaactgaacttgaatgtccacggtctgaagtgccatgtcagcgaacccgaggatcgcaaacagctctttgaggagaccattagcaagtttggcaagctcaacattctggtcagcaatgcagccaccaatcctgcggtcggcggtgtcctcgagtgcgatgagaaggtgtgggacaagatcttcgatgtgaacgtgaagagttcctatctgctggccaaggaggcactgcctctcctgcgccagcaaaagaactccagcatcgttttcgtctcctccattgctggctatgatgcctttgagctactgggagcctattccgtcagcaagaccgcgctgattggcttgaccaaggcagccgccaaggatctggcgcccgagggcattcgcgtcaactgcctggctccaggagtcatcaggacaaagttctcgaaagcactgtacgagaatgagtcggcgaatgaagcggctttgagcaaaatacccatgggtcgtctgggcaccagtgaggagatggctggcgtggtctcctttttggtctccgaggatgcgggctacattaccggagagtccattgtggctggcggtggaatgacagctcgtttgtaa

SEQ ID NO: 22377 - protein, 317 aa, DROSOPHILA
MLHLSKQLVVRAPKIRLNASAVSGSGQSSSFDQNSNNYSRKLVGPNLNQCHKRLSSSSQSSTAGTMKRLAGKVAVVTASTDGIGFAIAKRLAEDGAAVVISSRKQKNVDSALAELRKLNLNVHGLKCHVSEPEDRKQLFEETISKFGKLNILVSNAATNPAVGGVLECDEKVWDKIFDVNVKSSYLLAKEALPLLRQQKNSSIVFVSSIAGYDAFELLGAYSVSKTALIGLTKAAAKDLAPEGIRVNCLAPGVIRTKFSKALYENESANEAALSKIPMGRLGTSEEMAGVVSFLVSEDAGYITGESIVAGGGMTARL

SEQ ID NO: 22378 - DNA, 2675 bp, DROSOPHILA
actgcccaatcttttgctgcctcagccgcatctgggcagtctggtggccctggaggaggtgacacgtccacacgaacgtttcttgctactcggcggtctcactggctttctggagcacatgaagcagcacaacattacaccggacatcgagacatttaccgcaatgctggaggtgataccgcccacaaatgctgccgagaagcagctgctcacgtttgtgcgcaagattggcctcaaggcggacatcgacttcttcaacatactgattaaaaagcgttccatgcgctttgattacgagagtgccaaggaagtgctcctcatgattcgcacggcgggtttgcggccggacattgtcacctacggtgtgctcgctttgggttgtcgcacgcaggaagaggctagggaactgctggaacagatgcatgtggcgggcattaagatgaacatgcccatactgggggccatgctgcggcagggatgtgctaacaaatcctttagctacgtcaacgagatcattcagttgagtctggaggagggccttaagccaaatgaagccttcctgcggcacctgcacaactttcacagaggttgtgcgcgagccattgatgccagagtgagtttatagctaactttctgctagttaaatcattaattgttgtgtatatgcagcatccatcaaccaagacggcagcctttaagaagggccactctaagttctgtgataaataccgcctgtactacgaggagcagggactgtccggtctcaagctggaggacgccattgccaaggtgaaggagcgcccgtatgaccagttcaagctgccgcctgtcaacggaatggaaccactcaagcacgagcagctcaagcacaaaacgaaacagcgaaagtacatcaagaagatcaagatacacgagctgaaggatgaccctcccaaagagtctttgaagaggatagaataagctaaaaagtttaactcccaataaagtttattattattcgttaaccaatcatggttcttttgcgtccgcgtgctcgcacctcctcgaacttggtgagcactgcctgttcgtccttaccgcacgctgtgcgataggcggccaggacgtgctcgaagatatacggctgttcgctgtgcgtactgagtagcgcccgctccaggacgtacagatccacacccttgtcctcggtggcctgattgtagtggctcaagccgaagtcaatcagaatgacatcgtagtcgccacccttcggattgatgaggatgttagatgtggtgagatcgccatgtataatgtgattggagtgcattttcccaatgatttcaccgatccgcgtgcagaactccagcagacatttcttggcttcatcctccgtctgagtggacactgtttcctggatgaactgcttggcagtcttggctgcatcgaaatattccatatacagcttgtgggtgttgaggtccgagtggaggatctttggtgccaggattccagcggctagacatcttcccgatgccttggcctccgctttcatgcgctgccgcgtgatctgggtgttcagttccgggtggcggtacttctttacgaaccgctccttgatcaggcaggcttctcctttgaaatcgcccaaatataggcgtccttcagcgccttgtttcaggatttctagggacatttttaatacgcttgaaaacaaaccggtgcacttgtcttaaacaaggtggcaacaccacacagcgtcgtttgtaagaggggttgggaaaatgtaccttttattttttttaagtttagaaaataattatcgactgctactgaattttcccaccaaccataaatgtgaaaccactataaatatattaaatggagaaccccctaaaaacttaccatctacgcccatgatttcattactcattcaccacgaagcgcgtgcaaaacagctgcttgctgttttcgtatttactcctatagcgccaatcgaatctccgagtgaatcatcatcaggaaaacccatcacaacatcgtcagaagtcggaaaccttagtttaagatcgcaccaaatcccaaaatgttcaacaatattttcggaaagaaacccaccgtgaaggagcagcagcgggagaatgaccgatcgctgcgcaaggccaccagggacatcgaacgggagcgcaggaaaatggaggaggaggagcgcaagctggagctggagatccgacggaatgccgccgctgggaacaacgatgcctgccgcattctggccaagcagctggtggagatcaggaagcagaaatcacgcacatacgcagcagcgggcaagattcagtccattggctaccagaacaagaacatgggcgccaatatcgccctaagcgaagccatgggcaccacggccaagacgatgggtgaaatgaataaggtgatgcgaccggaggccatcggggaaacagtgcgccagttccaggcggccaacatgaagatggaaatgaccgacgagatgatcaacgacacgctggacgacatgctgaatgagtccggcgacgaggaggagtccaatgccgtagtcaacaaggtgctcgacgagatcggcatcgagatctccggcaagatgtccagcatcccggccacgggatcctcagactttgagacgagtggcaagcgcaccgagaaggacattgccg

SEQ ID NO: 22379 - DNA, 675 bp, DROSOPHILA
atgtccctagaaatcctgaaacaaggcgctgaaggacgcctatatttgggcgatttcaaaggagaagcctgcctgatcaaggagcggttcgtaaagaagtaccgccacccggaactgaacacccagatcacgcggcagcgcatgaaagcggaggccaaggcatcgggaagatgtctagccgctggaatcctggcaccaaagatcctccactcggacctcaacacccacaagctgtatatggaatatttcgatgcagccaagactgccaagcagttcatccaggaaacagtgtccactcagacggaggatgaagccaagaaatgtctgctggagttctgcacgcggatcggtgaaatcattgggaaaatgcactccaatcacattatacatggcgatctcaccacatctaacatcctcatcaatccgaagggtggcgactacgatgtcattctgattgacttcggcttgagccactacaatcaggccaccgaggacaagggtgtggatctgtacgtcctggagcgggcgctactcagtacgcacagcgaacagccgtatatcttcgagcacgtcctggccgcctatcgcacagcgtgcggtaaggacgaacaggcagtgctcaccaagttcgaggaggtgcgagcacgcggacgcaaaagaaccatgattggttaa

SEQ ID NO: 22380 - protein, 224 aa, DROSOPHILA
MSLEILKQGAEGRLYLGDFKGEACLIKERFVKKYRHPELNTQITRQRMKAEAKASGRCLAAGILAPKILHSDLNTHKLYMEYFDAAKTAKQFIQETVSTQTEDEAKKCLLEFCTRIGEIIGKMHSNHIIHGDLTTSNILINPKGGDYDVILIDFGLSHYNQATEDKGVDLYVLERALLSTHSEQPYIFEHVLAAYRTACGKDEQAVLTKFEEVRARGRKRTMIG

SEQ ID NO: 22381 - DNA, 2394 bp, DROSOPHILA
gctgaagaaggtggtgccggcggacaattcgtgcctcttcaccagcatacgattcgtgctcaacgggaaggtggacaacgagggcagcgaaatgatgcgtcacatcattgcgcaggaggtggccgccgatccgcagagctacaacgacgccgtgctgggcaaatcgaatgccgagtactgcgcctggatacagaaggcggattcgtggggcggcgccatcgaagtgtccatactgtccaactactatggcattgagatcgatgtggtggacatacaaaacgccattatcaatcgctttggcgaggacaagaactttggactgcgtgtcttcctgctcttcgatggcatccactacgatccgctgtacatggagacatcgccgagtgctgcgccggccaccatcttcccggtggaagagctgggcgtctatcagcaggccgagcagttggccaacgaggcgcagtcctcccgccaatacaccaatgtggataaattcacgctgcgctgcatgcagtgcgatgtcaggctggtcggccaggtgcaggcccaggagcatgccaagcaaaccggacacaagaactttggagagatttaatacgtcctgatcttcggcaccgtctacattgtggcattcatgctgttcgcctactacctgctcaccacctagccacaatcgccgtgcgaggagtcatctcattagcagtactacctccacatcaccgcctacctaagttattaattattgaattgagcccagccgcctgtattcatgttagtccccttttaatccctttcggaatgcaataaaatataccttcatctacactaggcaagtcttggagttggtacctatatagctataaggtcaagttccagaaagctgtcctgaattcacaaggcaaccaactacgtacgtacttttttactgagcgtcgaacaaaaccgaggctctcaactgttcaattacattaaatttaaaatagttatcttaggtccagtgctaggaagcccatggtggggtcatggcagcgggattctggaggtaggacatcaccaccgcactgacgctcaacataaaggaggagagcacctgtttggcatcgtcgctggcccgagaactggcgaaactaatgcaggagcagtacagcgcaaaccaggcgcaccacttgagctgtgtaggtgggttacatactgataaatgccaagtcacttggttgtaatctttggggtgttattaccttcatcatcagtccacacatggagaaaatcatgcccagaatgttcatgtaatccggcatcatgtcctcgttggcgccgccgctctggccctggttcttgggcgccttgtagcggttgatcttctccttgcggcgcggatccacggtcatgttcatttttaatttatttaattttcaccaatttaatcgaaaaaccaggtcagattgcaatggatgtttgcgtggaatgtgaatgccgtgcaggttgcttacgttcttatttgactggcatttcggacacaaggtggcaacgccccttcatcagctgtttctttatttacaccgccgccacacgcacgtttaaaatagtttttttttaattacataaaaatcacagaaaattgcaacagataacatggctctgcggttgattagccgttcaatgagctgccacatacgtggcttgcaattaaatgccaccggaagacggttaaatagttacaacatcagccggctggttattctgcctgcaacttggtcttgctcacaaaatcgcctgctgcacgtgaggattacggatcaacaagccggtttggagaccaaacgagaggccaacaggaaccagaatccttttcgcgaagaagtttttgaagaacttatcacagcagcacccaaggagcaccagaagtttaagccagaaaagaaacccaaagagaagtccaccaaaaaggtgcaggattttggtgatccggacacctttggcgatgccaaggtggctgcaacagaagacccgggtgatgtcgaggaagaggagttccttagcaattccactaggcgctcaaagaaactaaaagccgtggaatacgcccgccaaattaaggaccatcttaaggcgaatcgcctaaatgaggccatcgccgtgctggagcaacggatgctaaaggaggatcgcgccaagccggacaagtacatatacaatctgctgatcagtggctgtgccaaggcgggctacacccgcaaggccttcttcctgtacaccaagatgcggcaacgtggtcttcaagtcaccggaggaacctacacttcgctattcaacgcctgcgccaatgctccctccgtgagcgatggcctggccaaggcccaaatcctgcgggagaacatgctcgagaagggctac

SEQ ID NO: 22382 - DNA, 327 bp, DROSOPHILA
atgaacatgaccgtggatccgcgccgcaaggagaagatcaaccgctacaaggcgcccaagaaccagggccagagcggcggcgccaacgaggacatgatgccggattacatgaacattctgggcatgattttctccatgtgtggactgatgatgaagctcaagtggtgcgcctggtttgcgctgtactgctcctgcattagtttcgccagttctcgggccagcgacgatgccaaacaggtgctctcctcctttatgttgagcgtcagtgcggtggtgatgtcctacctccagaatcccgctgccatgaccccaccatgggcttcctag

SEQ ID NO: 22383 - protein, 108 aa, DROSOPHILA
MNMTVDPRRKEKINRYKAPKNQGQSGGANEDMMPDYMNILGMIFSMCGLMMKLKWCAWFALYCSCISFASSRASDDAKQVLSSFMLSVSAVVMSYLQNPAAMTPPWAS

SEQ ID NO: 22384 - DNA, 3929 bp, DROSOPHILA
gtttttcactcatcgctcgtgtttcctccacggtcgatgatttatttttacgagcaaacaaacaaaattcggcccaaaagccgccaaaaaatgagagagagacagaaattgatgaccagctcatcagctggtgacttttgagttgggggtggtgaaaaattcgggtccgggctaatagaagacagtggatgccagacagccgcagttctgaatttttttctcacggtgccaaaaagcaaaagaaaaccacttgttaaaaactacttatatgcacagtgaatgatcagtaaagtgggccatacatatgtacatatgtatgtatatatggttttgtgttgttaaagatgcattttataaagtttggatgtattttttgttactttcttaataaatgttatgtaaaaaaagggatcaatgtaaatacctttattaattataaccatttcactgtacctaggtttttttgcaaacttattaaatgagaaaaaatatgctaaaatggtgatcaccaaaattggcaaaacaagtgagagagccaaacgcgcccgtcgaatgatgaatgaagtaatatatttgccacaagcttgatttctgctccactgtgcgaatttttgtgtgtgtttgttctgcttcttctcgcgtttttttgggtggtggcgctttgcgacgccggcagcggcgtcgacggaggcagaactgacgtcagttctttctctctctctctctctctctagcgttttgcacacactctctttttggtgaaaaatacacccccgccgcaaacgaattttctttttccggtgaactaggggtgtgggtggaaagagagagtgagaaagagtgtggagttccgcttgccggcgcttttctacaactattttgtcattgcgcctctctgcgctcttcccgcattccgcctcgttcattcattcattagccgcgctctttcttactctctgtgcgcatgccttgtgcggcgctgcttctgccggcgtcgccgtcagcgctgcgttgtttgaattccgctttcagctcgcttctcaatttttgcctcggttagttcgcagttcgcagttcccagagtttgtccatttctccagtaaaaaagaggcactactctctcctcccacttacttcctcccgtcgttttgagatcagctgctctcgcaacaacaacaactataactgtagttaccgtctcttttgcatcgttcgtttttcgtttgtgtcgccaagtgattgtgtgtgtgcgtaagcttaaagctgactaacaaaacgaaacaagaaaaaatataaattataggaaaattgttaaattataaccagaaagagagcggcacttacgtgtgttattgtgtgcgtgtgctttaaaaagatataaaaatagcaatagaaagttattaaagcgttggcaaaaaagtccaacgaacagcgagaggaagcggagaacgaaatagttaaagccaaagtcgctgccgacgtcgcacttgaaaacgtcgcaaaagtttgtaaacacaccagtgtgtgttcgtgtgtgtttttgccggcgtgccagtgtgcgtgcgcctagaaaagagtaaagaagcagaagaaaaggaagaagccgaagaagcagcaaaagaagccgacagcaaaaagtaaataaaatcaaatgccccctggcagaataatattaaattagacacatactcaaattaataacaaaagagaagaaagaaatataaagcgcccccacacacactgtcgaaattcagcataaggttcaatgtctgtttgtttgttcgaacatttcaaaattaaaatataatttttcgtttttcttttccatttttctctctctctctttgtggcgtgtataattaaataagctttttgcgtgtgtgtcaagatttttgtagaatttattcgccaacgattaaaggttagccgcttttatactattattttttgtttgctcaaaaatccataaaaaaccaaatgaagtgacaaatgccaaacgtcaagataaagttcattcagcgaaatgaaaaaagagtcagctgatttccctttccatttgggaattattcgtctgaatttccgtttgtttttgtttagttttcattgtgacgtacttaataactgcgaaaaaatatggttcgcaacggaacttgtgcttttcactttgtaaactttgaagtcaaactacaaaagtatttttcttattacaaaacatatgacattttttctgctagttagcgcttatcaaataaagtagcgctgcctttgaattagtcagccctcgaatcatttgaatcattgctgtatctgtatgtttgagtatgagctggtagtgccatgcacgattttatacgctacaatcgctccacacacttcatttttgcacagaaatttaagttgttacgggctcgtaaattaataattaattaacaactgtcctttatgttggattttgtacatttacaatcttaaaaagaagaataatttagtttgaacttttttataagtcgaagcggagattccttcgatttttacaaatttttccagatttttgaaactggaaagaagttgtttttttacagtgcaattttgccccattcacggaatacattccgatatgaaagcgacaaggcaacgactgattaagtctgctgacccggccctctccccgtatgccgtcgccgccccttttgccacgccttaaggtcgaagcgccggttgagcttctgaagtccaaggttaagcctttatttcgggtgattgcaatagtggtagtgtttggttgtgcgataaagagggcaactttatttttggcattttttggtggctctcgcttgttgtgtgcgctggcaccccttctcgttggttccgcttcgtcctttgtctcgccgaaaaggaagaggagaataaagaaggcaatgtgagacatgaaaacaacccttgaaaatgggcaacaatgaaatttcttaacagcttcaaggaactttctctgcgaacaagttacagtcattgcaccctcctgcttcttcttttccttccgcaaccccccacgccccaagaacaaggcgagcagacaacatcgttaacctggcccacggccttaggggattattttgccacccactctgccacccaacacccccgaaaacctcactttgttctttgttttatttctgtaacaaagtataagttgtaaaaaataagcagagaagcaaataagagggaataaaagaagcgaagatgctgaacgtgagcggagaactgtgaactctcacctcggcacatgtccttaaacagctgaagcatcctctctggtgaccccgccacccacttacactgaaataaattcaaacgtagaatattaaacggaataaaaatagtaactgaatcataacaaatcagaatatacatttttaaaaattgatgtgtttatttcacgagaaatatttttgaaaaatcatacgaatttttcttagtgccactttgcaacttgctcatcttcatcttttaagaattttttgggctttcctccgctttcgcttggctcatctgttttatgtcttttgggccgcagcattttttatggtttgttggcaatttcaggatttacatattccctccccttccagcccgtcatccaccccctccacccatttgtattcgctttgctttgcacttatcgcgcggtgttgacttcctggctcaaagaaaaaaaggagcagaatcggacagaacaatttgttagtcaagttgctactttttccacgttttatttcgcgggggttgctaagcgtatttttttttttggctatcttgtgtgtttgagcgttggtgcgaactttgtacgtgctcaaaaatgcaaatccaacggaataaaacgcaacaataataacagaataatgcaaaagaaaatgtaaataaaaatagac

SEQ ID NO: 22385 - DNA, 762 bp, DROSOPHILA
atgtctcacattgccttctttattctcctcttccttttcggcgagacaaaggacgaagcggaaccaacgagaaggggtgccagcgcacacaacaagcgagagccaccaaaaaatgccaaaaataaagttgccctctttatcgcacaaccaaacactaccactattgcaatcacccgaaataaaggcttaaccttggacttcagaagctcaaccggcgcttcgaccttaaggcgtggcaaaaggggcggcgacggcatacggggagagggccgggcgcacgcacactggcacgccggcaaaaacacacacgaacacacactggtgtgtttacaaacttttgcgacgttttcaagtgcgacgtcggcagcgactttggctttaactatttcgttctccgcttcctctcgctgttcgttggacttttttgccaacgctttaataactttctattgctatttttatatctttttaaagcacacgcacacaataacacactcagctttaagcttacgcacacacacaatcacttggcgacacaaacgaaaaacgaacgatgcaaaagagacggtaactacagttatagttgttgttgttgcgagagcagctgatctcaaaacgacgggaggaagtaagtgggaggagagagtagtgcctcttttttactggagaaatggacaaactctgggaactgcgaactgcgaactaaccgaggcaaaaattgagaagcgagctgaaagcggaattcaaacaacgcagcgctga

SEQ ID NO: 22386 - protein, 253 aa, DROSOPHILA
MSHIAFFILLFLFGETKDEAEPTRRGASAHNKREPPKNAKNKVALFIAQPNTTTIAITRNKGLTLDFRSSTGASTLRRGKRGGDGIRGEGRAHAHWHAGKNTHEHTLVCLQTFATFSSATSAATLALTISFSASSRCSLDFFANALITFYCYFYIFLKHTHTITHSALSLRTHTITWRHKRKTNDAKETVTTVIVVVVARAADLKTTGGSKWEERVVPLFYWRNGQTLGTANCELTEAKIEKRAESGIQTTQR

SEQ ID NO: 22387 - DNA, 3088 bp, DROSOPHILA
aacgccaaagccccataagcatgagccccactttcatccccattcttatccgcatcctcacccctatccctaccccattcagtatccctacccccatccaggagtgatattctctgccgcgggacctaagcttactcctccatcgaccacaccgcccactgccaaagatgcggacaaggaatcgccggagctgtctggatatccctcctatccgaccttcagatcaccgtactcgccctaccaaccccaggtgttccctcagcctcgtaactggcccagcttcccaggatacggacctcccagtcccggtttcggatacccccacaaccacaatcacgatcacgaagaagactccggcgaagataagcccaaggacaagtctggtgaaaaggataaggacgaggatgtggctctgaagccaccaggatttagctacccgcaggtctatttgattccccgaagaccagtgatctctgtgcccagctttccgcgtccaggaggcggatatggttcgccctacggctacggactctactaacactctccgataaatactgtgaaaaatctccgagtccagatagtcaataatatcttagttttatttcaatcttgaaatgtacttcctaacacaataaacaacttttagattatattttcatgagtttttaatatttgcatataatatttaatgctttcgatcgtgtaaatctgagtacaaggttcttcactgaatgtgggactgcttggagttttctttcggtgcattaagaactagtaagtaagttaaaggctcctagattcgggaaaatgataattgatgatttgcgcatatgagattgagttatgggcttctgatttccctatcgtgtaatccccaggctgataaccccgggccccgacgctctcaccttggtgatttccagtcgaacgggttgggatcgtggttgcatttaattgcagcgcattccacccagtcaactcatagttctgtcgatcgtcggaagttcgagacgtgagtgtcagtcgagatctgcgagatgttgccgctccaattcgttttgctgggctgtctgttcatcgctcagggggtaactattcatcggtttgttccacaatttaggcttcaatgagttctatattttcagatatgccacactctgccggatcccaaggtaagtttgctagcaaacaatttagatagtatcttctttgcaatattccataatccacagctaagggtgcctcgtgaaactatcaacattcccacgcatctcttcaagccagtgagtccgaaatcgagcaacaaacctatttctaatagatcatccttaaatggcggaaacagctctgccctggccgaagcaaataacgatgtcgagtttctagaggtgagtctcatccaatacacttaatataaatggaaataaatatatatttattatccttgaagagatctagcggtgaagtggaggaggtgaccgacacctacgaagaggaggacgttccactccgacctatccccttccaacctcgaccgttttatcctcagatccctccccgatccaacggtttccccattcgtgtaagtgtttttataagtagttacacatagtattacaatccgattgacgattgaactatttcagcaacccaactatgacaatgcattccaaaccgattacaatgtgggtcccagaggcagcggcttcgacaacagaccttttcccagttccccggatttccgtggcagaggcattcgaccaattcctgactccccattccgcaatcaaaacttaggaacctttgtatctcgaccggtaatcttgtgcaatcgttttcctaactaaaaaactaatacaccttctccaggtacctatgccatccagtggttccattatcccccttatcgccggtggttccagtattccgactggtagaagtggtccccttggttccgggggctcttctaacaacttttaccggagcgaatcctatagctacacatcggatggaagaggacctccccaaatcgagcgggatgtgttcgactcgcgggatggatttggatcatcttatcgcaacttttaacacctttcctaagagaagctgatgaatgaaagttccgagttctcaaaaacaactagttaaggctgctagagattatactgacttgtctgtgtgtaatgtaaagattcttggcattacaaataatcagttattttactttccgcacggtttatttatcagactaaataacaattgtattgaatagaaagtcagtaaaactttcaaagctattgaaacctgacagcttacaaatctaaaaaaggtatattaaggtattcaatacctttgtaaaatgaattccacatttcttacgtcatacctgcactaagtagtaaacacttactagcgtatttattatatgctcattgattgttaaatcagctgcaatatgtaatcaaattttagcttccggcgagcgtgctaatacaaaacatgaactctggactactggttttgatatttgcaaggcagtttctggaaataatatatacgttcggactatgtatctgtagttatttggtttaaacttaaatgtacttgaaacatgatatgtttattcaaatgaaatcagagttggttaacttgtccagcttctcatagacatccttttcgttcttaaagtcattaaactgcttgaccatcgccgcgttcctggccaaccgactgtcggaccatgtgctcatgtatttctccaccttctgctctacgattttcagagtagtttccaagtttctttccaggatctgctccaggtcctcaactccgtgctgtatgaatagctgaacgacaacctcgtcagcttccgattcgaattctttgctgcctgcaatcgaaatgatgctttccagttcctcaagagcatcctccagtctgttcagctcgaatgaatcatcgaagtccagggtgtccaaggccgcgacgaagtccttaagctccctgagaatgtgtcccttggagtttggtggtaaaatgagttcggcctcgtcgatgaccaattgaaagacatgtcgtagctgttcca

SEQ ID NO: 22388 - DNA, 793 bp, DROSOPHILA
gaagttcgagacgtgagtgtcagtcgagatctgcgagatgttgccgctccaattcgttttgctgggctgtctgttcatcgctcaggggatatgccacactctgccggatcccaagctaagggtgcctcgtgaaactatcaacattcccacgcatctcttcaagccagtgagtccgaaatcgagcaacaaacctatttctaatagatcatccttaaatggcggaaacagctctgccctggccgaagcaaataacgatgtcgagtttctagagagatctagcggtgaagtggaggaggtgaccgacacctacgaagaggaggacgttccactccgacctatccccttccaacctcgaccgttttatcctcagatccctccccgatccaacggtttccccattcgtcaacccaactatgacaatgcattccaaaccgattacaatgtgggtcccagaggcagcggcttcgacaacagaccttttcccagttccccggatttccgtggcagaggcattcgaccaattcctgactccccattccgcaatcaaaacttaggaacctttgtatctcgaccggtacctatgccatccagtggttccattatcccccttatcgccggtggttccagtattccgactggtagaagtggtccccttggttccgggggctcttctaacaacttttaccggagcgaatcctatagctacacatcggatggaagaggacctccccaaatcgagcgggatgtgttcgactcgcgggatggatttggatcatcttatcgcaacttttaa

SEQ ID NO: 22389 - protein, 251 aa, DROSOPHILA
MLPLQFVLLGCLFIAQGICHTLPDPKLRVPRETINIPTHLFKPVSPKSSNKPISNRSSLNGGNSSALAEANNDVEFLERSSGEVEEVTDTYEEEDVPLRPIPFQPRPFYPQIPPRSNGFPIRQPNYDNAFQTDYNVGPRGSGFDNRPFPSSPDFRGRGIRPIPDSPFRNQNLGTFVSRPVPMPSSGSIIPLIAGGSSIPTGRSGPLGSGGSSNNFYRSESYSYTSDGRGPPQIERDVFDSRDGFGSSYRNF

SEQ ID NO: 22390 - DNA, 571 bp, DROSOPHILA
atatatatataaaagaacaaagcattgcctttagaaggcaaactaaaaacgaatgaatcaaacagaatgttttattaattaaatgtaacttatttgtttcttttgctgcatttcttaagttaaaagtgccatcatccatgacatgaaaagctaactagatcaaactaactgggcatgctcacaagccaaatagaaaaaaaaaagagtaaaaaattgacacccatcgatgaaggtggcgtgcagaggagaatcccccacgatttgtttaggggtcgatggattaacgggatgtgagcagggcacgtgccaagagctcccgtttcgctttggctttttgtacagcttgatccatgtggagtcgcccttggagtcggtgtactggagtccaaagaaccaaacctctcgcaggccgatcgtcttcaccacctggtcaaacaattgcttgcccgtcgtcgtcgactgaatggcgaactccagttccgcgtccattgtcgtgacgcgcacatttagctgaaattagtaagggatgtcgggatattaaaaaaatatcgattaaatgattaaaataacg

SEQ ID NO: 22391 - DNA, 2097 bp, DROSOPHILA
ccaaagcgaaacgggagctcttggcacgtgccctgctcacatcccgttaatccatcgacccctaaacaaatcgtgggggattctcctctgcacgccaccttcatcgatgggtgtcaattttttactcttttttttttctatttggcttctaaatgtgcgcgtcacgacaatggacgcggaactggagttcgccattcagtcgacgacgacgggcaagcaattgtttgaccaggtggtgaagacgatcggcctgcgagaggtttggttctttggactccagtacaccgactccaagggcgactccacatggatcaagctgtacaaaaagcccgaatcgccggccataaagacaataaaatatttaaagcgtgtaaagaagtatgtggacaaaaagacagccgacagcaatggagtaaatcatttagagacgagcgaagaggatgacgacgccgatgatatgactggatcaatgccgttttcgacatgggtgatgaaccaggacgtgaagaaggagaatcccttgcagtttaggttccgtgccaaattctatcccgaggatgtggccgaggagctgatccaggacattacactgcgtctgttctacctgcaggtgaagaatgccatactgaccgacgagatctattgtccgccagagacatccgtgctgctcgcctcgtacgccgtccaggcgcgtcatggtgaccacaataagaccacccacacagccggctttctggccaacgatcgcctgctgccgcagcgcgtcatcgaccagcacaagatgtccaaggacgagtgggagcagtcgattatgacctggtggcaggagcatcgcagcatgctgcgcgaggatgccatgatggagtatctgaagatcgcccaagacctggagatgtacggcgttaactactttgagatccgcaacaagaagggcacggatctttggctgggcgtagacgcactgggtctgaacatttacgagcaggacgataggttgacgccgaaaattggtttcccatggtccgagattcgcaacatttcgttctcggagaagaagttcatcatcaagccgatcgacaagaaggctccggactttatgttctttgcgccacgtgtccgcatcaacaagcgcattctggccctctgcatgggcaaccacgagctgtacatgcgtcgccgcaagccggacaccatcgatgtgcagcagatgaaggcgcaggcgcgcgaggagaagaatgccaaacagcaggaacgtgagaagctgcagctggcgctggccgcacgcgaacgcgctgaaaagaagcagcaggagtacgaggatcggctaaagcagatgcaggaggacatggagcgttcgcagcgcgatctgcttgaggcgcaggacatgatccgccggctggaggagcagctgaagcagctgcaggccgccaaggatgagctggagctgcgccagaaggagctgcaggcgatgctgcagcgcctcgaggaggccaagaatatggaggccgtcgagaagctcaagctcgaggaggagatcatggccaagcagatggaggtgcagcgcattcaggacgaggtcaacgccaaggatgaggagacaaagcgtctgcaggacgaagtggaagacgcccgacgcaagcaggtcattgcggctgaagccgctgccgctctgctggccgcgtcgacaacgccgcagcatcaccacgtggccgaggatgagaacgagaacgaggaggagctgacgaacggcgatgccggtggcgatgtgtcgcgcgacctggacaccgacgagcatatcaaggaccccatcgaggacagacgcacgctggccgagcgcaacgaacgcttgcacgatcagctcaaggctctgaaacaagatttggcgcagtctcgcgacgagacgaaagagacggcaaacgataagattcatcgcgagaacgttcgccagggacgtgacaagtacaagacgctccgcgagattcgtaagggcaacacaaagcgtcgcgtcgatcagtttgagaacatgtaaaagctatcaaagatcagagatcgatagtgcgcgggaaagagagagggagcggtgagactccagaaaga

SEQ ID NO: 22392 - protein, 640 aa, DROSOPHILA
MGVNFLLFFFSIWLLNVRVTTMDAELEFAIQSTTTGKQLFDQVVKTIGLREVWFFGLQYTDSKGDSTWIKLYKKPESPAIKTIKYLKRVKKYVDKKTADSNGVNHLETSEEDDDADDMTGSMPFSTWVMNQDVKKENPLQFRFRAKFYPEDVAEELIQDITLRLFYLQVKNAILTDEIYCPPETSVLLASYAVQARHGDHNKTTHTAGFLANDRLLPQRVIDQHKMSKDEWEQSIMTWWQEHRSMLREDAMMEYLKIAQDLEMYGVNYFEIRNKKGTDLWLGVDALGLNIYEQDDRLTPKIGFPWSEIRNISFSEKKFIIKPIDKKAPDFMFFAPRVRINKRILALCMGNHELYMRRRKPDTIDVQQMKAQAREEKNAKQQEREKLQLALAARERAEKKQQEYEDRLKQMQEDMERSQRDLLEAQDMIRRLEEQLKQLQAAKDELELRQKELQAMLQRLEEAKNMEAVEKLKLEEEIMAKQMEVQRIQDEVNAKDEETKRLQDEVEDARRKQVIAAEAAAALLAASTTPQHHHVAEDENENEEELTNGDAGGDVSRDLDTDEHIKDPIEDRRTLAERNERLHDQLKALKQDLAQSRDETKETANDKIHRENVRQGRDKYKTLREIRKGNTKRRVDQFENM

SEQ ID NO: 22393 - DNA, 50368 bp, DROSOPHILA
gactaccacaaccaccacaacgacaactacttgtaccccaacaacgacgacaaccacaacaacgactaccacgaccaccacaactacaacaacttgtaccacaacaactacgacaaccacaacaacgactaccacaaccaccacaactactacaacttgtgccccaacaactactacaacttgtaccccaacaactacgacaaccacaacctgtgccccaacaacatcgagcacaacaacaacgagcacaacaacaacatgtacctcaaaaacgatctcgaccactacatgtccagaaaccgctccgacaaccaccgcttgctctgacgtgacaacaactgtttgccccactgaatcaaaggccgtggctgccacccaatcaaagcgtaatcccgtccgccgaaaccccgtcaaccgcctgctctgggaagtagccgaatgggccggtctgtcgtcctctagttctgaggctcagcttaaggtttcgtgcttgggcaaacctgacggattcctgatggcatctcctgaacggtgcaacgattactacatctgtcgtcaccagcgcgccctcaaggtcagctgtggtgataggtacttcaacggactgaagggaatctgcgatctccccgaaaataccagctgtgttcagtcttaagtataaactccgtcgttgagaccaacatcattttgaaaatgtgacaagaaattatggatcgaaaccttaattaattataacaacacaacttgaccatgcacttaagaaactgcaaaggcttataaaaggcaatagaaaaattatttaaatgttgttttcttgggcgtaaaacgacaattcgggacttttcgaaattgtcttatttcgaaaccttaacacaagtactatcgttgtggtagcttttccttgatataagtttgattaaaagcattttcataaattgtgattcctcaaaattaactaaaaataaataataaagaaacctatattgatattttttaattgcagcatctcagcctcacaaccaatatcccgagcaacgtgcacaaaaactattggaaatatcctaacccacaatgaaaaacgacgtcgtgcgatggagcaggcagccaactagcaacaccactaacagcagcagcagcagtagaagcgatagcaacagcactcataagcacagaagcaaaagcaacaaattaaatgctcgacaattagggtcaaatgctgccagaagttgtcagcaaagatcctctgtggcaacaacactagaagatgaacaacaaacaatcattgaatgtgatataggaaatttcaatttcgattgcaatttattcaaaactagttttttaacgcaacacaaacagaaacgtagtggcaagagcagcagcaaaagtaagagcaacagaagtagacccctagcgaaaacgaaagcggtgtttctattagctctgcaatttagtgccgtagtttttttatgtaatattaatgtcggtttcgtggccggaagtgtggcaactgcggcatcatcggcaggcggctcatcgccggcagctccatcatctgcgccctcatccccgcccacagttgctgtaccaccgccgccgccaccttcgtcggcactcaaagtggatccaaatggtcagtcaccagtgctgccgccctacgttctcgattatgagacggggggcaaggccaagctaacgccaaacaatggcaagttcggccaatcgggcagttccgggagcaataacaaccacatcgtcggacactatacccacacctgggcggtgcacataccaaacggcgataatggcatggccgatgcggttgccaaggatcacggattcgtcaatttgggcaaggtaagaatcgtttaaatatctaaaccaaaccacgtcacattttgttcaccggcttcatttgtccgaagagttctggccaaacacctagagcaatatccagcgagactcgttagccagtttagcatatgattagaacgctcaaatgtgagactattaaaagtttgtgccgccagagagaagtttttcgttatggaaagaagcacttggcatatcagttgatatgcaactgctggacaaagtttctactgctgaaatctgtgctttctccgttttgcattctctgcacccgtgctttccagcttagcttgcatccccgtcagtcactgggaaaacattgaggttggaatgtgatggtatggggggaaatgtgggtttgaaatgcgggcacaggtgttgccaccggacaagtttaatctgaaagcatttcgaccatgtactttcaactgctactttgatacacacacctccggcttctacgatttccacactccacaacttgccggcacagacgcgaacccgctaagtgactgtcaagtaatcctggcaatgggaatggccagcacaaatggagctcaaatcgccttgtaatggcatcgtttgcgataaaacaaggcagttggtggatagatgttggcgcgggagtataagtgcctctaagtatggatttacagttgcttgctataaactgcacaggcagaaatcattctccctattgtcggcgtctcataaatcactatggcacaatgaaaacacttctaaaggagtctaaaagtaggctatcaaatatttggttaatgcataatacccacacattccttccaaatgttcgcgttcttatttgattgcattcttttttttttaagtgggagaggtggttttaaagccatatggaattttctgaattaattgtattttaagtagttcatcgttctcttttttataagtgcagagcacaagccccattcgttggggtatttgaaagtaaaatacatgccaagggttaagtcctgctcccgctgtttgagccccaaatggatcccggcttttgtgttttcaattgaggaacagagaccgacacgcaggtggccgacgtaaaaagagcccgtgccacgaaaagctcaactgtggcgatttccattgtacgactcccatttggcggatcgaaggaaagacctggagaaatcggggatagggcggatggcggatggcgacttaagtagcatctgccatcgggtcagtggaaattagtatcactcacaatggcgcccgtactctttcgaccatcgacttaattggcagaaacaaaaagcggaaaattcaatttatgaaggcgggcacacaaaacttttgttagcactcccaactagttgaaactgacgatcccgaaagtctccgtaccggcgaaatgcggcagatggccggccagctggactgggggctccgcgaaagttaattgaaaattaattttaaatggcattgttaaaatgaatccaacttaaggccaacctgaatgcgaacagacaccgccgagtctctgcaaatgaaatgtgccgttttgcataattagatgacgcccgaaacggctgtaaaactgtaatgagatgagcgtcaagcggaagtggaaatgaattctagacgttctgccttacttaccattattaattgccaacttgattgctgggaaatgaaaaatgaacaagtagtttggtaaaggaattgctctttgggggggaaatggcaacatcaattaaaacgacgtctattgggcgtagtagagaaactttcaaatgtattataataatattcttatgttgctgggcaactgcacttatggcacaaacaatcttgtgctattacccattacattggcttatttgagaccctgaattgcttcatatatcaaacacataacgcgccaagtaaaattgttggtcttacttccaacctatacaattgaaatcaaatgccttggtaacccttcaacctgaaccttgttacgctttgcttcatccaacacgaactttcaaccccacgaactttcggtccacctccaaacatttgaaacataactcgtcgagagtgttgccaaacatttcgcacttgttcgtgttgctagctgcttttgctttctgtttctcatgttgtaattttttgtgggggcgtgccagctagcgttataaactaaaaactaaattcgcagcacaaacaagttacaagtgccaaacagcagtagtagcagcagcagcagcagcaacctagagcaaaaacaattaataaaaccataaagatgaagtagtgggacgcgagactttttgccatttgctgtaacaactctggctgttgcgatgcgatttcaaattgcagcttccagggtcgtgatgtttgtttccctgaaggaggagctaccgaatgcggggcacatcaacaaattcggtgtgtcagaagttttaatgaaaacgatgctctatatatatatatatgtacattcatatacctctcttgtttcagccagttccttggctttcgcccatcaagttttcagcggagaaaactttttggcaccgaaattatgatgataaaatagagaaataaagttttctggacaacgagagttggtcggagatattcggagacgagaatggtaggaaattgcaaaggaatgctcattaagtgcacttttaatttcgtttttctgttcgctaagcaggaaggaatttcatgtagataaatacggcaaagtacaaattaaaaaatttgcgtaaaaatctgcagtctcattttaacgctttgatatatttgaattcagtttcgcacttttttggatccataaatttgaatgtttctttttgaagagggaccgctctcaaaaacctttacctaaacgtttaggaaattcttggaatttatacaaaatgaaccctgataagaattccagaatgttggtcctttagctttctttcccagctgtttgtcatttgcttatctgactttagtcttccggtcccgccttttttctccatttctcctgccattgttcttcttttctatagcgtcatttacataacactcactctttgtccgtctgctgcagtcctttggaatccttggtccttcttaagctcctattgtctgtctttctggactgccgctgataaatgttatccctcggccactcatcaatttaattgaaaagcaagagccgccaaaagcttcagccaactcctctttaccaaaattatttgccttttcgggctgattttttcttttttaaaattaatttgcctctttcttgagccagccgggtcaattgaattattgatcgaccgtccgattgattgattctgtggctgcccctggcacaggattgcatcgcatgcttattgcattcgcgtaattaaaatcactgccagtcggttgtcctttgaggacattcgttttccacctggaagccatatacccttaatactccactgcgggccatccttgataaaggtcaacggctttttaataagggtccgccgggcatcagaatctgggttcaaagaaactgccaggggcgtacctttgcaaccttaagccaaactggaggttgcccttttcattatattcttttttgtctcaaggaaaacgtcatcatggaaaagtaaacttttcaataaggcttaattggttaacaatttgacaagttgtcaggcacaacggtgacacattcgggtctaagctctttttaagatgcaggcccaacacaaaagggcacactttattaattagttcttagaagtgtgtacaatttaacaatctttcttataatataagaagactgctttgtttttattttggcaacaacacattattatgaaggcaacaacacatttcatcttaactcgtaaaattcgtattctatgaaaaatattttacaatttaaaccatggagggttaagtagtttgagcagcactggatcaaccttaaccccagctgacaaatttttgtaatatatttttgcacttttgcatgtcgcaaagtttgccaacgaaagttaaatattgtaggtgttcatgtgactgtggattgtctgtgtacacatttgtacttatgtctgtgtgctggtgtgtcctttgttcggatttcgcgtggctgcaaggcggatatcgttgataaattttaagtcaaaaactcggaaaatatttatgacttaacttttgtttagtaacaaagcaacacgccagcactcgtatctaggattccgccctgtgtcccttggcaggatttcacaattgtcacagaacttggaaccctatgcaaatggaaaaaaagggggggtggcgggggatatgccttcagcttgtttttgagaacttgtacaactttaatcacatgacatgggaaataccagaagtttacataattttctgctttttcgccattgatccttgggacttgggaaaactttttagtacgatttgcctgcagcaaacagcgggagggatatcgaaacgcagtgctgttcctaattgaatatgtaaaaccgaaatgcgattgagtgtgaaatgagtaagccaaccgactgccaatcgaagtaactgcctttattgctcgtacatcctcgcaaagtttctgcaacgcaattgaacagacaagttttggggcaacatattttattccacttctcgcttttttttctcccccatgcgtcgagtaaaattaagtttactacttttgtgccgcaaatgaatcaatgattgaaatagtgtggtatgagcgtgtgtgggtgaaaactttttgtgcatttgccaatactgcagaataagttcaaatgaagctaataaatatttcgcaattcgttgcaaacttttacgccgaaaaatttgcatcggggccgattcaattggcctgaaaattgggccaaggaatttatatccagccattgctggttcttttttttctacactcttcttttcattggcggttcagtgtttcacttgtctaacagatcgacaacaacaaaagtggcgactttaaggacctcaatcaagttggccatgctccttttgatgacccatccgttattttccaatcttggaagagtaggaatacattttaacaaccacctgacctgccacaatgttcagtgtttggagaatgagcaactttatgcgtaatggtgatgaagctgatgtttatgcttctcggcaggcagttaaattaattaggttaatttatgggacaaacgcgtggcagcttttttagaaaccagatcttaaaacggagataatttttcacttttaactaattgaaaagtatgttcttacctagaccgtcttccacgaaaataatacacagatagcgtttttatcggtctccatcgatagcatttttcaacgaatttgcctatttttctttggcacttttttttggcacttttcagctctctcaagtaggggctttccatcaaaatattccttatcctttggctatgcacggactgcataaatattatagatatcctctccatcaaaagttcaatcatctgctccatcatcaagtttgaagggagcacttcacttgactgagctgaactgacccgcctcaaaggaaagtttactctttcgcattcattccccacccattgcaaatgattctcgcatattttaatgcatattttgggtcgtcctttgcgttattcccattctatgttggtattaacaagaaatcgctagcaaaacatgaataacgagacgaagacgttggaaaaccttgcgtaaaagttttcccaacctcgaccgctgctgttgttgttaacgcccaatcgcgtcgtgtttgcttagcttatctttttgggctgtcgacggttttttttttgttctcgcagctccttaggaaaagctggttgaaaatgtgaaaataaaaatatttgtaaataggcatccctcggagttgagacaggccaaaataaacgggcgtttttagcctcggctttgccacgcctctaactccgaaaatgctttcagcatggggtgtgtcattctttttggcatcttcagtatctgccatccattgtcgtttatatgcaggctaaaaaatcattagagagtcgcgttttccctttgtccggttgtgaatctcttttctttcgtttttttcgccgtctggacacgccctggcttttggcgatgatctcctcccttttgctgtacggcaattggcgtttgggcctcagtcgagtggaaaattgctaatggccaagcaagaccctaagcaatacaaaaaaaaaaaaaaaaaaacaaaaaattgaaaagaataaaaaaccaaactgtgactccttgcaaatggccgctgtgattttaattaaaagtgctgggggaagtcacagtcacaggggacaatcgacattggtcaaaagtcaaagttgacttgattttagggtccttttaattgccctcgaaaacgggcaatgaaaaatgcgaaaataaaacgagactcgtaaatttatacattgctcaatcaagtgtaacgattgtattgcaagtgcaaaagggagagtggaaccaaatggtgtgggtggaaaagttggtgaaaatcacggtaaatatttccgcagcataaatattgaaattttcccggtcggtatattgaatttttagccctcaacccacacagcgaacttggtcaaataaatcgttaacaattgcaggtcatggggtgatggtggattggaatcaaatcaacactttccgcttgattaggccaatatggaaatttgatatttgaccgatgtcagttcggggccaattagaaaatattgctcaaatatctggaaagcttttgttttaatttgttttatcgtgtttaagcccatcgggatttgcatagaacaatatacgttcgtattaacgccacactatgcgtataccttatgtgaaatcactcatacgcctagtggtcgcatggaaatgaactatgtgttttttcttttctaagattaaagcggtaattaataaagcggaaaatgccattagaaagcacagatgaattacgttttcctctgtgtgtttaattaatgtttacccccttcccatgtcgcaataaattattgatcgccttcttgacctgacccacctattctgttcactttcccccccttctctacacttggcccgcatcccaaatgacaatttgagttattagtgccacattcatatatcacgattgtgtctgtgggaatagattggcattttaattgccaccgacacattcaagtgccatttaacatagatcccggctaaatggtttcatgatttagatggattcttatggaagtctattgtaaaattgcaatagaaactagcacaaggtcatgtcactatgtttttggcttgcagtaaatcttgcttgtctgtagttcctttttttttggcaccgacaggacccaaaattaaatatgaaaattttgaatttacgtttcgttgtcattgatccggaatttatggcttccattctcatttttaattaacttgacgacgggactttcaagttggcaccctggctataaaactggcaacgattattcctttgtgccatccaaaaaattaccaagccattcccctcctctctcgtcgaccaacgaactgtgtcctcgttgtgatttggcatgcattcaaaaagttttacacgatacaaaagcactttgttctgcctgccaactgacattgaaaaaagacgcatataacgaatggcaatcaacgctgcaattatgtaagtgtatgtgtttgtgctgggacatgtgtgtgtgtgtgtagattgtgtgtttgttggctgtcgcctgtttattgaacttgcatgctgaccttagcctgcttttcagccacatttcagttgcttagtcattttggcactagaagtacaggacggacatactcaaaagtttgaaatactatataatatatatatatatatttcaaggaaaaacatttcatatatgctcctaatatgttctactaaaaagattaccaaactagtggtttatcattctacttgagttcaacttacaaaagttctactgtagctgggaaatactgtcgggcaaatgtgttgcatacttttaggcagccaccgcacatgcaatcccctccatgaatccccaccatctcaacgccaccacttccgtcgaacgatccagccctcgttcatggccacatcagcatgggcttgagccttagctttggccatagcttttgctatagcttcaccatcggcagcggcttcaaagtcgcgttcaacgtcaagtggcccactcggcattccacttgaagcgtaatgaaagcatttttgccactaacacatgtgaagaggctgttggccagagagggaaagggatacgtcgagtgaatgaggcagaaatgcagatatatagagagagagagagacagacagactccagcacttgcttagcattagtgtgtgcgacatcagattgacacttgtcagaatcatttctgtctacaccacagcaaattgtggcccaaaggcgacgaaaaaagcacagaaaattagccaaaggagcaaaataagagaaaattaccctgccctttcttttcttttcatgcttgcccaactcgattacaccaagttcgagatctgtaattccattaagatttctgtctcattgcacagcggtgtcaagttcatttgtttccacagactcggcaggttgtgtgccacctggctgcccaagaacaataaaacacattaacacctattagagcgttgtgtgggggtgagattggggcgaaaggggagttaaagggtggcttctggccattgtacaaatgggagcataaataatagcgactgtctgccaagttatgaataataatgacaacaacaatgaaagcgatggagagagaacaggaaagccaggctaaactgatttaactacgcacagatgtggtcatctgaataggtttcttaaagtttctataagcaattacatggcttttgagactttatataatgactaaaattttcttgagttaatatggtgggaactgctatatttgctagtattgcatatcaccccaatattttgacctgcactgtacatgtacatgagtgtgtggaatggtaattaaggatttggcctttgccaaggcagtccggttaaaatgccctgccgctttgggccatttttatggtcgttgtgcaatggaatggaaggactaaagaggaaaaagtagaatcgtgccgagacaaaaccacacctgcctgtatacctggctctaagtcgggggaatagcaaacaggacatggccacagataaggccaagtccagtatttgtgtatgtgtgtgtgcttacaaatctctgcgctaattaaaagtcattagagtgtggtataattgcatctaaatgaaatggccggggaaaagccgttttccctcacagtttaaccctcagataaatctgttggaacttttagttgatccaaggcgatagtacaaccatatctgattgcgttttctctcttgtttttcaggtaagcaaccagtgaaacatgaaagtgaattgccaaaaaaaaaaaaaggtgtaagtaataaactgtcggactgtagcaatttgaatgcaatgctgactaatgaacacggacgtaaagttcaaaaaggacattctgttggcacatgaatattttacgagccagtttcattagcacttaagccgctcgagttgtgacctgtgtctccgcgctgcggttaccataaaatattaatctgttcgagccgcattacagatgcaaatgcaaagcgaatgaataagtaatagtcgagtgtgcgaattattagagggcattcggcgcactaagtgttcgcccgaaagttgaaagttgccggcgtaagctcgatcgaatgcgctgttctgttcgcttcttcataaatttctggctcatgaaatatgcaagtgccaagctggcatgaaaatggcggagcttccggtgcagccgctcatcctgtcccgcccagagtcctgccttatcctattatctctggccaagttcttttttaaaatctactttcagcaggagccctctgttctgttctgttctgttcgtttctgttccgtcctatgctctctgttcactgtccgtccgtcctcctgctgttttgtttaaattgtcagtttgcacgcaaaacggcgcacttccggccagcgttcatttcgctgacttggcctgcaaattacagccaacttttgttgccggcatttccacgcatttcctttggctatttaggttcgctgaaaatatctatgaattcatcgcgaatattttgcagcaattttttaataaacttgcgttgttggcgcgcggatttaatggtgttggatgattgaaatacttgtttattttagtttttcccacgtccttttccgacaatggaatttaattgactgctctttgatcgcgtcaagtttatattagtttttacgaaagacgtatattgaaacacgatgattttatgcgtgttgtgtattgattcgacgataacaattggctgcaaaaaaatggcgtaatggctttcactcgctggcttttacttcctaaaaaaacagcaattatttttaaaagtcaaactattttaataagggtataaatataatttgctttgataggggaatacgatatttttttgtgcaattaagtaatttaactttatatttaaaaacttctggtatttttagtgttacatatcaaattaagcatacaccacgtgtattccgatttatgatccgcattaaagtcttatacatttgcttctgccagtgggacaggcaatggcccacaacactttattatttactgccataatcattttaatggcaaaaagccaagcaacggttataacgaacacagcatgataatcatatttattaacattttaacttaatcagcttggtgtcttttgatgtatgcgcaatggggaggaaaagatgacatcgggaaggcggcctaatcagtcaggtgctgtcaggatcccaagtagcaaacaaacattttaatttaaattttattcagcttccactcagttaagtgcaatatttccacccaaacgtgtgttggcaattttctttttcccttctcaaccgccacaatcttgtttgtcatgccgtcttgacattaacattgtctgggttttcctttgaaatttacagatcagaaagtatgtgaaacgttatgagaatttttcagggaacgaaaacgagtacgaaaatgaagctttctgtgaaggcatccatcattttgtggccccagtaaactgcagctgttgttagtgagacaaacactaaacgtataaaacattttcatttaattgaaacaaatgagtgcggcgtatcaattgaagcgaatgtgttggtttttaggatacgacaactagagagcaactttggctaaaactgttagccaaatgaattgaactagtgtgggttgtgggtgggtgttccaggcataatttgccaaatgagcaaaaaggatggcaatcgctccaggaggcgacacgtcgatggggccacaaaaaagcgaaatacaaatagaagaaaacaagcgggacgagcgtataaaaaatattccacccctaggttttggtgccaagtgatattaaaatccatgtaaattacacacaatcatcatcgtgcttacgtctgcatgtgtgctagcgtgccataaactgacaccaaacacgagcattccgccagaccttttatggtctgaccgcaacaccaacgtttgacacactcgttacaatagatacgtagatattttatatatatgtcatatactgcagataatgccagcgacgtgctctccgaagtacaagtgtaccggccacatggatactacacactttaatcagagataagaggatgtcgtaatggagcataaagtaaaaccgaatggcattcatgcgattagacgacacgcaccaccacagatacatataattgcagactacatcctgtgaaactcgtagtattgcttatatcgcctgaaatataaatacttttaatggaaaattgcttctaattgaaaatcgtttgtacttttcacaatttagtttcatttatttctgatacttttcagctttgataaccaccggaaaagggctggttgtactggggcttgctattaaagttattattgttgctactcgcttgggtgtaccaaatgctctgaggtttttgcgatgaaataacgccagactcaccggcaggacctcgtggaccccgtggacctgggggtcctgcaggtccccgctgtcctggtggacctggtgggcccggcggacctggaggtccagacacaggaatgggaatgtaggcagtgggtggatgaggctcctccttctcagcagcggcagattcaccggccagattcgatggcagcagatttagaccaggccaattgaaacccgattgtccttgaacattgaaacccacttggacgcggggcaccacgacataggaaaggccatttccttgatttgagctaatggcattcttgttggagattaattgagggccataggccacgggaaaggcggccacttgcggaaccacatacttcagattctgatcatttaccatgggaatggcattcgagtagaggtaatctggaactttgcgactgtccttatccgattcggtgtctggatcttcctccctgatttgtggttcatggaaggtggtgtcctggtcatcggatcgtgctatggcatcgccgggggaataaatgagaatttgtggaccactgggttcctcgacatctatatccaagctactacggccagttccaacaactcgtcgcaagttttgaatacgcgcgtgactgccaaaaaccaggcccaagatcactgaaaaatataggaaaaagtataggattttcttagtctggaaaaaaatttgagaacttcgtcttttcttacccaatatttgcactctgcgattcattttgatgaactgttgattcttcgattttcgctggcctcttttatacccgagtctttgactaagataagatctgcagaaaggttctcagtaatgggcaagttcagtcaacttgtcggcatctcggtggtaatcaattttaactgcccattttaactgggtcagcgtgctaaaccggttcgctttatctggggatcttcgccattgagtcattgggtgcggttttgcacagcgaactctaatagaagggcagaccagaaccctttgtggtgttgatatattacaattactctttaacatgctggttttttgggtgactttttataatgaaaaaaatgtatgcttatcgacttatatgcataatttagttggccagtttttattttatgaaatatattagacagagagaagaactattagaagacacataatcctagaacatttttggccaatagttatggaattcaagataataattcaacccttgatgcattcccactcgtttttgtttgttttccatttcctactttaaaaaacattcattttcatcagtcagatgtgggtagcccagatacagagacctgctttggaacccaaataatggaatgcaataaaacaagagtgcagaaaaacgtacgagtaatacgtgtatatatagatatatatatatatatatttgtagtgaaatggaatgtcgcccgagaacgaaattgaaagttcagcatgaaacatttttggaatagaaacctggcaggggtttaattgaattaaatcaaaaacaactgctatgcgaccccttcggcgttgctatgtttctgcttagctggctgcgcagatcggattgaattgaagcacccgcatccgcatttggggtcgcttggaacatctgaattcggatttcagattttagatctgtggatagttggatcgaatggtcaaagtagttgagccagttgcgccgtggcaagcgcttcgttggcggctcccgagcgaaaggatcgccactagggggtcctgaaaaatcggtttcgcgtaatccgtataccatggcggtactctggtggttgctctcgttgcaggtggtgctgatcttaccgcccagttaccacctggccacgccctcctccgggagcggtcaattgcgtcgtctttggctgcaggatcattgcagtgcgggaatttgcacgaatgtcgtgattggtcgcagtgattatgtgatcctatcacaggcccccattgggggcaccaccatgctcacctttctgaactcgagcattgccaagataccgcatttgttgttcgacacctttccggatctacaggttctgcgcatggaaaactgttcgctggaaactttcgaaaaaccgcagtttgaaggtgccagcaatctgatgagcttgttcttgggatataatcgcctgaaggatatacctaagaatatattcttgggcgcagacaatctggccacattgcatctgcaaggaaatcagttgaagcagctgggaaatcatagtttccatgccttgaaagaagtgaaggaactttcgctggcggaaaatcaacttgagcaaatttctctaggagtttttagcggcatgaggaaactaatggacctaaatttggctggcaatcgattagatgctctaccaagaggcgtcttcgatcggaatttaaaccttaccaaactaaatctggccagaaaccggttcaccgccttcgaatcggaactgttgaagctgcagccagtatttacgcagttggatatttctggaaatatcttccaggagttaacactcaactttaccatgctggatgtggctatagctcatagttgcgatttgaggaggttgaccgtctacggagtgatccatgaactggatttgcacaacaactcgctgagggaaatgccacacattccactggccgccaatgtgagcagtctggatttgtcgcacaatccattgggaaaccttcagggtaatccgttgcgtagattcacatcgctattgcggttgaatctttctgccaccggtgcccacgagttgccagagggattgttcaagaaacagagccatctgcaaatgttggatatatcaggaaactctatatactcgttgaagatcaccatcttcgacagtttgaaggcgctgcagtatttctactttcagcagaacaactggaactgcgatttcctgcaacttctaatgagttcgtttgtgaaacgcaaggacatttccttcatggaggatataacagcacccgaattggtggacgattatgtggatggcattgcctgttggtatgagagcgacaagcagtcgaagaagtgtgagtctggtggctcggatgctgccatggaactctcggtggtgcgaaatgagatcaagacattcaccgagttggtggagaagaagttcgtcaaggtctatcgcatgttggaggagatgaagatgaagctatagccggaattggattaaattccttgcaatattattcaaatcatatttaatccccttatttaatcaactatttaatcaaacatcaagcaatgttaatcgtactttaaggaatttgacacacaaaagcaacatattgatattttaagacaaattactagaaccaataaagcactttttggaactctagggaaaaccaagtgtttgattacttatgagttttttttatcagtgtttgtgcaatggattcagaaagcctaactacaaatgcattaaatcacattatttaattaactttagtctcttcaaaagactattaaaatttattcccatctaactgttttataaatctatcttttcgttatcatatttcataatcagttcgccagaaacattttctgctgcacatatttaaaattcttttgtgcataaacgtgaaaacagtttatcaggcgataaatcccagacttcacagacagctcaaacctagaattaaaaaaatcgctaacgctcaatttaatgccataaatattttatgcaaaacacgagcgggccagaaaaaatatttatggcataaacacaatatttttttttttataaaatgaaacttatcggcgtaatcgcgcccagaggagacagacacacttaaaaaccgacaaaacttaattaaatgcaggcgcacagaaaaatatccacaaataaacacacgcgaatggaattttttcatgcggtccggcaacgtcaacggaacattgcaatgataaaaataaatgcatttcgtaaacgttttttcatttcggtatattcataagtgtgcgctgtggcactgtggcgaattaataaaaacaatcgcacgtggaaatatcattaaaatatggattacagttgattgggcttacaaatataaaacgatggttttcccaatgccaaatataaatagtttcgggtatatttttgtggatgcgactgttggtcgaacttttggctaacaatgctaacccgatagcgctcggtttatgatgatttatagacgacgtaaccttaacgttatcgaacctattccgattcgtgaccggaagagcgaaattccaataagcatcatttgcattttcaatgctttccgcttgccattttcttttttggctcattcggagatggaggctctatgcaaaaatgctgggaaagatgaaagacggaatatagtatgcatcacatcttaaagctagcgctattaagacactctcgcaacatcctatctctctctctattgtgcggcacttcttcttggcctctctgtcgctcttggactcttactacgcttgtaagcaacttccgtttccgttatccgaggcgccatttgttctgccattgttgccattgaagctgctgctgttgttgcctttcaccatgcccctggattcctgtactgtaactatgcactgaaagaaatgtccataggtttatacagtctataatgttacataatagaagatttagatatgtaatttttctctgtgtaacaacgttaacgcactaactatgtgcaacatatgcagtacattcttaatagtcctccacttcggttcgcctgactttgtcctgtcttgggctcaaatgctttttggccaagtttatgaaattgttgttggcagcttgttgctaatgttgttgctgttccgatgccgcaactcattaagaaaacaaaagcaaagtacgaaagttgctcgttacctaagcgcctccaccaccggcttaccactttgttgtaattaagttgactttattactcaacaatgttgtacaaatgcatttagcttcagtttttagtgctttcgaggttacccgctgtaaccttaatcgaacttttgagcccggaatattcattattttatggtgcaattttaatattaccttattacctttattgcaaggtggccagctgtcggagaaaagttttcgtccaaactttggttaatgggtcaaggtttctgggggcggcgaacaaatcaaatgggtgtaccgaatttcctgtccatcattcctgtgtatcattttgcactctgcccatatagtatgtgttcttttttcgcccacctcatttacttaatttcctggctatgctcacgtaccttcactcaaattccctttacgtgccacaagtgaaatgcgtgcttatttgatttgcgcaagtggctgcctcaaacaaaaaaaaatgagcagataaacatacgtgtcctctagggaccccggtatatttgcatgctccactctcaatttaatttccccagctttatttcgtattataagccagcaaatcattcaattgcttatttgtcattagccataaacaatgcacacgctccactgcaattatgtgcgcaattaggcgtttgaggctaatttttatcaaattttttgctgtccgctcgcgaaaaacatacatatttatttgctgcgagagatggccggcagcaggctcataaataaagcttaatggcaaaaacagttggtcagcctcctggcggcaagaagtggggtattgtgctgtgttgggggtggcattaaattaaaaattcggaagagcgaaaggagggagcgaaaaatatgttgcctacttttgtgggctgtgcataattgggcagcatgaataatatacgagcgagcggttgtatgtgtgtgtgggtgtgtgtgtgtgtgtttgtatgggtaagttgctagtttggcaaacgaggcgtatgcacaacatgcgtttgcataaattcacgcttaattagctctcgcttcctcacgcctagctctctctctctctcccgctctcaccaacgctctcactcatacgaccaacaaaacaggcggccaagcaagttgtaacgcttctaattagcggttgctaaacgggcttaaatttaatttaatagaatatgtttaagctttagctttagctgctaaatctgctggtgcagctgcaatcaatttgtggcaatcggattattgaaattgaaatagaacatgcacaacaaaaccgaaatggttttaatatttttttcatttaatcattgccaaaaacatttatttgccagctgagctatgctccttttcgaaatgaaagaaaaccaaatataatcccagccaaattcaatttcatttgccatccattgttcgtgcgttgtttgcgttttgctaccattattaactgcctttttggcgcaattaagctgccacgcccccttctccaacacacctggtcggcaaggcgtacgtgtctttggcgcagttacgtttaatttgcagcagttggtgcgggtggtgcggcatgtggcaggagttgcaggaaaagcggcaggaaggctggcgcaacaggaacagaagcggaaagttggcaagtatttgactgctaatgcactcacgttttatcctcgctggaacaccgagtggtttcctgtttgtgtgtgtgtacacccgttgtgttttacaacttttaaccaaattgtttaactaagtagtaaaagcgcataaaagcacgtaagacaaatgtacacaaaacggcgaaaagaaacataaattcaggaagaaagtagttaaaatgagttgatacaaagaggcaaagttttcgcaatgaattaaaatatgtttgcaaaggcaaacattttctctttaatttatattaagaatcatattggttacaagttctctggttcgttaattagttaatttaagtgcatccacttgattttaacgcgttatcagcatcagtaaatcttttttcaattgataaatcatgagcgtgttagggaaggaatattcgatgcttccgttgaggacaaagttccaattgaatgattcaaacaaacaaaccaagtaattgagtacttaacaaggtacgaagggacgccaagacaaatgacatgaattctggaatcccaaccagctatttgaatctccatttaccaatgcatttagtttcacccggtcgaactagtgcattttgccatggccatggctaacttccgaggagcatttgtcattgcaaattgaattcaggagaaaaggagacgaagctaacattacaaatcatttgcttattattcccaggtcgctacagccgtctaaagaggaaaatgttatgcatttgacagggaaataggtgggatagcccagggaaaacagaggaaaaatcaggagaagggaaagagattagataatggttcggttctgttcggtttggatttcagatttagcagcaactttgcttaaagccacgtaacatgatattggcagttgaccaagaggtggatttttaggtggctctgcggtgctgctcgccgctcgaatctcagttgccagtaaatgcattccacttcagtggacaatgtgccacctccaccagcacctcaaccaccgtctccatttccatctccgccgccacacccaccatccatccatccgtccattgcattgagcgttactcgcatggaaggcgcagctgcacaatttataggatatctgtaggaggccaacttaactgggtgttaagggggtgtaaaaggggtccggcccgataacaagcttactcgggctgcttccccgacactcttctctcccgttctccttcgattgcgtataaaatcttataaattgcaaattgaatttaacgataaacatcgttgggggcagccagaggcagcagaacagcagagagctgcattgggcatattggaaggacgactcggtaccggaatcggttcattgttggctcacttaccccacttgttcgactgctgggatggacatgcaattgatcctgattcggattgtcttgtgccgtttgtgtagatacacaaagcacttaggataatgcaggattggccatcgacttcatttcgattgatattaaccctttattggggcaacaatctacatatctatttagcttaagtattgattttgacatagtgcataatttaagcaatccctaaaatatccaataattcttttaaatcaaatcactaattcatagtctctttacctcttctcattttaggtaagctcgaaagctaatcgaaagaatttaagttcttaaacacgtaagaaacggacaactatatattttccattcaatcatcatctgtctgccagacttcatcatctgagcccgtgtctagactctcttaactcatttgccactcaaagtgttgtggtgcgtggattccccagctacgcattatgtgttcaacttttgcagctcccacatgaaacttcctctttttgctttctctgcccacactgtcgcttccactttgcaattatgtagtcggaaacacagctcacagcccaaaccccacaaaacttgcttcataatttataagtcagtcgaaaaaatacaagaacacaacacaaaggtccaaagaccagacagcgtggcgacgacaatgacgacggcaaacgttttccaacagctggaaaaaaggggtaaaagctacagtaaaacgaggaacacgagagggaaaaactaagctaagaacttgttgataccttagggcacacattttgataataaaattaatatatgtttcagctatttaacaggcaacgcgtggtatacgtactatttgtgaagacatgtagttgtatatattgcctgcagtttgtatttgaaatattgcaaagtaccttaggctaggtacgaaattatataattaaattatattaaaaattttttcaattttttttttaaaacattgccgaaaatactttattttaccctttagctacatgtttaagggaaaaacactttctggctgcgaaaagccaaaaactaactgccttttgtttgactccaatgcgccatgtgtcctttacggttaggagtttgttgctctgtgcccgcgtgagtgtgtgtgtgtgtaacgatctgtcggtgtgtgcgtgactcctgctttcgtcctcttggtttttgtctcagtgcacgctctacgatttaaccttttttctcccctttggccatattgttgctggccattttcttgttcccgctgcgttagcttttgttattgttacgacgattgttgttgtcgtgcggacataaataattcagcacacagacagacgcacatagccacacagacagagaaagttttggacaccgatacagttggcctttcattgttgcttctggcttttttcatgcctacttttatggcgcttttgttaaacaaaagaaagggcaattgttgacagagaaggaagtcagttaagtgatttgtagactgcttcgattttgcttcttattcagattcatgtttttaatcactgcaatcaacattaaacttcaaccagcattttaaaactttgtagaacattttaaatctgctctaaaacaaacaacagagcaactttcaatctcttcttaactaggtatcttaaatttgttaaatacatgaaagcacgttttttgattcttggaaactctttaagctgcgtgtgcattttttctaagatatgcaaaaaaaaaaaaaagaaagaaatttcattttcacatttttgaaatacttggcgaaattcatccgaagttgctcaaccaacttggctgccacataaattttcgccatatgatttatacactctaacatgggagcaccttccccttcaacaaacctcttgttctacacagcaattatttggaagccagtttttggcactcgcacacattcagactaccacccacacatgcttgcctaagcgatttctcaatttgcatatgtttcacacacacgccagaacgctgaaggactctctcgctctctcgtgggatccttgagttggccaggctgtggcagtcaatttgttaaataaattgaattatgttacagtttcgccatatttttttttttgtgcttttgggttttgggtctcgtcgtgtttctgccctcgagttgacctttttttgggagctctaatagaattacatatgcgacaagtttgatgaccaaactcgaaacgatatctcctgggcatcatggggctgctgtaagtttataactaattaaagagctaccaaaggctactttgtactttcatttcaaacccgtcaaccggaaacaaataaataaaagagcagaggcaacagaatgcggaaattcttatcgttcaaatatttcattttgcaagaaaaaataattttggaaaaacataaaaacggaaactgcgggccgacccaaaataaataaccagagatattaaaattcgggcaaaccatttttgtgtgaatgcctcccccccccctctcacatggctttttcttcgtaagccaacacatgcagagcataattaataatgagagcgtagtagcaacgcgaagcagaaagcggaaatccaattaacattttttcggttacttccgtttcctgtccaaatttaattctgggaatttcaccaaacacaacagagtaacaaaattaattaaattgtattttttcctgcggcacaacgtgtggtatacttaatgggccttcgtgcaacacatttccctaggattttagtgccataggtagatcgtaaaaatctatcccattcccttgctcagcgacaaagccaattgacaaagttggtcctttgtgtcgtcttctattttttattaccacttcaggacgattaacgcttcatgggccgcttacagtaaggtttgactaattagatttgtgagcgagtatatagtatatatattttcttatatgtgcgtagtcaagtgtccttccattttctgggtacccagttgtgttcataaaatgtaagcgtaataaacccttattttatttttgcgtcccttcagtttggctgactttggggaaagtgaaggcatcgctaatggaaatttatgtagtaaaaaggaagagtctgtgaaagttctagctagtcgcatagttagaagttggctaggcaaggcggtaaatgttggacagttgagttacttaattagcatcaggtggaaattcagaaaaatcacaagtgtacctgcctaattagtatttttatggaaaatattatactgacagttcaattaaaagcatgttcgcagataaaactgtcagaataaaaattgaactgaactcaaaaatatttttttatctttgttatcttcgaacaatgcaaagattcgacttgatacaacattgacgcagaaacaaaacaatatttgttcttttgagagcggtcttcatccacttataataccagccaaagctagccacacaattccgcttgatatgtttgcctttcatcgaatacaccatgaattcaaccagacccccctcccccaaaaaatatccgctgaaaaaataccccacagaccggaacagaaaagaggcagcaggattgttaaaaccgctgctgaaaagcgactttcaattaatatacagtccagggggagggaaaaattcgcagacattttcccgctctcacattccgccgcttttggcggctcaattcggtgaaccttaacgggcaataacgagcaaaagccgcagggccaacacgcacttggatatggtcgtcgtacactacaagaaaagtctcgaaaaatatgtaaaaaaaatacttcatttgtgtaaaggaaaaatcatgttaggatatttaataatgttagaattgtcaattttttcaagtgcatagttcccattctaaagtctttgctcctctttgtttaatacccagcagacatttttaaaaacgcaatccacaaagaatgttaaaatactttgtctcgccctcacacgcactcttgacccgtgggactcgtaaattgtgcaatttcttcattgttgctaatttatatgacacgtccgagagccggcgagcattaaatagagagagggggcagttgggggaggcgattgagccaggacgagaagagagttcggcaggacgagtgctaattcaaggcaaataatgcgttgcaggcgtcaggcgtcgggccaaaatggtttcatggccaaaagtcagtcggagcaggacgagcgaaacagcaaaaatacaagtgtgagtggttgggggaaaaaagtaaaaaagcccaacaggaaaaaaaagaaagccgagcaaacaaaaggaaataaaccgaagcacgtaacttttggttaaccaaatggaatatgacggctttggtagctctgacccactcagagcatatcctgcgtgggacgaggagtgtgggggcagtgaggatacatccttatccccagacacagagacagaccctcgaccggcccccaccccccatccaccaccaccatcactgcaccagcaaaccccactggcctgttgtgttagttcaaattacctgaaagtccttttgggcttttgagttgctacacccagctgcatggccaaatggaatgcgcaagatgagccaagtagaccactgcaatttgctgatttttgccaggaatatgagattcatacatatacacggtcttaaatggaattagagatatctaggtggtgctagaattggctttgtttctgttacatttaataccgcactcggaattaagaactaccgtagttaaaggaaatgtttgtgcacttaacactttgttttcagttaatggcaaaatattgtagaatttcgttgcatggccaatgacatgtttgatgtcacattaaattacagcttttaattgggatttgtagttttgtaattccgcaatttcgtcgccacataaaaatgtgcaaaaaggtattcaagtttcataagtcaacttaattttccaacagctggtgtcagtcgcttaaccgcaattatcctgaccactgaaacgcagccacgtatgagaaactaattactaagtaggagcatctaataactttatggcattcgctggctactcactttttccaagtcagttggtcggacaatccgcttaggtccagtgaaattttgtgcgaattaagacattttttatgctgcttgtgtgtctgataagaggcagctaaaaaaaaaaaacaaaaacctaaaactcatttggccattacatccggtgggtgcattgctcctgctaatcctggcccaactttgttgcattatttcaagccaagtttggaaacaaaacgttgtggaaatatccaagttttttgcagccagctagatgaatttagggggatgtgttgagaaggctgctggcacattgtatgcgaaatatattttgcatggagcccatttctgctctttcacaaccgaaagttgaaagaatatttagtgcctggctataaactgaacaatttgctgtcaaattatgcctttgaaaggcgcaagttgggcatgcgttggcaggaggtacaaagtgtcgtaaaaagcgcatgaaactgtggcaaacacttgaggcagcacacaggagctccccagaaagtatgcaacattttcgggcgtttttatggctgacaaaggaagctgctgagagagaagggggacaggggagtggtagaggacaggcggaaatgagatgaaaactggacaccatgttgcaagctagttattgaacaacagaggggctggtacggggcagggcacagatgcatccacagaggggcggagatgcacttaacatgtgtgaaaaatgcgttcaaggcgaaagcaaccagagaagctagctcgaccaggtattagtgtgtgtgctccttattcagcctttgcactgaaagaaatttaatgttttatgactatgaacctaacatcgaaacagcctgtttaatgaatttcagtaacaacacattttttttacttgtgcttttttctctgtgtactttcttgccgccttgttttaccgcaacaatgcgtttatgtgtacgttgagggtatttcggttctgttgtgtttcctcgggcttcgttcgcctggcaaattgccataaaaaaatgttttcaagcgccacaaaatatgcaacactcactctacacatgcacatgcacttgagaatgtgtgtgttgccattccatgtgtgtgtgtgtgtgtgccccataaactatgttaaaatgttgcgcattgcattttcttcgcgaatggaacttttcggttttgaattaaacaacgcacgtatttcacacctgccaagcagcagcgtcattcgctcaggtgaggcgatatgatggaaatgtggaaggctgaatcaaaagcatttgccttgggggctggcaaaacgcgtttatccatatgagtgactgacaatcgtgaatgccagagtgataaaatgagcgataatttggtgttgcgagaaatgcgggcaatgaatttaaaatgaaaaactttaatcttaactgaaaatgaacccaattatgcaattggctatttaatgatttaagattttaactgtttaacacttgcgtgccgtgtttaccaaacacttcaaactggaagttttcaagcgcgcgtcttcaggctattaactgccatctagcaaattgaaatccttgttaacacacacatacacacacatgttgaattcacctaactgcaacactgcttgtggggatttatttacagtttttgttgcctccgatggaatggagtgaagtgaagtgctatgaaattgaagcaacgaacacaagtccgtgcacccaacgcctgcatttttcctcctgttttcacccccatctggtttttccacttttcacccaacacacgcacaactttcactgattgtttagactgccaacgcatcgcctctaactatgcaacaaattgttgatgcagttggtagaaaggggtcggaatcccatccgagcttactcacttttttggcacttgacttgacagttcacccctgcactttcctgttcaccttatgcagctttacttgtgttttagttttccaactagggctgctggatcgagggcaaaacactggggagctgggcccatgaagtgggcggttggctgaggagtttgtatagagagtaaccgccgaaaccgaaagccgttaactcgaagagactgcgatgttttaagtgcttgtgtggcagcttcgctcgatttttgcttcattaaattcgcccctcttcgcacagacttaccatactcacttggtctatctattttccagccatttgaagccctctctttcctaagttttccacattgctgcgccgcgtctgtgcttatttacgcaaacataaatttacggcttgataccggaaaactttgctcatctttcatattcgcctattttttccgcattctcagctattcaaaaagtttgcttttagctcagtttaatttccgtttatttgaactgtgttattttcgaggcagattttcgtctagacgatagaagagataagaatgtaaaatactttcaatgaagggtattatttgcacttaaaagaaatatttactatatttattccaaatatttagaaagtacttttgtgctttattcccgtattaaatcctctcttcatattgtacttggtatgtggtaaaatgtatttttaagtttttgtacacctttatgattttgtttcagtgtaatgctcacctataccgtatgcaatgtgtctataaagccttaatttctgttatcggctctggacagagtgtgacttacccacttacataaacctaaacctttcttttgttgcatcagtatctgatttttactcttgttttaaagaacgaggaacaaatgacatcctgcaggattacgatagtgggggtagtctttgtttagccaaaatttaattagtgtctaataagtaacgtatctggataagccgtgcattgtattttacctataaattgtgatgtctcactccataagtactctcatattcccttaaaagcataaaatagacaaaattatggttccccaatgggttcataagggaaaagtaaacattttcactggctcgcatttcaccattagaagaaggccacccctgcagagaaaactgatatccatacctcaccaccgcggtacaaaaaagaagaaaatagaaaacaaaaacaattttcaacattttgccttggcgttgcattattggcaacagttccaccacggaagaaactaccccgaaatataaaaactgaaacaaagatgcgaagcacctcaacaaattttgattaatgcatttcaataataatagtaccccccagcctccgtccattcattttcatctcccagctgccaatttgcaatttgtttcgcatttgcactttgatggtttcattttatggtacccggggtgtgccaccgatgattttgcaatatgccacagactcggtggcgaataaaaggggagtgcaattgctgaaatttgttacgcagttacttgcgatttctggcagaaaaaagtttttcaatcatgacacgagattgaatcaagcattttcattttctacgactacaaaactctttaacgctgtgcagcatattttctttcgatctgcatccgcatccgcatccccatttcgcccatcattaattgttcctttgttggcaaagtttttggcttttccttcactaacaattacattctttgccatgcataagtttaaagtaatttaacttctgacgagctctaccctttcactgaaacaagctgaaaaaagaaaagaacgcgaacttggcgaactcttttctttgttcttttggctcttaagcgttttaaaattacgggccaacaaaaaaaaaaaaaaattggaaagttcggtgaagtgtgaattgattttcaagaaatagttttttaagcaaaaggagatataaagatagtgttatatttgcaaagtaggctaaaaactttccgctcagaaaatttgttaaaaaattaattaagttcttgtacttatgactaaaacaaattgctttgtactctcgttttggaccacttggcgggctctcaagagcaaaacttatcatccctcttggcccccgaaaaaccccttaaaaccccaatagccatcgtagaaacgcgcagaaagcacaaaattcccatgggctggcaattgaagttgagaaaacatcagagccaaaagcccactcagaccaaagtgccgagtgggggagtcgagtggatacctcagatctgaacatgcgttatgccatataaatatgggggacctatgacctgcattgacacgtgctggcatcccagccaacccactccgcattgtgtatttatgattattgttattgcgccggtgtgtgtgggcaatacatatacgtacgtatattcgccacccggaatttctgccccaccacccacttttttcccctattttgcgcacctgatgttgtttttcctgctgtcgaagtcaatttgtgtcacggccccatcgaaggcggctacggaaatagtttaagtcggaagcggggaaaatccaagaaaaaccaaaaaaaaaaaggaatgggaaatataataggcgagtacaagtgagtagaacattaaaataataataacttatcccacaatgcattcttagttcataagaactttcttataactccgtacaaagttcgacgcatctcaatgcaagtaagagataccatttttcttgtgggaattatatggtaaatttctcaactggcattcgagttatttattctgcactcctgtttttttttcatttgaacacttttggtgtgcctcgttcattgtcaggcatttctggcttcaaggcgcaataatagctcacatctacatcgattcctcctgtaaatttaccaccaaagagcccagaagtcatgtgaacgagcttttgaggtattttgagcatttctcgaatatgtttcccatattgcatagctccgttttgtggtgcagtcaggggtatagattgcgttccttttgagcgcctttaatgagagcaaactgcaggagaaagcgatgcgaaaccaattaccaggctacgaattcacgacaaaaaccccatggaatcggcatccaggaggaggagccgaaacctaatttcaatcaatttggcctaacaagcgacagattgccaacctaacgaatcaatttgatttaccaaagagacaaaagaactcgatgtcgccgtacggcaaacggcaacaaatttcgcatttcattacaaaactaaaaggctgcgcaaggatacgggcaccaaaggattaagggggcagcttcctaaatgctcggcattggagttcctccgattcgggactcgaaaataaagcagcagtggcaagtggcatcattacttaagcaaatgggaccatcatcagtcgatggccggcgaagttccgcccagacaacaagtgcaatcaattttcaacaaagggcgatgcgatgcgatgcaatgcaactacatccattttccccctttattttcccaaccaactacccttaatccattcgctcatctgcatacaactgccttgtgccacaaatgctgatgctgccacttgaaatgcaaaaatatttggaaattccccgattgcatttggggcgcactgcctcgactccattcgaacaacagaagcagatatcttgatggagctgtgaatggaatccgagtgcggttaatgagccactgctgagtctcaaaaatgaaatctctaaactgaaagaagccggtggtgcactataccctttcaatgggctttagtctggttccctaatccaagtgctggaattatgatttgtggttttttggttcgaacgactcgacaatttcacaatttacgtgcacagctcagcagcctgagcatacacattcattaagtggatttcaatcgctgaatctttcaaaaaaatgttgtaattggtgccttttctgtagaccaagtaataaagtaacagattgtaattataatatattctttttttaccatttttggtcagaagcacgacccaaaaagaggcgcaaaagaaacgtgtccctctttactctcctccgaaagccaataaatttcgtttgctgtgcgccgactgtttgccaaaggacatgcaggtttatccaagactgcgaatgaccaaaggcccccccccctcttttttttattaaacagccagctcacgtcgctcccccttccgccaatgcaaatggggaggcattttatttgtccttgcttcttcgccaaacaaggaatccgctttaaaactgaaactctttttcggatcagtgcagcggccttggaagtgattcgtcaaattccgcactgccatatataacgaaaaaacatttttgggataaaaaaaaaatcaccgaaaggatgtcgtttgtttacaggactgccagctgagctggccctcgtgttttgttcaacaacttttcaagcgaagtggcccctcggtggccatccatctggagagatgcgtcttttattggacatcggttgggaaatcgaatttaagggctgcgatgaacgatttaatccacctttcagcatttaacagctgcaatgaatagtaatgcctggttgttgtcaattcaatttgaatattatttttcacctgcgcaagcggtaaatagcaaagtgattcgatcccattggagactactgaatgggcatcaattaaaataaaacacacttttcaccactgggtgctgttctggcaatgtcattaatattccgcagccaggctatgccgcataatttaaaaccaaaatgatttttatattttcaattaatttcgaaacaataaatcgaggtacgaggcttacctatgaaaatgcatacaattaaatcgccgcattaatttgagaaaggtttcgtacgcaactgaatcgttaatcatggatatgattaatcaaataaattgcattttgtatgcaatgctaacacttaaagtgcacaatgcacataattcaacaataaatgttatattacctaattactataaattacacgaaacaaattatatacaaattataaatacacgaaatatatttgatatgaagggtattttacattgccattgacacttgagtacgattttgaaacccaaaactgtctcatcatttgcaatcgaatattctgccatttccattaagacatctgtagtttgaggctatgctcgaagattctacaaagggtaagtctcctggatcaacccccgtaagatacagatttgcgaaaagatatgtattgctcccccaattgccataaaaaccgagaaattgtgagggcaattcatgccaggaatttacaacagctgatctcctgatttattcaattttttccttttctaccctgacggccattttcggttttgtatcttacatttagctacccacaggggacagtttcggcaatccgaagggttggctggcccacctgattggaagtgcaaaaataagagaaaaaaccagtgagggaaaccatgtcatagtatatagtagtaacaatctctcccatggaaacaattatgtattttcggggaccaagagattgccgaactggggtagattttccttggccagcccttggggtattaccttgtggaaagctggcatatgcgaggcgtgggagtagattcgactttttgtttatccacccataagtatagcccgtagctactgcccatttcagtcttaatgcatggaagatcataatgaggtttgacctatggataaaatggtttcgcaaatacgccgagaggcaaaaaaaaaaaaaataaaacccataaacatggcttgtaaagtgcgtgaagcctgacccgcaattgtttgttgcaaattgtcgccattttctataaatattttaacaaaaggctggcctggcaaggaaaacttacagccgccacccggaaaaacatatacgtttttatggcatcgttgtgctgatgaggaaaacaaaagccagccaggtatccaatgtacatatgcaaatgggaacgttggtgcccaaatgattggcaaacaactcgacatggttgtgggatttcagacgatagtgttttgtgccgaaaaccaggtatacactcaagaacataaaagggctaaaaaacgattctatttgttataaccacttttctgggccaaatattgctgttaaaatctattgttgaattgttaaacagttcaaacttcaaacaaactttaacaagttcaatcacaaaaggtgccccactttgattacctgtatttttccaactccactttttttaatattacttattaaattttccttttaataacacatgctgaggacgtgcaaggagattcacgtaatggacaatgagtgcacatactatatgcatcgtgttgaaaaaaaaagcccacaacaaaatggttaagtcgccattttttctgggaatgatgtttaaccttttcggaagaggatcccctgcagggagctcttctgtccccaccaacaccccacacccatcaacacccaaccaccgacaacagcctactctcgctgcttttgacatctttcacagctcctgtgtgacagtttacagctctcgtagtttggagctcagcccatgagcttggggctccgtaccctgcacctgtcatcgcttttaacactgtgtaatattttccagcttgcaagcggtgaaatcgcacatccccagcttgcacacttccgacttccttggcccgcccacttaattgaaaatccaaactgcatttccttcttgacgcgatggggcgttggattggtgggctgggtggtttgttggcggtgagtgcttgtgtgcgagctaaattaattagtagctaatgaaacggggcacatatttatacagggctgcttcctgtctggctgtcactaggtgcaggtcctgtttcacttcctgctcgcgattctggcattccatcgatgaccccaggccttcactggcgacgccggaaaattaaccatttgaacacattgcggttattgtgctctttaagttcagtgaggaaaaaaccgtggtcgaatctttatataatattatttattgatttccaccttaccgtaaactttttctcagtgtatgtattaatttaaaaccacactcaactcacattgctgccaatggctaagccaatatccttggtcctcctaagctcgcttttttcctcgctcgaaacagccatttatcagggagttccccgaggtggcctgcactagcgagcgagttgattaattaaattgttgacatttttaaaagctgccatggagtgggcattattcacagcttaacatatccctctttgcctctaaacgatttgttgctggccatgtttgtcatggttttattgccttttctgtgtcatcgtctgctgtgttgttgcagacaatccactagaaaattagtttcttgcggttcagatcgcttaacttggccaatgtgatttactaaaataaatgtatttgtgtttacttctttattcaaatccattttatcattcgcaaactcacgaacgtatccagtatcctcatttgcttaatatgatttttatttatggctaatgaaagtaatatcctgcccagagaccatgattgaagcgtaggcagcttgacttccataagtcacttttaattgaaaccgcatcaaaacaattaaaactaagcaaattgccattctagccctcggagcactcaaaaaactgatcctatatataagtatatcctttttttgtgcaaaaaattagatacccagtagactgcgtgtttgtgagcgtgtgcgaggtattaacttaacttttccacccaactcaattaaaatgttagacaaaattgcatatgcacaagagcaggcagcaagtaaacaaatccaagtgtacatatgtgtgcgaatgtgtgtgtgctgcataaattaataaacttgatagtgggcgcgcgagctgggggcgtggcaccactcgtcggacataaaaactaaacgagctttgagcgctgggcgacacgtacgcagagagtagcagcaattaaaattttagtagtcgcccagccgtgccaaaagggggttaagggtgggaagtagttgggggttaagggtgggcactagttggggcttggggtttccgtctgctgctgtcggctcatatgtatgcctcgcctatcatcctgtgccattcaacagctccaatttttcaacaaacacagtggaaaacatggggaaattctggcaaacatccttcctgctgtttctatgtagtttaaagcttggcaatttcaaagtaaactggccaaatttatcgatatgacttttactcctattttattaagtacatcaattttatatctggcattaaatataaaaaggtttttaatacatgttttaagtcgtacaacttgttcagaccttatatcccaacgaaaatgaaatgtcgaacgtgtttgcaaggtggtgaaggatgagaaagtggcaaccggaaggagaatgccacttccgctgtttgccaaatcgacagcgacatcctgctgtgggcctaaataaattgtgttgcatacttttaagcgcttacccgaggtaccaaactttgtgctggttttggcatggcccttaatgatgcaagagtaagttttgggtggatgtaggttcctaggagttcgctttcaattagtaccaatacttcttcacacagctatgtcatatgtgcctgcccaaagctcagttaggcgacaagaatggcttcgggaatgtatcacattcacctcccaaattggtcgagttcctttggctggtcaaaacaatgtggccgaactttatggcccagtagttgccataactaattctgtcaacgcttctgcacaactaattgtaattgtaattgcaaaatagtttgactcacagtcagcttcgtgtgcagcctttgaattgcaatttgccaaagaatttagcacaatgaaattcaattaacaacgaagcacacacatacacacacagctcttaaaactgcggcaaaatccctgctactattttatctcacttacacaggagccgagagagagagaggtggcagatagcgtgggaaagggacgcaacagcttatgtcatgcgtcactaaatcagaacaattttgaacaaatttcaaaaataataaaagcccattttaattacactcatgctctggacagaaattgtgtgtgtgctctaaaattgtacactttccgaaaataaattgttttctctaaagataaatcagtgggaatttttcaataattaattaatgatttatattttatgtgtaattatatttattagaataaaggtttcaaatttattggccaaaaaaatttgtctataaattcgatactttctccgagtgctatttaaattacatgctgcataaataggcttccgttttatttaggttttgggcatttgacgttcatacacaaaatggggtttataataaatgtaattgaaattaccaaaccctgactaacggtcgatttcaccaaaaacgatgtccagcgatccaataatggccacaacatcggccagcaggtgtgcgggtgccattttggccatgagggctagatgagcataggaagctggacgaatcttgcagcgatagggacgcgatgaaccatcggagatgaggaatgctccgaattcacccttgggcgattcaacggcacagtacgtctgtcccggaggcacccggaatccttgcgagaagtgcttgaaatgatggatcagatcctccatgccctccttcatcttgcttcgttgcggagggcagatcttcagatcatccaccttgatctcacccggtggcatggcgtcgatgcattgcttgatgatattcaccgactcgcgcatttctcgcatgcgcaccaagtagcgatcgtagcagtctccattcgatcccacaaccacgtcaaaatccatctcgtcataggcatcgtatggctgttgcttacgcaaatcccactttacgccggtggccctcagaacgggtccagtgcatccatagtttaaggcatcgtgtgcggatatgactccaatgccaatattacgcatacgccagatgcgattatcggtcactacgtcctccacttcgtccaatcgttcgttgaattgattgataaactgatacaaatcgtggagaaaccctagaggtatatcactggccacgccccccggtcgaatgtaggcggcatggagacgagctcccgaagcgcgttccgaaaactcatacaacttctcacgttcctcgaacagccaaaagagtggagttatagctccacagtccagtaccgacgaaccaatggccatcgtgtgattcgtcagcctcattatctccgaaaacatggtgcgtatgtacttggcccggcgtggaacctccacattcagcaacttctccaccgccaagcagtaggccaactcattggccatgcaggacacatagtccagacgatcgaaatagggcagtgcttgagtgtacgtcttgtactcgatcagtttctcggttccgcgatgcagtagcccaatgtgcggatcggcattcagcaccgtttcattatccagctcgaggatcatgcggagtactccgtgtgccgccggatgcgcgggtccaaagtttatgagcttggtgcgaaatgtacgatcaacgggtggaatctgttttcccttaaaattgggacgctttttccactcgtcaccttcgggataccaaactatatactgttgtttattcatgaactcgggatctggataccagtagtgtgtgtcatagggctcgtatggcgggcctggaggatacagctcatcccagctggggtcacattccttaacttttggctcttcggggcaatcttaaaaaaagctccttacaataaatttaccagtgtttgagggatcttaccttctttgtttgatgaaaacacgcgacggttgaatagttttcccaaatccggtctcttgaaggtggactttaagccctccacggtcaaatacttttcactgaggcggttcttgtatgcctggaaacgtctaatttcgttgggtgtgaatagcttatccgccagcttgcgaatcccttgcgttccgccagacatgattaccggagtattaaaaaaaatattagttctatactaacttctttggaaaattaaaaatgtaaacaaatgtttctacccttagcttactaagatgttaagagcaacgactactatctccagtttatttttagatttatatgttattttgtaaactgcctattaatccattgaaccatcattccttgcagatcttcgatgatcactaccacttcgcacatcacaaggtctcgaagcggtcgctctcccccgccacgcatcaccagactcgcctggatgacgacgatcgcgtccactgggcgaagcagcagcgggccaagtcgcgatccaaacgggactttatccgcatgcgaccctcaaggacctcctcgcgagccatgtcgatggtggacgccatgtcctttaacgactccaagtggccgcagatgtggtatctggtaagttatcgaaaatgcaaagcattccattccatttaccattcttagaaagcaaaatgattatttcaatgttttgatgtttcaagaacacaaccataggtattgggatataatatttaaacaaatattttttatacctacaaattgttataacgtaaccttattctcagaatcgtggtggtggcctggacatgaatgtgatacccgcctggaagatgggcataaccggcaagggcgtggtggtgacaattctggatgatggcctggaatccgatcatccggacatacaggataactacgtaagtagtgacattcgtttatcataaaacccatactaaattagcatatgataacctaaacaggatcccaaagcctcgtacgatgtgaatagccacgacgacgatccgatgccgcattacgatatgacggactcgaaccgccatggaactcgctgtgccggcgaggtggcagccaccgccaacaattcgttctgcgcggtgggtattgcctacggcgccagtgtgggcggagtcaggatgctggacggagacgtcacggatgcggttgaggcacggtcgctgtcgctgaatccgcagcacattgacatatacagtgcctcctggggacccgatgacgatggcaagacggtggacggacccggcgaactggcatcgcgcgcctttatcgagggcacaactaagggtcgcggcggcaagggcagcatcttcatatgggcatcgggcaatggtgggcgggagcaggataactgcaactgcgacggctacacgaactccatctggacgctgtccatctccagtgccacggaggagggccatgtgccctggtactcggagaagtgcagctccacgctggccaccacctacagcagcggcgggcagggcgagaagcaggtggtcaccacggacctgcaccactcgtgcactgtctcccacacgggcacctcggcgtcggccccgctcgccgctggcatagccgccctggtgctgcagtccaaccagaatctcacctggcgcgatctgcagcacattgttgtgcgcaccgccaagccggcgaaccttaaggaccccagctggtcacgcaatggggtggggcggcgggtgagccactcctttggctacggattgatggacgccgccgagatggtgcgcgtggcccgcaactggaaggcggtgccggagcagcagcggtgcgagattaacgctccccatgtcgacaagtaggagaagcaaatagatttaccccttcgttgtggtactcacttaaattctctactttccagggtcattccacctcgtacccatatcaccctgcaactgacggttaatcactgtcgatcggtcaattacctggagcacgtccaggccaagattacgctaacgtcgcagagacgaggagacattcagctctttttgaggtctcccgcaaacaccagtgtcacgctcctaacgcctaggtaagtggggcagatggtaaccaccgaactcctgctaattccctccatcaacaggatacatgacaactctcgttccggattcaatcaatggcccttcatgtctgtgcacacctggggagagtcgccgcaaggaaactggcagctggagatccacaacgagggtcgctatatgggtaagtctaagaactttttccaagataccaaacattgtgccgtcagatcgatgctttaaacctgtaccgtttaacatgctgcgcttttgtggatctcacccactaaacaccccatgaacccacccatttacccaccggcttgtaggccatgctctgctcagggaatggtcgctgatcttttatggcaccactcagagcatcggtcccaacgatccgatctcggtgcccaagccaagtggttcggaggcaaccaccccgaatagcagcagcaccaccagcaatctgcatcaagcctattcaccccagtatccccgcattccacccaataactttggtagctcaccctctggcggttccaagttgcccctgggcaaagtgcctccacccaataaatccagctatgtgacaaacaatccgctgctgaattccgcaccacccaaacagggttaccaacagatttcggccacctacggtgtgattttgggcaaagccaatggaaagtctaacaataacagcaaggagaagaccaacaacaagggaaacaagagcaataatggtaacaagggaaaatcaggcggatcgagtggtaaccgcaaggagcaaaccactcagagcaccatcattcagacaagcaccagcaagaataagtactaccgcatctcgcagcaacagcagcaaaagaacaataagcaggacaggaatggagtgcagacacagagacccaaggccaactccggcgagaaatcctatgacgagaagagtcgcaaagtggtgggtgagatcacgacgaattccggcaacggatccatcaaagcagccaagcaggtgaaggagagtaccaccacctcgtcgaattcacggatacccaagctattcgagcgctacgagaagatccaggcaatttttcccgaactagaaccctatgaaaacagttctcccaaaggaaaacccaagcaggccaagcagggaaaacaattcgaggtggatctgtttaagcccaccaatgggggaaatagtcgccagggcaatacgaagaagtcaccatcggtgccgccgccctcgcaaacgatggctaccctctccattttgcccattttacccgccggcggtagtagcttcctgcccgatcagaagattctaaagaaacagcaactgctgatggccgcggccggagtgatggcccccgctcaggtggaggtggaaatggaggaggtacacgcgactccggattacgaggcacggaaagaccaacgaaaggaggtcaacggaccaaatggtagccaaccaatttttggaaccacatattttgctttttagtttcgtacaaaagcattatttgtagtattttcactgagccaccttatcatttattagtatcaatttgtacttgtttagtagatttcgtcatgatcgttttctgtgtcgaaagtatccatattttgctttctattttatgattttcgacccgtggccgtcaatgaaagtttgacagccactgagtggcactttcttgttactttcatcaatccaagtgcaactttaaaatgttttttttttcggtttgttggccattgagctgacgttgccatggctgctgtcagtggagcaatttttcatttttatcctttttgtcgaattgtgatgaaagttgcgattagctttcggcacttgatctgcgccatgtacatgtacatatagtacgtatttcgttcatatggtagatttattggcccttcacttgacttgtttgcccgcctgcaatctgcaatatatcatacattttataacattttgcgtttgtcgttcgctgttgattttgtatagatgtttcgattttatttggattattgagccctcggctagtcagcaataactaaaagcatttgatttctctactctgcgttgcagcacaaatcacacaatgggatatgatattctacggcaccgaaacgcccgcccaacccgatgacgtggccaatcccagccagtcgaaccagttcaatctgtacggcaacgatatggcccacaatgacgtcgagtacgattccaccggccagtggaggaatatgcagcaggtaagtttcgcatttattgtttacctgtgaaaatcccccacgtgcatgaatagctacatagattttgaatacagtgaatgcttgcgtactagaagatatattgtagaaaggcaagagattgccgataaatctaggcttgttttctattttaatatattgcttattaatacatttaactaaaagtatagaatgcatataggctttagtccagccttgcgaacctttactgtattcatacgccacgttgcccttcgtgttctgtttatttcttggtcttgcagtgccttgtagatgctttgtctgggagcgaggagataggtagtgagcacaacccgtatcagaatcgcggcataatgctgcgtgcttgcatgtggctagcttgattaaaccccttagtcagtcattcaggcgggacaattggacagtcgcagtggcttgcaaactgtgctgccgtgcagaactctgttcctttggcaggtagcctatttctctcgagtttgctcaagttgcagcttgtttattttgatttttttttacccccagcccagcatgccttttgttgttaatgtaccaagttccccagcacgcgccaatgcacagaagccaaagtatgcaaagtactcgcccaatagcgctcataaatttgcaaatacttaggcatacactgtcagcagctatctttgggcctgtttgctgcactcctgcctccagccacgttcacctccctaaccaagtcaccatccgccagcatcttaattccacttttggcagccgtttttaagcctcgtttttggcgatgggccaagaggcagtgcctctgtcagggacaccaggacatcggtgggcacagcgaaaaactatcaccagcaattattagaaaataaaatacctttaactacagctgaacaagttgtatttgactaagaacgcacgacattcatttcgatggtagtgcaaaatatgtatattctgtaggtatcattggtctgccatttttctccgtgtgcgaaatcagcatttttctaaactttgcctacgtttggccagcccatggcagcccgggctttattcaagtgcacttttgccccgggcaggcagcaatttttaaccttttggcacctattgtgctttaaaagcgttgctgctttccgctgccactggtcgggcagcaagggatgtgcggtaataaaggcgagtgcagtgaccttagttttttgctgttcaccgctcgggctggctggcaaaaaactttttgcataacaaacacttttccaggcagatgaaggggctccctcccccctttgaaagtccttcgtccctaccgttttcctgcgccgaactagcacgcgacgtcattgcatgtgaacttagatagacttggacagacctttttcggatggggcagctataaataaggccagacggagccacatacataagtgcttaaaatgccagacagagcggcaacatgcaatgaactacaacaactggaattggaatcggagggggccaaactttcagccacttctgactggccaaataaaaccaaaggcaccgactttcgactttaaactttaagcacaggaggaatggccataaatgtacttcaatcctcgacttgaacgtatttagtgctcttgtattcacttttgatggcattaattttgtgaaattcttactgcttttcaaactaatctgctgtttaataataaatcatattagatttatacttgctttaaattagatttcagccagatataaccacaactgtctgtgattagttggattactcttatccttgcaatgctatttgttatttatagcaataaccattctgaaagtaatcctaagataacctaaccgcttgtaccattaagccccgtctttcgattatctatgctatctgtaagaatgtaattgcctatcttaatccagcaatatccttttcctttccaggtgggcgaggtgggcatgacccgagatcacagcaacaccgccgcgtgccttaagtggagcgatcgcaagtgcttaggtttgtccttactcttttttatgatcatgcaagtcttctttctaaactttaaacatgccaacgacaacaacaacaagaacaaaaacaacattatcaaatgcattagataatttagtaacaaatgacggtaaaaaaaaagaaaagaaaatcggcaacagcaaagaaacaaaattgaactgtgtaaagaacgaaaaaccgaaatgagatgaaaagcgaacaaagaatttccatttaaaaaatttgatggcaacattgcgagaaaaaatacaagtaaaaataaacaaaaatacaagtaacttagattaggcgagctgatgagaaggaatcactacaagtccaaaaaaatatacatactaaaaattttgtagttaaatttaaatgtaagcctagttgtacacaacgacacaagcaacacacacacacactcacacaaacaaacacacgcacacgtattagggggcgtggcagggcaaaaaaacaaaggttgttctccattggatatcctttactttttgtttgtcgagaaatgggacgcacaaagcaaacttttgtattattttagtcgaaatgcaatttaacgcagctatatacaaacgcatcctaaatatattatacacattatatttaagagtttagttgaaatttatttgtacgattcgtttttattgttttcgtttagtctgtttgtgtttgttttaagcctgtttagtttgatttgtttttcccatgttttttccaaatgcctgcttcccgtgtacacaggaaaaaaagtaagatcacttttgatcaatcaaacttcttaatgtcaaatcaaattgttcatgtcattctaatccttttacttatacaaatttacattgttttgttataattattaatagcaggttttaatcttaatctatcgaattgatcttgaaaatttgcatacattttcctgtgtaacattctgtatgtatatgtgtgtacatgtaaactaaatgcattatttcagatattgccaagccagccaagtagtcgcgccacagtttgaaaggcactgtacgcaagcttaagctttttaattgtattttttgcctataatttgagttcccttcttgacttttgatttgattttgtataagaaatattgtttaatgccatgcagccaaacgaaaggaatgttcaacagacacaaaaaccactgcagtttagagttcatagtaaaagactgtttcttaaaattaaaaccaaatcttggacagcggtaaatgattaaaatgggtcgatggagtgaaaggatgcgaaaaatgaaaaccaaatctaagtaattaatggaaatatttctagagttaaggcgctaagcaaagcaaaccacttttgtatcaaaaataaacgaaaacaaaacgagaaatggtcatgaacataaacgtgaaccaagtaaaaaatatcctaaggtgtaggggtgaagcatagcgtaataattgaaaagtaggcagcaaccactaaacaattaaatcgtatttataataaacaatttataaaaagttcctgcagttttcaacaaagtttcaacataaatctaaagcgcgaaacacacataattattacaaattaacactgaattgccggtttatttttgtccacaatgcaaagaaacacatacaaaacatatctttgttacaaatttgttgcttacttaaatcattattattaaacacaaatcaaaagcaaattgagtgcaataattattattaaatctttaaatctgtattaagcagcagttagaacttaaaagggttttcgtttcttatcaaaccgacaaacaaaaacatatcatttaatatttgtttaatttcggaactaagtacaaactattagtttacttaacaaattctatacaaaattacttatctcctttgtgatttatatttctattttattggtttttgacttagagaaatgttcccgacatctatgcattttcgttgtatgaataatcatatcgtaactgcacaataaacaatacaaatataaatgttaatttaataaacaagttaatagcgatgtaacgaacaagaggtggagtatctttttgttgttgttgtaattagcaaacgcacacacacacacacatatttagccagagcataagatttaaacaaactaaagctagcatttctctatctgcattgacaagcaatcgaaaatagttgaattaacccacaaattcctcagtatacacgtataatatgctatccgcactagcagcgaaccgaaaagccgaaaatattaaccaagccaatatacacaacacaaaaacttacaagtatttgccgaaaacttcgtcaagtgccccacataaattatgttgaacaaatttccaagtgagtttggttaggaacacaacaaaattctgctcagtttccaagtattctgttgttcttaaacgcacacgcagttttggtacttatttaacttcgagagccagaatacacaggaaactaaactctgaagcatatttactctaacaactaattagagagaaagccaaattaatatataagcttatactgaacaacaaaaatttgaaaagataaaaaagcgaacaaaaacaaaagaaaaacgaaaaaaaagtaaacaaaaactggtactagggcatggggtagaaactagaattaaaacgtattaactttaaagccacgaaattgtaaaataccattggaacaaaaaccgtatattaatgcttgcaattagtgagaggaaacgaaataaaattaaacttttttaaatgtaaagaaagcgaaactgaaattaaacacttaaatttagtgacacaaattgagaatgacgcaattcgaaactcaatacaattttttatgtatgtttgtgtatatatctatctatataatatctatatgagtaataaataaatgcattgacaacgtaaaaaccaaaactccttgaagccaatttatttacaacaaaaaactcaaagccgcaagcgaaacatgctcaaaaaattaaatatacatatatgatgaaaggagcgctcacaaattaccattgaggttttgagattgcagacaaggtgagtgtggcttcaacctaagtattgttttgttctactttttggtttaaacagaaagtttaattacttcccactgctgtgtgacattaaccactttctaattcgtttaattcgttacgttgcctttttaacacaatagaaatccacattttcatgtccataatttggtgttttatctggtggaggtgaagcaaatatgcctacactgccatcttcaatcgcacactggcttctatgatttttcctattatttttttgagcatgtttttcctgctgagcttgctttaaacatttttggttgcaaacggttgtgtttcagttacgagcttgttttaaaaatataaaaaatatatataatacaacactatttaatgtgaatttgacataaaccgatataactcatattaaaacactacagtattagtagtaatagtttgcattagtggattcaaaaatagccaataattataaaacagaatacccatttaatcgcttgtgtgttttcattgcgttttattccaatctcaacacgcacaaacattgctcaattttatttcgttttgagtttcactaagcttttgtaacaactttctaaccaactattttccaaacattccttttcgcaaaatctgtcgctgaggtaaatcacttccttgccactttggatcaaaagtaaatatttaacatcaaccttctctaaatttcaacagagtgcaatgactccgcctatatgttcgaggaccagtgctacgatgtctgcccggtgcacacatatccattggacaagttccaagcagaggaggatgagcaggatgacgaggtgacaaggggtccggttaatccctacagcag

SEQ ID NO: 22394 - DNA, 6690 bp, DROSOPHILA
cagcatctcagcctcacaaccaatatcccgagcaacgtgcacaaaaactattggaaatatcctaacccacaatgaaaaacgacgtcgtgcgatggagcaggcagccaactagcaacaccactaacagcagcagcagcagtagaagcgatagcaacagcactcataagcacagaagcaaaagcaacaaattaaatgctcgacaattagggtcaaatgctgccagaagttgtcagcaaagatcctctgtggcaacaacactagaagatgaacaacaaacaatcattgaatgtgatataggaaatttcaatttcgattgcaatttattcaaaactagttttttaacgcaacacaaacagaaacgtagtggcaagagcagcagcaaaagtaagagcaacagaagtagacccctagcgaaaacgaaagcggtgtttctattagctctgcaatttagtgccgtagtttttttatgtaatattaatgtcggtttcgtggccggaagtgtggcaactgcggcatcatcggcaggcggctcatcgccggcagctccatcatctgcgccctcatccccgcccacagttgctgtaccaccgccgccgccaccttcgtcggcactcaaagtggatccaaatggtcagtcaccagtgctgccgccctacgttctcgattatgagacggggggcaaggccaagctaacgccaaacaatggcaagttcggccaatcgggcagttccgggagcaataacaaccacatcgtcggacactatacccacacctgggcggtgcacataccaaacggcgataatggcatggccgatgcggttgccaaggatcacggattcgtcaatttgggcaagatcttcgatgatcactaccacttcgcacatcacaaggtctcgaagcggtcgctctcccccgccacgcatcaccagactcgcctggatgacgacgatcgcgtccactgggcgaagcagcagcgggccaagtcgcgatccaaacgggactttatccgcatgcgaccctcaaggacctcctcgcgagccatgtcgatggtggacgccatgtcctttaacgactccaagtggccgcagatgtggtatctgaatcgtggtggtggcctggacatgaatgtgatacccgcctggaagatgggcataaccggcaagggcgtggtggtgacaattctggatgatggcctggaatccgatcatccggacatacaggataactacgatcccaaagcctcgtacgatgtgaatagccacgacgacgatccgatgccgcattacgatatgacggactcgaaccgccatggaactcgctgtgccggcgaggtggcagccaccgccaacaattcgttctgcgcggtgggtattgcctacggcgccagtgtgggcggagtcaggatgctggacggagacgtcacggatgcggttgaggcacggtcgctgtcgctgaatccgcagcacattgacatatacagtgcctcctggggacccgatgacgatggcaagacggtggacggacccggcgaactggcatcgcgcgcctttatcgagggcacaactaagggtcgcggcggcaagggcagcatcttcatatgggcatcgggcaatggtgggcgggagcaggataactgcaactgcgacggctacacgaactccatctggacgctgtccatctccagtgccacggaggagggccatgtgccctggtactcggagaagtgcagctccacgctggccaccacctacagcagcggcgggcagggcgagaagcaggtggtcaccacggacctgcaccactcgtgcactgtctcccacacgggcacctcggcgtcggccccgctcgccgctggcatagccgccctggtgctgcagtccaaccagaatctcacctggcgcgatctgcagcacattgttgtgcgcaccgccaagccggcgaaccttaaggaccccagctggtcacgcaatggggtggggcggcgggtgagccactcctttggctacggattgatggacgccgccgagatggtgcgcgtggcccgcaactggaaggcggtgccggagcagcagcggtgcgagattaacgctccccatgtcgacaaggtcattccacctcgtacccatatcaccctgcaactgacggttaatcactgtcgatcggtcaattacctggagcacgtccaggccaagattacgctaacgtcgcagagacgaggagacattcagctctttttgaggtctcccgcaaacaccagtgtcacgctcctaacgcctaggatacatgacaactctcgttccggattcaatcaatggcccttcatgtctgtgcacacctggggagagtcgccgcaaggaaactggcagctggagatccacaacgagggtcgctatatgggccatgctctgctcagggaatggtcgctgatcttttatggcaccactcagagcatcggtcccaacgatccgatctcggtgcccaagccaagtggttcggaggcaaccaccccgaatagcagcagcaccaccagcaatctgcatcaagcctattcaccccagtatccccgcattccacccaataactttggtagctcaccctctggcggttccaagttgcccctgggcaaagtgcctccacccaataaatccagctatgtgacaaacaatccgctgctgaattccgcaccacccaaacagggttaccaacagatttcggccacctacggtgtgattttgggcaaagccaatggaaagtctaacaataacagcaaggagaagaccaacaacaagggaaacaagagcaataatggtaacaagggaaaatcaggcggatcgagtggtaaccgcaaggagcaaaccactcagagcaccatcattcagacaagcaccagcaagaataagtactaccgcatctcgcagcaacagcagcaaaagaacaataagcaggacaggaatggagtgcagacacagagacccaaggccaactccggcgagaaatcctatgacgagaagagtcgcaaagtggtgggtgagatcacgacgaattccggcaacggatccatcaaagcagccaagcaggtgaaggagagtaccaccacctcgtcgaattcacggatacccaagctattcgagcgctacgagaagatccaggcaatttttcccgaactagaaccctatgaaaacagttctcccaaaggaaaacccaagcaggccaagcagggaaaacaattcgaggtggatctgtttaagcccaccaatgggggaaatagtcgccagggcaatacgaagaagtcaccatcggtgccgccgccctcgcaaacgatggctaccctctccattttgcccattttacccgccggcggtagtagcttcctgcccgatcagaagattctaaagaaacagcaactgctgatggccgcggccggagtgatggcccccgctcaggtggaggtggaaatggaggaggtacacgcgactccggattacgaggcacggaaagaccaacgaaaggaggtcaacggaccaaatgcacaaatcacacaatgggatatgatattctacggcaccgaaacgcccgcccaacccgatgacgtggccaatcccagccagtcgaaccagttcaatctgtacggcaacgatatggcccacaatgacgtcgagtacgattccaccggccagtggaggaatatgcagcaggtgggcgaggtgggcatgacccgagatcacagcaacaccgccgcgtgccttaagtggagcgatcgcaagtgcttaggtttgtccttactcttttttatgatcatgcaagtcttctttctaaactttaaacatgccaacgacaacaacaacaagaacaaaaacaacattatcaaatgcattagataatttagtaacaaatgacggtaaaaaaaaagaaaagaaaatcggcaacagcaaagaaacaaaattgaactgtgtaaagaacgaaaaaccgaaatgagatgaaaagcgaacaaagaatttccatttaaaaaatttgatggcaacattgcgagaaaaaatacaagtaaaaataaacaaaaatacaagtaacttagattaggcgagctgatgagaaggaatcactacaagtccaaaaaaatatacatactaaaaattttgtagttaaatttaaatgtaagcctagttgtacacaacgacacaagcaacacacacacacactcacacaaacaaacacacgcacacgtattagggggcgtggcagggcaaaaaaacaaaggttgttctccattggatatcctttactttttgtttgtcgagaaatgggacgcacaaagcaaacttttgtattattttagtcgaaatgcaatttaacgcagctatatacaaacgcatcctaaatatattatacacattatatttaagagtttagttgaaatttatttgtacgattcgtttttattgttttcgtttagtctgtttgtgtttgttttaagcctgtttagtttgatttgtttttcccatgttttttccaaatgcctgcttcccgtgtacacaggaaaaaaagtaagatcacttttgatcaatcaaacttcttaatgtcaaatcaaattgttcatgtcattctaatccttttacttatacaaatttacattgttttgttataattattaatagcaggttttaatcttaatctatcgaattgatcttgaaaatttgcatacattttcctgtgtaacattctgtatgtatatgtgtgtacatgtaaactaaatgcattatttcagatattgccaagccagccaagtagtcgcgccacagtttgaaaggcactgtacgcaagcttaagctttttaattgtattttttgcctataatttgagttcccttcttgacttttgatttgattttgtataagaaatattgtttaatgccatgcagccaaacgaaaggaatgttcaacagacacaaaaaccactgcagtttagagttcatagtaaaagactgtttcttaaaattaaaaccaaatcttggacagcggtaaatgattaaaatgggtcgatggagtgaaaggatgcgaaaaatgaaaaccaaatctaagtaattaatggaaatatttctagagttaaggcgctaagcaaagcaaaccacttttgtatcaaaaataaacgaaaacaaaacgagaaatggtcatgaacataaacgtgaaccaagtaaaaaatatcctaaggtgtaggggtgaagcatagcgtaataattgaaaagtaggcagcaaccactaaacaattaaatcgtatttataataaacaatttataaaaagttcctgcagttttcaacaaagtttcaacataaatctaaagcgcgaaacacacataattattacaaattaacactgaattgccggtttatttttgtccacaatgcaaagaaacacatacaaaacatatctttgttacaaatttgttgcttacttaaatcattattattaaacacaaatcaaaagcaaattgagtgcaataattattattaaatctttaaatctgtattaagcagcagttagaacttaaaagggttttcgtttcttatcaaaccgacaaacaaaaacatatcatttaatatttgtttaatttcggaactaagtacaaactattagtttacttaacaaattctatacaaaattacttatctcctttgtgatttatatttctattttattggtttttgacttagagaaatgttcccgacatctatgcattttcgttgtatgaataatcatatcgtaactgcacaataaacaatacaaatataaatgttaatttaataaacaagttaatagcgatgtaacgaacaagaggtggagtatctttttgttgttgttgtaattagcaaacgcacacacacacacacatatttagccagagcataagatttaaacaaactaaagctagcatttctctatctgcattgacaagcaatcgaaaatagttgaattaacccacaaattcctcagtatacacgtataatatgctatccgcactagcagcgaaccgaaaagccgaaaatattaaccaagccaatatacacaacacaaaaacttacaagtatttgccgaaaacttcgtcaagtgccccacataaattatgttgaacaaatttccaagtgagtttggttaggaacacaacaaaattctgctcagtttccaagtattctgttgttcttaaacgcacacgcagttttggtacttatttaacttcgagagccagaatacacaggaaactaaactctgaagcatatttactctaacaactaattagagagaaagccaaattaatatataagcttatactgaacaacaaaaatttgaaaagataaaaaagcgaacaaaaacaaaagaaaaacgaaaaaaaagtaaacaaaaactggtactagggcatggggtagaaactagaattaaaacgtattaactttaaagccacgaaattgtaaaataccattggaacaaaaaccgtatattaatgcttgcaattagtgagaggaaacgaaataaaattaaacttttttaaatgtaaagaaagcgaaactgaaattaaacacttaaatttagtgacacaaattgagaatgacgcaattcgaaactcaatacaattttttatgtatgtttgtgtatatatctatctatataatatctatatgagtaataaataaatgcattgac

SEQ ID NO: 22395 - protein, 1269 aa, DROSOPHILA
MKNDVVRWSRQPTSNTTNSSSSSRSDSNSTHKHRSKSNKLNARQLGSNAARSCQQRSSVATTLEDEQQTIIECDIGNFNFDCNLFKTSFLTQHKQKRSGKSSSKSKSNRSRPLAKTKAVFLLALQFSAVVFLCNINVGFVAGSVATAASSAGGSSPAAPSSAPSSPPTVAVPPPPPPSSALKVDPNGQSPVLPPYVLDYETGGKAKLTPNNGKFGQSGSSGSNNNHIVGHYTHTWAVHIPNGDNGMADAVAKDHGFVNLGKIFDDHYHFAHHKVSKRSLSPATHHQTRLDDDDRVHWAKQQRAKSRSKRDFIRMRPSRTSSRAMSMVDAMSFNDSKWPQMWYLNRGGGLDMNVIPAWKMGITGKGVVVTILDDGLESDHPDIQDNYDPKASYDVNSHDDDPMPHYDMTDSNRHGTRCAGEVAATANNSFCAVGIAYGASVGGVRMLDGDVTDAVEARSLSLNPQHIDIYSASWGPDDDGKTVDGPGELASRAFIEGTTKGRGGKGSIFIWASGNGGREQDNCNCDGYTNSIWTLSISSATEEGHVPWYSEKCSSTLATTYSSGGQGEKQVVTTDLHHSCTVSHTGTSASAPLAAGIAALVLQSNQNLTWRDLQHIVVRTAKPANLKDPSWSRNGVGRRVSHSFGYGLMDAAEMVRVARNWKAVPEQQRCEINAPHVDKVIPPRTHITLQLTVNHCRSVNYLEHVQAKITLTSQRRGDIQLFLRSPANTSVTLLTPRIHDNSRSGFNQWPFMSVHTWGESPQGNWQLEIHNEGRYMGHALLREWSLIFYGTTQSIGPNDPISVPKPSGSEATTPNSSSTTSNLHQAYSPQYPRIPPNNFGSSPSGGSKLPLGKVPPPNKSSYVTNNPLLNSAPPKQGYQQISATYGVILGKANGKSNNNSKEKTNNKGNKSNNGNKGKSGGSSGNRKEQTTQSTIIQTSTSKNKYYRISQQQQQKNNKQDRNGVQTQRPKANSGEKSYDEKSRKVVGEITTNSGNGSIKAAKQVKESTTTSSNSRIPKLFERYEKIQAIFPELEPYENSSPKGKPKQAKQGKQFEVDLFKPTNGGNSRQGNTKKSPSVPPPSQTMATLSILPILPAGGSSFLPDQKILKKQQLLMAAAGVMAPAQVEVEMEEVHATPDYEARKDQRKEVNGPNAQITQWDMIFYGTETPAQPDDVANPSQSNQFNLYGNDMAHNDVEYDSTGQWRNMQQVGEVGMTRDHSNTAACLKWSDRKCLGLSLLFFMIMQVFFLNFKHANDNNNKNKNNIIKCIR

SEQ ID NO: 22396 - DNA, 1488 bp, DROSOPHILA
tgtgtatgggaatatagaccggatggccagcgagtggtaatcggtggttatacaagagagagatagaaagagagagctcagccgctatctatcccactgcgcgtgccacttgaccaacttgcaatgtgaaatggcggaaaagctagggaaattccacccacatcgccacccaacgtcggacacacagcacatgcacatgtcaacctgtactaactacactacataccattgcgcaatcgccacatttggatcaaagtaaatgcgatcgtagatcaaaattggggttaatatgcagcgcagacaatagagtatatataactaacaattcagttcgctttttacaacatggccaacaaatgtaagtcttacattaaaaaccattcgtttaaaatattcctttactttattgaaatatacaaaggaattttgctaaatacctaaatcagctacaaatttttttaaactattttatttcctatctgttaagattgattgaaccaatttcagttttaaaggccctttgaaaatccgctggtttttgttaccattttctgggcatgggaaaaaacaatgtgtggtagacccaacaaattaaaattttttaacttcatcattttgtttggctcggttttgcttttcagtccgagggctcattgttttgttttcgctttcggctgctgaatgcaaatcaaacgtgacacaatgttaggaaattgaaaacgtttttcatttcaatccaattaacgtttttgggttaatgcaaccaccgtggtttctgctttgtttttttctccccctggccgctgagaatgaaaaacacaacagctatttgcaacggaagttggagcataataaccagtttttaaaaaagaaaaaaaaatggtttttgacttgaaaccacaaaagtgcagcacatgaaaaaaaaaaaaaagaaaagggggatgcgcttttccagcttagcaggaaaaacgtggaaaatagtgagcagtgtggtccgtaccgttttccgtttgacgctgactccgccgtaacgcggcaaacggacgcggctgtcggagacgacgaccattttgggcaccgaaaacggattgcgcagtagcttttgaattattacgccttttcaatgcaaatctccgtctgggaaatatatatatattcttgagcagccacaagctacgcgggaaaaccaaccgaccaacgcgacacgatggttaaaagcggaaaagcgacgattcgattctgttgtcctttttgtacagcttgatccatgtggagtcgcccttggagtcggtgtactggagtccaaagaaccaaacctctcgcaggccgatcgtcttcaccacctggtcaaacaattgcttgcccgtcgtcgtcgactgaatggcgaactccagttccgcgtccattgtcgtgacgcgcacatttagctgaaattagtaagggatgtcgggatattaaaaaaatatcgattaaatgattaaaataacg

SEQ ID NO: 22397 - DNA, 2196 bp, DROSOPHILA
gacaacagaatcgaatcgtcgcttttccgcttttaaccatcgtgtcgcgttggtcggttggttttcccgcgtagcttgtggctgctcaagaatatatatatatttcccagacggagatttgcattgaaaaggcgtaataattcaaaagctactgcgcaatccgttttcggtgcccaaaatggtcgtcgtctccgacagccgcgtccgtttgccgcgttacggcggagtcagcgtcaaacggaaaacgctaaatgtgcgcgtcacgacaatggacgcggaactggagttcgccattcagtcgacgacgacgggcaagcaattgtttgaccaggtggtgaagacgatcggcctgcgagaggtttggttctttggactccagtacaccgactccaagggcgactccacatggatcaagctgtacaaaaagcccgaatcgccggccataaagacaataaaatatttaaagcgtgtaaagaagtatgtggacaaaaagacagccgacagcaatggagtaaatcatttagagacgagcgaagaggatgacgacgccgatgatatgactggatcaatgccgttttcgacatgggtgatgaaccaggacgtgaagaaggagaatcccttgcagtttaggttccgtgccaaattctatcccgaggatgtggccgaggagctgatccaggacattacactgcgtctgttctacctgcaggtgaagaatgccatactgaccgacgagatctattgtccgccagagacatccgtgctgctcgcctcgtacgccgtccaggcgcgtcatggtgaccacaataagaccacccacacagccggctttctggccaacgatcgcctgctgccgcagcgcgtcatcgaccagcacaagatgtccaaggacgagtgggagcagtcgattatgacctggtggcaggagcatcgcagcatgctgcgcgaggatgccatgatggagtatctgaagatcgcccaagacctggagatgtacggcgttaactactttgagatccgcaacaagaagggcacggatctttggctgggcgtagacgcactgggtctgaacatttacgagcaggacgataggttgacgccgaaaattggtttcccatggtccgagattcgcaacatttcgttctcggagaagaagttcatcatcaagccgatcgacaagaaggctccggactttatgttctttgcgccacgtgtccgcatcaacaagcgcattctggccctctgcatgggcaaccacgagctgtacatgcgtcgccgcaagccggacaccatcgatgtgcagcagatgaaggcgcaggcgcgcgaggagaagaatgccaaacagcaggaacgtgagaagctgcagctggcgctggccgcacgcgaacgcgctgaaaagaagcagcaggagtacgaggatcggctaaagcagatgcaggaggacatggagcgttcgcagcgcgatctgcttgaggcgcaggacatgatccgccggctggaggagcagctgaagcagctgcaggccgccaaggatgagctggagctgcgccagaaggagctgcaggcgatgctgcagcgcctcgaggaggccaagaatatggaggccgtcgagaagctcaagctcgaggaggagatcatggccaagcagatggaggtgcagcgcattcaggacgaggtcaacgccaaggatgaggagacaaagcgtctgcaggacgaagtggaagacgcccgacgcaagcaggtcattgcggctgaagccgctgccgctctgctggccgcgtcgacaacgccgcagcatcaccacgtggccgaggatgagaacgagaacgaggaggagctgacgaacggcgatgccggtggcgatgtgtcgcgcgacctggacaccgacgagcatatcaaggaccccatcgaggacagacgcacgctggccgagcgcaacgaacgcttgcacgatcagctcaaggctctgaaacaagatttggcgcagtctcgcgacgagacgaaagagacggcaaacgataagattcatcgcgagaacgttcgccagggacgtgacaagtacaagacgctccgcgagattcgtaagggcaacacaaagcgtcgcgtcgatcagtttgagaacatgtaaaagctatcaaagatcagagatcgatagtgcgcgggaaagagagagggagcggtgagactccagaaaga

SEQ ID NO: 22398 - protein, 649 aa, DROSOPHILA
MVVVSDSRVRLPRYGGVSVKRKTLNVRVTTMDAELEFAIQSTTTGKQLFDQVVKTIGLREVWFFGLQYTDSKGDSTWIKLYKKPESPAIKTIKYLKRVKKYVDKKTADSNGVNHLETSEEDDDADDMTGSMPFSTWVMNQDVKKENPLQFRFRAKFYPEDVAEELIQDITLRLFYLQVKNAILTDEIYCPPETSVLLASYAVQARHGDHNKTTHTAGFLANDRLLPQRVIDQHKMSKDEWEQSIMTWWQEHRSMLREDAMMEYLKIAQDLEMYGVNYFEIRNKKGTDLWLGVDALGLNIYEQDDRLTPKIGFPWSEIRNISFSEKKFIIKPIDKKAPDFMFFAPRVRINKRILALCMGNHELYMRRRKPDTIDVQQMKAQAREEKNAKQQEREKLQLALAARERAEKKQQEYEDRLKQMQEDMERSQRDLLEAQDMIRRLEEQLKQLQAAKDELELRQKELQAMLQRLEEAKNMEAVEKLKLEEEIMAKQMEVQRIQDEVNAKDEETKRLQDEVEDARRKQVIAAEAAAALLAASTTPQHHHVAEDENENEEELTNGDAGGDVSRDLDTDEHIKDPIEDRRTLAERNERLHDQLKALKQDLAQSRDETKETANDKIHRENVRQGRDKYKTLREIRKGNTKRRVDQFENM

SEQ ID NO: 22399 - DNA, 2998 bp, DROSOPHILA
agaccaataacaaatttgccaaaggcagtcctttctggcctctacctctgagagaaaatttcttttggtttattgagcaggcggagagcttcggctgctgctcctttccacccaatgggcgtggccaaattggatttgccacgttacatgacgtcgacactcacaaagtacacaaacagcagcggggggaatgtggcccagggataagatcgaaaaggacaaccaggaaccaggatatgcaaatctcaaggttgagcctgcagtgcgggctcaattttggggcatcgtaaaattgcaatttatgaaatatcgtaaagtcgtcggcatcgtcgattcccagaccaattaacagtccacacaaagcgacggccataattgctgccttccggcctttgaaaactcatttcctgtcgcacagacgagatcctcgatggactaggggccagggtcacctcatccaacgagtgcgagcatcggatgctccttaagcactccaatttgtcctttgtcaatatgttcctccctttgtgtgccttgtgtgattttctagtattaattaaccctaattaagttcacatcgccctggaaaactgcagaaataggaaacccgtggccgtcgggcctgaaaacatttcgagtgaaatgattaaacaactgtcgcagcagcatgtcacaagttatttttactcgtagcccaggactgcaggctatgtcctgagacatttaacgacgatccactttgcctgcacgaatatgttgtaaaatgtttaattaaagtatgcaaagttgtgggaaggacacatttttgaagtctatgcccgaactcccattactctttgaataagctagcaatatttttaaaccataatattatttattcacttcggaatttgatgcagggaggttctgaaaatatttgtaagatgtaataagactacacagaaataagtaaagacaacaagaagccaagaacactggaaccccgctaataataatcaagatgtcagtaagttttgatattactgtaagaaacgtcctttagaataattattttcccctgtagttgactcagcttggcatgtaatgtaatttcttttgtaagtttgctcgtgtcacataggttgaaactgattttaattaatttttggaagaggccaaaaactttacacagcactaactggcataagttggggatgaccaacttttacctgggcccgctgtctaatctgtgtcttcattaacatgaccccgggagcagatggttccacttcccttacgttctcgtatccccactcctagggggcctgagaacttggctctgccgttgacttttcgtgtgtatgattgccttagctggtaatagcaggtgggctccaacggctctccaacgagctcgacgaacttgtggtggcatttgcgcctagctcctgcctccgaaaacgaatccgtattcgctgccgtggatcacttgcactttgaccctccgcaaggagagcagcaggggctgcagcacggaccgcagcacggactgcagcaaggggtgcaacagggagtgcagcagggggtgcagcagggtgtgcaacacggcacgcagcagggtgtgcaacacttgcagcacggcgtgcagcaaggggtgcaacagggggtgcagcaaggactgcagcaggggctgcagcagggtccgcagcaggggctgcaacagggtccgcaacacggactgcagcaggacccgcagcagtcattgcagcacggtggacaacaagggctgcagcagggggagcagcaaggtccgcagcaggatccacagcaggggctgcacatcttcgattcgtgctgttagttagagtacggatgaagtgagagatagccaagtgcgcgacaggtgtccactcaccttgaacccgtcagagatctcgagcccggggcttgaatttgatttgtgtgtgtccgtgtgactatttacctacaaaatgtgtttttgctgacatttccgtttgagttttaaggcaaaaggtcaaataacttcaaaaaactgtgcttaattaaaggaaataaatttaaattcgcatactctttaaaacttttctgtaaaactctttgtgcctacccgaaactgtttggtcgtcacaaatattactttgtaagtaactttaagttgttgtcatttcagtggtatacttacacatttgaataaaaacatattcgaatcgactttccagtaagcaaatatttgcataaagccgatttaattattttttcccatggatgtggtccacgaaaagacgtcgagttttaaataaagtttttaaagtctttaagtttttctaaaaaaatttgtttaaattacgaggcataacgcacagcttaattttaatcataaatatgtaaatcagtgtaaaaagtctacatatgtgcaatgaaattattgtaagacttcctttggacaactaaatgtcattgagcatttatctcttttaactcgtttatcttttccagtcatattacgtatacgccacgtataaaatatgaattctgtgaagagattaataaatctgtgcagacacttgctcgacatagagtcgattcaactcgccgacttcattgttttcgtttttattgtcagtttccctgattggaatccgtcttttcctcacgccacacacgttaatcaacagcttcgtgcggaaatgcaaactaagcgaatttctggcagctgttttatttggtgaaagttgagctaaacatttgggcggctaccgggaggcggtagccttgagctggttgctttgacaaatcaccacccccgaaatccatcgccacatccacatccacacccacatccgcatccgcattcgaggagcctctctagctgtcgatgctgacaattgaacggctttgatcttttcagcgcgtttctctccaatttttgcgtgtcgattgcgctgattgtgagtgagtgagtatgtgtgagtgagtgtgggttgccagcaggcatgtc

SEQ ID NO: 22400 - DNA, 600 bp, DROSOPHILA
atgtcagtaagttttgatattactgtgggctccaacggctctccaacgagctcgacgaacttgtggtggcatttgcgcctagctcctgcctccgaaaacgaatccgtattcgctgccgtggatcacttgcactttgaccctccgcaaggagagcagcaggggctgcagcacggaccgcagcacggactgcagcaaggggtgcaacagggagtgcagcagggggtgcagcagggtgtgcaacacggcacgcagcagggtgtgcaacacttgcagcacggcgtgcagcaaggggtgcaacagggggtgcagcaaggactgcagcaggggctgcagcagggtccgcagcaggggctgcaacagggtccgcaacacggactgcagcaggacccgcagcagtcattgcagcacggtggacaacaagggctgcagcagggggagcagcaaggtccgcagcaggatccacagcaggggctgcacatcttcgattcgtgctgttcttgaacccgtcagagatctcgagcccggggcttgaatttgatttgtgtgtgtccgtgtgactatttacctacaaaatgtgtttttgctgacatttccgtttga

SEQ ID NO: 22401 - protein, 166 aa, DROSOPHILA
MSVSFDITVGSNGSPTSSTNLWWHLRLAPASENESVFAAVDHLHFDPPQGEQQGLQHGPQHGLQQGVQQGVQQGVQQGVQHGTQQGVQHLQHGVQQGVQQGVQQGLQQGLQQGPQQGLQQGPQHGLQQDPQQSLQHGGQQGLQQGEQQGPQQDPQQGLHIFDSCCS

SEQ ID NO: 22402 - DNA, 3224 bp, DROSOPHILA
gacgaggtctggtctgcatatgcatcacacacattgtttgcacactttgcatttcggagggaaattcgcaaaagttttccccagcaacactttcgttgcaactcagctgaaaagtgttgcctattttgaggctgtcatgcatgcgagtgtgtgtgtatgtgtgcctgcatgccaaagcatcagtgtgtgtgtgtgtgtgtgtgtgggagggaggcagtgtgtggcatgctttaatagccttttattggtcgagccacgcctctttttggccgtgccgggcggatgtcagacaggttcattgtcaaaattattttgtggtcaacttgcgttcatacttttggaaatactttcgccatgcttgccgcacatccgcccactgaactatccacaacatgtgtgcgccatcacaactacaaattcataatttattgtcctctgtcaatatatatgtacgtgttagccggaaattgtgcatttgcttttgcctgtttttacataagtggacaatctgcctctggctatttcacttgctaaaaagtaaatccaactctttgaaagctgagttgcaattaagttccaagttaaacatggatttatgctaatattgatacaataataattaacaaaacctatgatatatctaaccaaattgactttacttgcattctgcaaactaaaagcaaactagtaacaaataagaacattcttatttaatgttttttaaattattatttacttttgattttaggctaattaatatgaagaatacttttctcttatattattttaatgttatgaatatatacgctaatttttactgcaatcaataaatgctgaaatattccgcttaaagaaaagtttcaggagtaaacaccttttgaaataagcacttcaactttattcgcaagaaaaaacaacgaatatctatatattttcccctagagaagcattccttgggccccaaaaagccgagcacatcgcacgcaaactgccggcatactcaggtgtgggtggttgtacacaatctggagcctcgtccgaccagcttggaactcacgcagcgcagcaccgaacctggacacggatacggatgctgatgcggatacagaaacggacccgcaggccgggcacacgcaagtatgccaaaaacgaaaagcgtgaaaaccccagaagaggaacgagccggtaaattgctcgactgccggtgcaaaatacttttggaacatacctgtgcgtccgctgcaatcggcagacaatttggatgccgctgctgccgatgccgttgctgcaccacctccattcccatttccattcccgtttccattgccattgccatttccgtttccgttgccactgccatttgcatttccgcttcctgtggccgctgggcccgtcgatgtgggtgtcgtcgcagcggcagccgccgcagcagcagcagcaatcgccgcagcaactgctccgcctaattgcgaggtggctactgaggtgcctgctggcgatggagctgccacagcagcggcagaggcagcggcaacagcagcagctgttaatgtgttgcaggctgagtggaggttgttgctgctgctgcccccgttgttgttgttgttgttattgttgtggttgctgttgctgctgctgctgctgagggggctgtgtcctgtgggcgtggggcagctgttaattggcactggcgtggtcgaggcagcgtgttgctgctggtgttgctgatgttgctggtgggggtgttgctgctgctgctgatgttgctgctgctggtgctgctgatgctgccccgttaatgaagccgttgccgtgggactattgttgccggaaatgcttgttggcagattgttgttgctattgctaagatgcagggagttgccgctgctggcagtcatgctgccgggatttggattgtccaggaatcgcgcgccgccatgattctgctgcagcgagtacaaactgccaccgactggattcagattcgtgggcattgggtagaactccagcatcgtatacgagttgccacaaaacaccgctgttacttttttagtttcgagtctacgaaaatgtcacatgcaacaccgcacaaggaacacgcgacacacaaacaagacgctcgattgcttttgctttaactttaactacgcttctgttcagtttcgtttagaatatgatttcggtggcctattcttgcgctgccgaatgcgaggacaaccagccgcgttcgctgtcagttggcgtgtgatcgaaccatcagcgaaatcaaagcatttcactttgccctcacaaaaaaaaaaaaaaatcccagctgaaacgtacccccgcgcactgcgcctgcgcctgtttacaaaagcaacggagcgacggagcaacggagctgcggagcaacaactgccgcttggcctgcggcaacaacagcagctcttcgtgttgcacgtgatgccaggggttgtatcggtgcaagggttgcagcaaccccctctctgccccggcagtgcgcatgtctcaagtgattattagcagcgagggaaattctggcagagagcaagtccctcgcaaatcgctggccacacctcagcctcgctgcgattggctggccatttccccggcgtccattttgccgcacggcgcatgtgcgcaggggaagtgcgggttttcttttcttttgtttttttttatatttggttttctcatattcgtagatgtcttggctttaatgcaagaccaagtcggcttgtgggcggccatcggtgggcgtgcggcagctgcatgttgctggttgttgctggtgttgctgccgctgctgctgctgctgatggggcacaaagacatacttgcacttgcactcgcggcaactttggcgagtttgccgctcgacggcgacaatttccttgagttgttgctgctgctgctgttggctctttgagtggcacgactggaccagaatgccagcaacaacaaaggcaacaaacacagcagtggcagcagtagaggcagaaaaaaacaatggccttgtcttcttttacgcttttttgcacttgcattttactttttgcgggtgaaaaaagttggcgataaacaagatgggaacgggtgcttctcaatacattgggcaggttatttaaggacctaatgtctcacaacaaaagttttttgaaattcttaaaggattcttaaaatttaaatgaactagttttgaattctggataatgatttccata

SEQ ID NO: 22403 - DNA, 1070 bp, DROSOPHILA
cggctggttgtcctcgcattcggcagcgcaagaataggccaccgaaatcatattctaaacgaaactgaacagaagcgtagttaaagttaaagcaaaagcaatcgagcgtcttgtttgtgtgtcgcgtgttccttgtgcggtgttgcatgtgacattttcgtagactcgaaactaaaaaagtaacagcggtgttttgtggcaactcgtatacgatgctggagttctacccaatgcccacgaatctgaatccagtcggtggcagtttgtactcgctgcagcagaatcatggcggcgcgcgattcctggacaatccaaatcccggcagcatgactgccagcagcggcaactccctgcatcttagcaatagcaacaacaatctgccaacaagcatttccggcaacaatagtcccacggcaacggcttcattaacggggcagcatcagcagcaccagcagcagcaacatcagcagcagcagcaacacccccaccagcaacatcagcaacaccagcagcaacacgctgcctcgaccacgccagtgccaattaacagctgccccacgcccacaggacacagccccctcagcagcagcagcagcaacagcaaccacaacaataacaacaacaacaacaacgggggcagcagcagcaacaacctccactcagcctgcaacacattaacagctgctgctgttgccgctgcctctgccgctgctgtggcagctccatcgccagcaggcacctcagtagccacctcgcaattaggcggagcagttgctgcggcgattgctgctgctgctgcggcggctgccgctgcgacgacacccacatcgacgggcccagcggccacaggaagcggaaatgcaaatggcagtggcaacggaaacggaaatggcaatggcaatggaaacgggaatggaaatgggaatggaggtggtgcagcaacggcatcggcagcagcggcatccaaattgtctgccgattgcagcggacgcacaggttcggtgctgcgctgcgtgagttccaagctggtcggacgaggctccagattgtgtacaaccacccacacctga

SEQ ID NO: 22404 - protein, 285 aa, DROSOPHILA
MLEFYPMPTNLNPVGGSLYSLQQNHGGARFLDNPNPGSMTASSGNSLHLSNSNNNLPTSISGNNSPTATASLTGQHQQHQQQQHQQQQQHPHQQHQQHQQQHAASTTPVPINSCPTPTGHSPLSSSSSNSNHNNNNNNNNGGSSSNNLHSACNTLTAAAVAAASAAAVAAPSPAGTSVATSQLGGAVAAAIAAAAAAAAAATTPTSTGPAATGSGNANGSGNGNGNGNGNGNGNGNGNGGGAATASAAAASKLSADCSGRTGSVLRCVSSKLVGRGSRLCTTTHT

SEQ ID NO: 22405 - DNA, 3038 bp, DROSOPHILA
ggcagtgggaccattgggcagatgaatgaccagcagcccattgggctttctgcgatcttcgttaacgatcacgacgtctgtgaactcctcgcgctcggcgcttttgcatatcttcttcaccgacgacttgttgcgaatcttaaccagggcgttggggaatatgcgcgaaagctccagtccaaacttacgcgtcttggtcaccggattgtcagcaaaagtgatcagcacctttggctcgtacgaacgttcgaagtacgagctgaaatcgtccagttggagttccttttgcaactcctcgttgtcggaatcgttcagattggccacctctgtttggtccttctctcgcaggctctctatggtgtgaccaggattggcgggtacaccagccttccgtcgggcacggcgctcctgcatttttttcttgtgcttctccttcttcatttttttgtacaacgccaaacgctgctccttgttgcgcatccagctgaggggattcaaaacaggaattcgtgtcttcttgtcgtcgtcgtcgtcatcatcctcttcttcgtcgtcgtcgtcattctcctcctcatcgtcgtcatcatcctcttcctttaaatcctcactggcttccccttgtttggccgtttttttgctgctggaggcggcttcttcatcgctgctatcagtgactggcccctcctggacttccaaatcctgtggctcctcctcgtcaaagctggaatcgctgtccgagtcctgttccacgggcggaggggctgtttttcgcttaatttttatcattattccgagagaatcacgaattcacaaaaatgcgagcggcacgtgttgatattcttcttcttataccaatcacacggaaacgcagacaatctgctgtgtggggcagtgttggaaaacgtgccactcacaacgtgtagtttgtaaacaaaaatatatttaattaaaatggtatttcgggtcttagaactatttagtggcattggcggcatgcattatgcctttaattgtgagttcgtcgatcatgatacatgcgaaactaatatatacttttgaagatgcccaattggatggacaaatagttgccgccttggatgtcaacaccgtggccaatgcggtttatgcgcacaattacggcagtaatttggtgaaaactaggaatattcaaagcctgagtgtaaaggaagtcacaaagcttcaggccaacatgctgctgatgtccccgccatgtcagccccacactcgccagggattgcaaagggacacggaagacaagcgatcggatgcacttactcatctgtgtggactgatcccagagtgccaggaactggagtacatactcatggaaaacgtcaagggtttcgagagctcacaggcgcgaaatcagtttattgaatcgctggagcggtcgggattccattggcgggagtttattctaacgccaacgcaattcaatgtgccaaatactcgatatcgctactattgcatcgcccgcaagggtgcagactttccatttgccggtggaaagatctgggaagaaatgccgggtgctatagcccagaatcagggtctttcacaaattgccgagattgtggaggaaaatgtatcacccgatttcctggtgcccgacgatgtcttgaccaaaagagtgctggtcatggacataatacatcctgctcaaagtagatccatgtgctttacaaagggctacacccattacaccgagggcacgggctctgcatacacaccgctttcggaggacgaatcccaccgcatcttcgagttggtcaaggaaattgacacaagtaatcaggatgcatcgaagtcggagaagattttgcagcaacgcttggacctgttgcaccaggtgagactgcgctatttcacgccacgggaagttgctcgtctaatgagttttccggagaattttgaatttccgccagaaacaacgaatcgacaaaagtatcgactgctgggaaatagtattaatgtaaaggttgtcggtgaacttattaaattgctgacgataaaataaaacaaaatacaacatatttgcttgcttattttcactttaatacatttattagctaggaaattactctgcgctgttatcattaaaatatttatttcaaatccacataattttcccgcccagtgttgcctatgccacaaaacgcaacggttgtgtgctgtgtgatattccatactacttgtcaattggtcacactgcactgaattaaaaaaaaaaagaatataagtttacgcagaaaaacaataataattgcaattatcgctaattgaaagagtgccaaaatgataccaaaaaagacgacggttaaggattcacacattgtgaaaatagccgtggagcgagaggaccatatagcgcagttgataaatctggatcaaaggcatccgctggcaagtgagtaaatagcggataaaaacaaagatttttcgcttgctgagcagcagttttaaagagaatctgctttaaacatgtaaaacaaagttccaagaagttaataaaccagaattatgttgaaagtagcaaaggaacccatcataagggaggaacttccaaccaacgcccttcgctatgtttaagtgttatcgtgatgtcagcgcactcatttcctctttctcatttatatgcaaatcatacaattggtcaggaagttgctatttacagcgtattaatgccgccttcgcttgcaggtaaaatccaggaaatttgcaatggttggtccatcagcgatcaccagaactatgcactccagttctacgagcccactaaccgaaagtacgtgaccgaaaagaatcgcaatgagatcaagaatggctccgtactgcagctgcagtattcgccatccaagactgcctgcgatgccatggaggtgctgctcaatggcagtccacaggagaaggcgctgcgtctaaaggagctcacttccctaagcaccgatcacacatttgccctggagttcatcaaggagaagggtctcgacacactcattaagatgattgaggatggc

SEQ ID NO: 22406 - DNA, 1038 bp, DROSOPHILA
atgcctttaattgtgagttcgtcgatcatgatacatgcgaaactaatatatacttttgaagatgcccaattggatggacaaatagttgccgccttggatgtcaacaccgtggccaatgcggtttatgcgcacaattacggcagtaatttggtgaaaactaggaatattcaaagcctgagtgtaaaggaagtcacaaagcttcaggccaacatgctgctgatgtccccgccatgtcagccccacactcgccagggattgcaaagggacacggaagacaagcgatcggatgcacttactcatctgtgtggactgatcccagagtgccaggaactggagtacatactcatggaaaacgtcaagggtttcgagagctcacaggcgcgaaatcagtttattgaatcgctggagcggtcgggattccattggcgggagtttattctaacgccaacgcaattcaatgtgccaaatactcgatatcgctactattgcatcgcccgcaagggtgcagactttccatttgccggtggaaagatctgggaagaaatgccgggtgctatagcccagaatcagggtctttcacaaattgccgagattgtggaggaaaatgtatcacccgatttcctggtgcccgacgatgtcttgaccaaaagagtgctggtcatggacataatacatcctgctcaaagtagatccatgtgctttacaaagggctacacccattacaccgagggcacgggctctgcatacacaccgctttcggaggacgaatcccaccgcatcttcgagttggtcaaggaaattgacacaagtaatcaggatgcatcgaagtcggagaagattttgcagcaacgcttggacctgttgcaccaggtgagactgcgctatttcacgccacgggaagttgctcgtctaatgagttttccggagaattttgaatttccgccagaaacaacgaatcgacaaaagtatcgactgctgggaaatagtattaatgtaaaggttgtcggtgaacttattaaattgctgacgataaaataa

SEQ ID NO: 22407 - protein, 345 aa, DROSOPHILA
MPLIVSSSIMIHAKLIYTFEDAQLDGQIVAALDVNTVANAVYAHNYGSNLVKTRNIQSLSVKEVTKLQANMLLMSPPCQPHTRQGLQRDTEDKRSDALTHLCGLIPECQELEYILMENVKGFESSQARNQFIESLERSGFHWREFILTPTQFNVPNTRYRYYCIARKGADFPFAGGKIWEEMPGAIAQNQGLSQIAEIVEENVSPDFLVPDDVLTKRVLVMDIIHPAQSRSMCFTKGYTHYTEGTGSAYTPLSEDESHRIFELVKEIDTSNQDASKSEKILQQRLDLLHQVRLRYFTPREVARLMSFPENFEFPPETTNRQKYRLLGNSINVKVVGELIKLLTIK

SEQ ID NO: 22408 - DNA, 6717 bp, DROSOPHILA
tgggggctgcgacaatacttttcatgcatttttttttcttctttttttttttaatgcgaacgcaaagaaatatatatatatttattatatcgtttggattaggacttagactatacaatgggcatacttcttgcactctatacaactttaaatcttataaagggtagggggagtggggggtattacaaactgaaacaaatacacgtgctactctaacgaaagcaaactttgtcctctggcggcgactggcccttttttttgtggttttcgaaaaaatacaaaagttgaattattcgaggcgaaagtccagaaaaacttttaacatttgtacatggaacaaaacgcggggaatattacaatatatattacttacaaaaaaaaaaaaactatttgctcaacgatctcccgattaagcggttaaccgaagctccaacaatactactacatcttagcctaggtctatctgactgaaaaaactggacttggcatccttgaaaacttcgggaactaggggtactggacgtattcgatgatgactggaacacagtgaaaaatttgctgagctgacccacactctcgttacgatgtaatacgtatagtagttcggttataactacgggtctgtttcgatggaaatggcaaataaaaaccttgaacgaaacgtggttgaatattcaattcgaccaagctatgctatcataccatactttgagagattcttaaagaacacccgggtcgatccttgatgtgcctcctcattttcaacgtgggctaacttattcgaatctattatctaagacaaactgcagatgttgacgccgctgtcaccattgccgctgctcctgctgcagtttgccctccagtttgtgccatccgttgctggggatgtgggtgcgattgcgtttgctagtgcaggtgcaactgtaacttcctcatcgtcgtccgctaccatatccgattccggttccgattcggcaaccactcccaccaaagcccctactcagttttcgttcaccgtgtcctcctcgtgcaccgaggggtgtgcgctttttttcgaggcgcacatgctgaagtacttggccttgacctcctcgatagaatagtccacctcgatggcgggatagctggacttctgcaagaatatcgatcatcaattcgtatgttaattatatgaacttatgcaaaacgttacgtacattttgtgtgaggttttggccacgcaacatctgccagttttccagcttgtgcgcatacttcaaatacttctcaaagttatgcaatgtttcgtagacgtggcacagacccaaataatcgtactccaggccagagtatgagttcccaaacagacgcaggcctgcatgaaatatgcaaattaatgtgaaatttaacaacaaattgttttttttttctatccatatacacatacttatatcaatgctgcgcatgtaaagctgttcggcatcacggtatttcttcatctggtaattgtacagcgaggccaaatgcccaatggacaggccaacctcgtagtcaaagtgacccagcagttccgacttaattttgatcgcctttttgtgcattcgttccgcctcttcgaaacgattcatcgtttggtataaccgccccagatttccatagtgcttcgccgtctgtacattcacctcgccaaacacttgcagcgagagaagcagggcgaaattgtgcagctcctcggattgaagcagcagatcctcctcatctatgccatcagccatcttgtccagcgcaatctcctccagcaggagtgcctttacgcgcttcgccgatgccaacattagatgattgcttggcaccagatgctgcattatattcacagccttgtccacgtgatcctgggcacagctaaagtcaccggtgctgtactcgtgaacgtagtaggcatacgacaaatcctcatgggcaatggccacgtgaaagttcatattcccaaaaataccacgacgcacggccagtgcttctttgtatatatttacagactggaacaccgagtccacgttgagtaggaaaaatccgtagtccagcagtgcatcgccgtatttctggtgcgttgggccaaagtactcgctgtggggaaaaaaaaaaaagtttaataaaagaaagagaagtgcaaaatgctgtcgaatcggtggaataatttgcttaccgtgcgcgtcgcaccgcctggcagatgagcagattggcccgggcaaagtcccgcttaacgacacaggccttcgccgcctggcgcagaacatcgatgatggtgctgtcggggattaagtttgaaataagccacgcataaccaggctaaacttaaggcagggaacacaactcaccgtggattcgcatatccttttaaaaatcgcatggcgagaccgctccacaaatgactgttcttgtactcattgcgggcaaagtacatggccgaaatctgactgtaggttatggccaccagctggtttggcacgctcttattgagccatttgttcagacccatcaattccgcgtaggttttctctgcctccttgaagttgcaatgggccgattcggcatacaaaaggctatacgaaggatatatgtttgtttgattagttcttatcgatgaatgcataataaatactaatcataaatagtagttcttaaatttaattacaaattgtttgattgatttgataatttgacttaagaaatatataaattaccgctgcaggcagtcgagtcgaaactgcaaccagtgtttgtgggtcggcagatccttcagtcttacattaaggcatgccagcacggtaatgctctcctgcatccatccagcctccgagaggaacgatccgaggcgcaggcccagatctatgacctgcagctcaacggcggacagctcctcgaggccagaatcattgatcgcatcgagttcctcctgtgttgctctccggtgtgggagacctactatgcttccgatatcagcactgaattcgtcattaaaatcactgatgctgtctgcatttgtagattcggaatcgtaggtatacagtgaactgaactccgttgagcgatcctcaactgtatccatactcgactccagttcctcttcttcgtgaccggccaccacctcatagcgcgacacatagttctcgctgagtcttttggccagcatcttttggctggccattagtgaggccattatgcgcagcaattgactgcgagcaaatggatagcgaacgagtcgagcgaatacctcaagctgggccagctcctccagcagcgtgtccttcaaggactcctgctgtgacatctgtggatgttcaaacaaagattggtaattaggtatttgagtgaaagcaccattgagccgttaaaccaaaataggtcaccaactacaaaacactttagtaagggagtatttttttttccatcaattcataatcgataattttagttcaacttgcgttttcactacataagaagtaaaccaagtgaagaaaagaaatgttacatccaatcagcggacaatggaatttgcttagccattatcagcaagttcaatggctcttcagccagcagctgcgccatttaagcaaggtccatgcatcactgcatcactgcagcccccattccagtctcagtcccaatcccaatcccattcccattcccatttccaatcccgatccccgagcgaggcccaccatttgcaaacaggacaatcaaagggcgctggacccatccgactggttggtttatttatagagcgccgtcccccccgcccatcaatgtcgcttctgtttataatttacacagtaattgccacatattatgacaatccatgtatggaatcgaaaccacagcacgctggcactgcccagcaatgtgcattcgcaaccacctgtgggtctggtctggccggcctgtccacttggatggccttcgtccgaatggaatccatccggaggtacacatatggatcgctaggcacagcgacgatgatggagtttattcctggattactatgtaatcgcaatataataaaataaattccgataattgaaggttgtcatatacgatattcgatcagtctcttgatcagtgaaaataaacaatgcatattcaattgatgatgaactttatcagcagtctaccctttaggttgctctattatttacatactcgtacagataacgcttaacgatcggttatagtaaaatctacaattaaatcggtgccaatcataatgtgtcaacgaaatctaaatgcatttgggtgggagttgagtgttaatctatatataacatatacaatattcgcagtctccgtcttagcgaaggtcttttttttttttgccatgggttaatgggcgaactggtggttggttggggtgtaaacaatttaagcggaaaagcaaatacaaacagacaagtgcccatacccccccgcccccgccacccattcactcatactcactgataatgggtatgagagaatggtaattgccagtggcgaaatacatatgtgtatagtatggagagttcagataagaactaactgggcatcgaagtttagggatcctcattcttgcttgatttcaagaatctatgtacatttttgcatgcgcataatttcgggaatctaatgtgtgtgtgtgttttgagcagctcaaaaattataaaatgttcataaagaattccgcaaaataaaaagatattacaataataagatcataggaaagtaccattaccattttgtaccattttgcgataataacttataacatgtaaagtttggaaatataggagagcactattaatattcagaacctagttaaccccaagtatttaccctgagataatggcattgctcggattcttggaggggaaaaaacggtggctggcacttaccatttcgtaaacatcgatgagcaagttgcgtggcagctcagccagtcgactgatcctgtccagcgccggtatcttggtgttcatactcccgatgagggcctgcagcgacaggtcgtatagggtcttcggggagttgggatttattttggggatcaagaccacgagctgttggccagccatctcgctgttttgatgttgcctttccttttttttttttttaaatatatgtatatatatcgatgctagtgctgtttttttttggttttgcaacgatgctaaccagtcgggaaacgggggactcgcaggaggcgtgacactctgcaacaagtttcgatttgacggaaatgcattcattcgcacacgtgccgcgagtaccaaaaaacaaatacaaaacaaaacaaaaattttgtgaattagttgagttttgaggcaagtgaaaacaaaagcacgtttaaacgcaggcggaagagcaaaagaagttcagcagaatatcttgtttttacgattgtgtctctccgcacgcacttcacttcactttcttttaaggcgttcttcggttttctggctgctgttactgttgttgcttttcggttttcctttctctgccagcttcgctgcccgcgtgctgcctgcctgccttgcttttgctttccgctgcgaagtttttgctttgcgttgtcgctgctgctgctgctgctgctgctgcgattgttttgctttcgctcgattggggggaaaaaaaattttctagcacttacacaactcggaagcggaacacatccaattgtccaattgccccgtcggctaaaatcgcaatcgtggcccacagcttgtgtgttgaggattgattgttactgcacccaactttttctttattttcgtctgtcgatttagtaactagtggtggcaaacagctggtcctatcgatagacactgctgcggttcgtcaccgcggaccgaccgactgaccgatagattgcagacttatcgcaatgttaccgtgcgagttagcgcactcgctattcaaaatatataccaagtgcaaaagaatactgaatgtattttttggcagttcgccgcagtagttgactttaaaaaatacaaagctggaaagtctatgaaataataaaataatttatttaactgtaaacatgaatgctgctctgccttccattatcatcatttttatatcagtccatattatcggctaatcatcgaaaaaatcgatggaatcatcctcaatctccaccagctcaaaatcggaggtgctgccaaacatccaccagtggctgagaatgttccggatgagcataaatcgtgtggtgacaaactcaaagaagtggaagaaaagtgcactggaggtcagaagggcacaagaggcgacaaacacctcctggacggttaactgatcggtgctgccttgattcatattatccatgcactgcagcacctgtgatcaagattgtgaacttgatagaaaaccccatgaatccagtgccacattaaaatactcacctgctgcaagatgatatgggctagtggcattagcgaggcgctaaatagcagatgcttcacaatcaggccgcaacaacggccgcagcagaaggttcggatcatttgcttcagactggcccgctcctccgcgatattaaagaccgcattgcagatctcacagcgattatcccgcctgtgcatgatccagcgcttcaagcactttaggtggatgtagccctgcaaggatatgacctgaatgccgcaagcccaaagagacaatccgccatagcccaggggcgccagttcgaatggatgtcct

SEQ ID NO: 22409 - DNA, 2254 bp, DROSOPHILA
cgattttagccgacggggcaattggacaattggatgtgttccgcttccgagttgtagtgtcacgcctcctgcgagtcccccgtttcccgactggttagcatcgttgcaaaaccaaaaaaaaacagcactagcatcgatatatatacatatatttaaaaaaaaaaaaaaggaaaggcaacatcaaaacagcgagatggctggccaacagctcgtggtcttgatccccaaaataaatcccaactccccgaagaccctatacgacctgtcgctgcaggccctcatcgggagtatgaacaccaagataccggcgctggacaggatcagtcgactggctgagctgccacgcaacttgctcatcgatgtttacgaaatgatgtcacagcaggagtccttgaaggacacgctgctggaggagctggcccagcttgaggtattcgctcgactcgttcgctatccatttgctcgcagtcaattgctgcgcataatggcctcactaatggccagccaaaagatgctggccaaaagactcagcgagaactatgtgtcgcgctatgaggtggtggccggtcacgaagaagaggaactggagtcgagtatggatacagttgaggatcgctcaacggagttcagttcactgtatacctacgattccgaatctacaaatgcagacagcatcagtgattttaatgacgaattcagtgctgatatcggaagcatagtaggtctcccacaccggagagcaacacaggaggaactcgatgcgatcaatgattctggcctcgaggagctgtccgccgttgagctgcaggtcatagatctgggcctgcgcctcggatcgttcctctcggaggctggatggatgcaggagagcattaccgtgctggcatgccttaatgtaagactgaaggatctgccgacccacaaacactggttgcagtttcgactcgactgcctgcagcgccttttgtatgccgaatcggcccattgcaacttcaaggaggcagagaaaacctacgcggaattgatgggtctgaacaaatggctcaataagagcgtgccaaaccagctggtggccataacctacagtcagatttcggccatgtactttgcccgcaatgagtacaagaacagtcatttgtggagcggtctcgccatgcgatttttaaaaggatatgcgaatccacgcaccatcatcgatgttctgcgccaggcggcgaaggcctgtgtcgttaagcgggactttgcccgggccaatctgctcatctgccaggcggtgcgacgcgcacgcgagtactttggcccaacgcaccagaaatacggcgatgcactgctggactacggatttttcctactcaacgtggactcggtgttccagtctgtaaatatatacaaagaagcactggccgtgcgtcgtggtatttttgggaatatgaactttcacgtggccattgcccatgaggatttgtcgtatgcctactacgttcacgagtacagcaccggtgactttagctgtgcccaggatcacgtggacaaggctgtgaatataatgcagcatctggtgccaagcaatcatctaatgttggcatcggcgaagcgcgtaaaggcactcctgctggaggagattgcgctggacaagatggctgatggcatagatgaggaggatctgctgcttcaatccgaggagctgcacaatttcgccctgcttctctcgctgcaagtgtttggcgaggtgaatgtacagacggcgaagcactatggaaatctggggcggttataccaaacgatgaatcgtttcgaagaggcggaacgaatgcacaaaaaggcgatcaaaattaagtcggaactgctgggtcactttgactacgaggttggcctgtccattgggcatttggcctcgctgtacaattaccagatgaagaaataccgtgatgccgaacagctttacatgcgcagcattgatataagcctgcgtctgtttgggaactcatactctggcctggagtacgattatttgggtctgtgccacgtctacgaaacattgcataactttgagaagtatttgaagtatgcgcacaagctggaaaactggcagatgttgcgtggccaaaacctcacacaaaataagtccagctatcccgccatcgaggtggactattctatcgaggaggtcaaggccaagtacttcagcatgtgcgcctcgaaaaaaagcgcacacccctcggtgcacgaggaggacacggtgaacgaaaactga

SEQ ID NO: 22410 - protein, 686 aa, DROSOPHILA
MAGQQLVVLIPKINPNSPKTLYDLSLQALIGSMNTKIPALDRISRLAELPRNLLIDVYEMMSQQESLKDTLLEELAQLEVFARLVRYPFARSQLLRIMASLMASQKMLAKRLSENYVSRYEVVAGHEEEELESSMDTVEDRSTEFSSLYTYDSESTNADSISDFNDEFSADIGSIVGLPHRRATQEELDAINDSGLEELSAVELQVIDLGLRLGSFLSEAGWMQESITVLACLNVRLKDLPTHKHWLQFRLDCLQRLLYAESAHCNFKEAEKTYAELMGLNKWLNKSVPNQLVAITYSQISAMYFARNEYKNSHLWSGLAMRFLKGYANPRTIIDVLRQAAKACVVKRDFARANLLICQAVRRAREYFGPTHQKYGDALLDYGFFLLNVDSVFQSVNIYKEALAVRRGIFGNMNFHVAIAHEDLSYAYYVHEYSTGDFSCAQDHVDKAVNIMQHLVPSNHLMLASAKRVKALLLEEIALDKMADGIDEEDLLLQSEELHNFALLLSLQVFGEVNVQTAKHYGNLGRLYQTMNRFEEAERMHKKAIKIKSELLGHFDYEVGLSIGHLASLYNYQMKKYRDAEQLYMRSIDISLRLFGNSYSGLEYDYLGLCHVYETLHNFEKYLKYAHKLENWQMLRGQNLTQNKSSYPAIEVDYSIEEVKAKYFSMCASKKSAHPSVHEEDTVNEN

SEQ ID NO: 22411 - DNA, 3935 bp, DROSOPHILA
ttgacatttcgagtttcatgtaaatgtatatgtaaaataaattaaaacaaattcgacatgtaagtatagtattttttatacatgtcgaaagtttccagtatattacataggtaaaataaaaacgtggcattttgttgttttacatttttattgtttaatttaaaaactttttgtttggttttttcacaatagttttttgttgtttgttttctcattttttttaagaatctttcttttcttgcaaaacaaaaatagattaaagaaaaatattttatataatatattttttctctttttgtttgttgctctctctcaagttaatttaagaaacaattaatcaagttcttatttaattatacaaatttaaaaaaaatagtaattatataataataaaaataataattataacgggggaaaatgcaaatagttgtttgttttgttgtagtagctgttcttgttgttgttgatgttgttgttgtttattgttgctgatgttccttttcaatatctattactattcgttccgttttctcaatgaatccattgggaaaaggagaaatgtatattttctattgcttctgcttggatttagacatattttccgatagcttgatcctcattcatttgctgattgtccatatagatgcggtccttcctaaccgtcttctcattctattcatattgatgagtgctgtgtccggctaaattagtttccattaatttattttttctttttttctttttgcttattcttgattcttctatacaaaagctgcgagacaaaacgacggtcaaacaaagtatatttcatttcaattcactttaggaggcaggaagtgttcttatgggtggaaaagggtcgtcgctggtgggatagttagcaataggcttttgccagcgaccggaattatatttgttgcttattcttcatcatcatcttcatcattatcaatcatcattattattatctgctcttgctgtagttatatctttttctttttctttctggagtctcaccgctccctctctctttcccgcgcactatcgatctctgatctttgatagcttttacatgttctcaaactgatcgacgcgacgctttgtgttgcccttacgaatctcgcggagcgtcttgtacttgtcacgtccctggcgaacgttctcgcgatgaatcttatcgtttgccgtctctttcgtctcgtcgcgagactgcgccaaatcttgtttcagagcctagatatagatatatatatatatcaaattgatattgttagttgagtggagcataagggactcgatttcgaacccaccttgagctgatcgtgcaagcgttcgttgcgctcggccagcgtgcgtctgtcctcgatggggtccttgatatgctcgtcggtgtccaggtcgcgcgacacatcgccaccggcatcgccgttcgtcagctcctcctcgttctcgttctcatcctcggccacgtggtgatgctgcggcgttgtcgacgcggccagcagagcggcagcggcttcagcctacaaaaacgacaatgttcagtataaagttgaacacaaaatggtatcaagactatattcattggttttttcgatgccaacaaatagtgaaaaaagtgtaccgcaatgacctgcttgcgtcgggcgtcttccacttcgtcctgcagacgctttgtctcctcatccttggcgttgacctcgtcctgaatgcgctgcacctccatctgcttggccatgatctcctcctcgagcttgagcttctcgacggcctccatattcttggcctcctcgaggcgctgcagcatcgcctgcagctccttctggcgcagctccagctcatccttggcggcctgcagctgcttcagctgctcctccagccggcggatcatgtcctgcgcctcaagcagatcgcgctgcgaacgctccatgtcctcctgcatctgctttagccgatcctcgtactcctgctgcttcttttcagcgcgttcgcgtgcggccagcgccagctgcagcttctcactgcaaaaacgaaagaacaccgaaaataagaagggaatcatctgcttgcagattatagcctgtgcatgaatcagactctcatggaaatgatatgctcgaatcattatgtttcgggtcattgaaacgttgtatttcgttgaaattcccaaagttttgattcattcaaacagacatgacttgaaatccgtactaaccgttcctgctgtttggcattcttctcctcgcgcgcctgcgccttcatctgctgcacatcgatggtgtccggcttgcggcgacgcatgtacagctcgtggttgcccatgcagagggccagaatgcgcttgttgatgcggacacgtggcgcaaagaacataaagtccggagccttcttgtcgatcggcttgatgatgaacttcttctccgagaacgaaatgttgcgaatctcggaccatgggaaaccaattttcggcgtcaacctatcgtcctgctcgtaaatgttcagacccagtgcgtctacgcccagccaaagatccgtgcccttcttgttgcggatctcaaagtagttaacgccgtacatctccaggtcttgggcgatcttcagatactccatcatggcatcctcgcgcagcatgctgcgatgctcctgccaccaggtcataatcgactgctcccactcgtccttggacatcttgtgctggtcgatgacgcgctgcggcagcaggcgatcgttggccagaaagccggctgtgtgggtggtcttattgtggtcaccatgacgcgcctggacggcgtacgaggcgagcagcacggatgtctctggcggacaatagatctcgtcggtcagtatggcattcttcacctgcaggtagaacagacgcagtgtaatgtcctggatcagctcctcggccacatcctcgggatagaatttggcacggaacctaaactgcaagggattctccttcttcacgtcctggttcatcacctgtgaaaagcgaaaacatatcactattagatgcgaatgcacgctaaagtttacaaactgcaaatggatttgtatacgaaaaaaaaaaaaacgtttggttttcccgattcaataatgaaataataaacataatatcatagataaaaaagtgcatgcggcgtctgagtgttacccatgtcgaaaacggcattgatccagtctgtttgttgttgtggtgcagcattaaatcatatacagagattgcatttgtattagtaaatcaagtctctaacaatcgctaattaacttaagctaagcattcgaaggcgaggcgatacaatacaattatagaattggcattttacaggataattcggtttatgttctagctgggactttttgtggatgtactttgctggattggcatatatatatatatataaatatattctcgatctctgcccaccatatcatcggcgtcgtcatcctcttcgctcgtctctaaatgatttactccattgctgtcggctgtctttttgtccacatacttctttacacgctttaaatattttattgtctttatggccggcgattcgggctatattatgtatgtaccatacattacatttataaatattatgatgtacatgcaatcttagtaaataatttaaatttatattcttttgaactataaacttcaaactttatttgtatgaaatttatagtcgcctacctttttgtacagcttgatccatgtggagtcgcccttggagtcggtgtactggagtccaaagaaccaaacctctcgcaggccgatcgtcttcaccacctggtcaaacaattgcttgcccgtcgtcgtcgactgaatggcgaactccagttccgcgtccattgtcgtgacgcgcacatttagctgaaattagtaagggatgtcgggatattaaaaaaatatcgattaaatgattaaaataacg

SEQ ID NO: 22412 - DNA, 1771 bp, DROSOPHILA
acgccgcatgcacttttttatctatgatattatgtttattatttcattattgaatcgggaaaaccaaacgtttttttttttttcgtatacaaatccatttgcagtttgtaaactttagcgtgcattcgcatctaatagtgatatgttttcgcttttcacaggtgatgaaccaggacgtgaagaaggagaatcccttgcagtttaggttccgtgccaaattctatcccgaggatgtggccgaggagctgatccaggacattacactgcgtctgttctacctgcaggtgaagaatgccatactgaccgacgagatctattgtccgccagagacatccgtgctgctcgcctcgtacgccgtccaggcgcgtcatggtgaccacaataagaccacccacacagccggctttctggccaacgatcgcctgctgccgcagcgcgtcatcgaccagcacaagatgtccaaggacgagtgggagcagtcgattatgacctggtggcaggagcatcgcagcatgctgcgcgaggatgccatgatggagtatctgaagatcgcccaagacctggagatgtacggcgttaactactttgagatccgcaacaagaagggcacggatctttggctgggcgtagacgcactgggtctgaacatttacgagcaggacgataggttgacgccgaaaattggtttcccatggtccgagattcgcaacatttcgttctcggagaagaagttcatcatcaagccgatcgacaagaaggctccggactttatgttctttgcgccacgtgtccgcatcaacaagcgcattctggccctctgcatgggcaaccacgagctgtacatgcgtcgccgcaagccggacaccatcgatgtgcagcagatgaaggcgcaggcgcgcgaggagaagaatgccaaacagcaggaacgtgagaagctgcagctggcgctggccgcacgcgaacgcgctgaaaagaagcagcaggagtacgaggatcggctaaagcagatgcaggaggacatggagcgttcgcagcgcgatctgcttgaggcgcaggacatgatccgccggctggaggagcagctgaagcagctgcaggccgccaaggatgagctggagctgcgccagaaggagctgcaggcgatgctgcagcgcctcgaggaggccaagaatatggaggccgtcgagaagctcaagctcgaggaggagatcatggccaagcagatggaggtgcagcgcattcaggacgaggtcaacgccaaggatgaggagacaaagcgtctgcaggacgaagtggaagacgcccgacgcaagcaggtcattgcggctgaagccgctgccgctctgctggccgcgtcgacaacgccgcagcatcaccacgtggccgaggatgagaacgagaacgaggaggagctgacgaacggcgatgccggtggcgatgtgtcgcgcgacctggacaccgacgagcatatcaaggaccccatcgaggacagacgcacgctggccgagcgcaacgaacgcttgcacgatcagctcaaggctctgaaacaagatttggcgcagtctcgcgacgagacgaaagagacggcaaacgataagattcatcgcgagaacgttcgccagggacgtgacaagtacaagacgctccgcgagattcgtaagggcaacacaaagcgtcgcgtcgatcagtttgagaacatgtaaaagctatcaaagatcagagatcgatagtgcgcgggaaagagagagggagcggtgagactccagaaaga

SEQ ID NO: 22413 - protein, 512 aa, DROSOPHILA
MNQDVKKENPLQFRFRAKFYPEDVAEELIQDITLRLFYLQVKNAILTDEIYCPPETSVLLASYAVQARHGDHNKTTHTAGFLANDRLLPQRVIDQHKMSKDEWEQSIMTWWQEHRSMLREDAMMEYLKIAQDLEMYGVNYFEIRNKKGTDLWLGVDALGLNIYEQDDRLTPKIGFPWSEIRNISFSEKKFIIKPIDKKAPDFMFFAPRVRINKRILALCMGNHELYMRRRKPDTIDVQQMKAQAREEKNAKQQEREKLQLALAARERAEKKQQEYEDRLKQMQEDMERSQRDLLEAQDMIRRLEEQLKQLQAAKDELELRQKELQAMLQRLEEAKNMEAVEKLKLEEEIMAKQMEVQRIQDEVNAKDEETKRLQDEVEDARRKQVIAAEAAAALLAASTTPQHHHVAEDENENEEELTNGDAGGDVSRDLDTDEHIKDPIEDRRTLAERNERLHDQLKALKQDLAQSRDETKETANDKIHRENVRQGRDKYKTLREIRKGNTKRRVDQFENM

SEQ ID NO: 22414 - DNA, 6037 bp, DROSOPHILA
agacgagttgccctcctccagcatcttctccagctcatcgtcgttggtcggtcgtccggtaatctccagttgacgctgtatccttcccttgcagcgctctcggtagtcggtctgcgtgcgattgtactcggtcatcacttcgacgaatttccgtgacaacgtcgagtgctgcgtcttccgaattctcagatccgccgacgacttattctgctgctcttcctgctcgatgttctgctcgatgcccttgagcttgccgcgaacgcgattggcattcttcttgatgtcggccatcagatcctccagctcttgcttggtcttctcgtccgtttgtggggcggacaggatggccgagtgcttcttctttacctcctcgacgttatcctgcaccttgtcgatcatcccgcggatctcctccacctgggcgaagaagtcgtccatgtaggaatcatggccatccacattgacggccacctccgtctcctcctcgtcatcggattgggcggcatggagagcggctaatctgtctttagtcatctttgtgtcggggtattatcctggtttttgaagggtgtgcgagaagattattctcgatttgataattggggagtttcgaatttctgggactatccttgtttacggtgcagttttcaaaatttgttggatttttttaaatattgttttttatgcttcgttgttatttggctctttcccttggccaagctttacgtaagcctttgttacgcggtcttcgcagattgcgtttttgcgattagcagttaaacgttaaacacgcacacacacataaaccacacgtgtaaacgcgcgcggagtttttcctttttctttttttgcagccttgcttttaacttgtttgcacgtttttccacttttgcgagagaccttttattgattttccgcttttggctggcagctctctctttgctcggtttacttttagtgtataattataacttaactggcactttggctggcgttttggttaatattattatgcttttttcgtgtgtgtgtcgtttggtgtggtgttatttcgctcacaagagagacggagagagaggcaaagagagctcgtgttgcgggcggcggcagagacgtcgactgcggcagagcacctcttcaatgccagcagctaaaaagctaaagctgctgctgaattaatttttcttttttctgtttttttctctcttgttatttgtgactcacactggtaccatataatattaatcttttactcggcgaatttgtttgtttcactttcgcactggcacacgcacacacatacacaaacacgcacgcagcagtggcaataaacgattttcggcagtgggagaggctaccgaaaatctcttaaaatgggcaaaaaatcgatttctgcgcaaagctccaattctgccgtctgcttttgctgctgcttcttcgtctttctctgctttatctactttgcttcttcttattcgcggggggtgttacggtgggcgttatttgttctttctctctccttttcgcttgcgttttattttcgtttgttgcgtacgcgtcgtcggcgccgattcagggtgtgtgtttgagagggacgcacgaccacctatcacgctctcgcacactggttgtctgggttccacgatttgttgttgtcaccaatcgtttcacatgcacatttctttgtatttatctgaggcaaatgtgttgacaatatttttttgatttttttcacaaaaaaccaaatattgtttcgcgattttcccggcggccaagagtttttttttgtgtgatttcgatgcgagccgaaacgaaacacagcacctcgcgcgggcaaacaattttcgagtgtgaccgtgccgtcactaccagaatataccttccggttcgcaatgatttcctattaaataactacattgagtagctaaaaataccagactaaaaacaggactaagcggggacaccaaccaattctcacaatttcgatgattcgcgaatcaagtgattatgtggatgtatttggatgtggatcttaagagaaagagctggagctcctgcaatctcttcctggtatattataaattttggtattttatattatttatagaacaggatatttctctttatataatttaattgatatctgctcatcttcattttaaaagctaagcgtggaaaagataatattttgctgatgtaatcaagactttattgtgcaagccttatacgtttgattgttaaaaaaaaaacaaactgcaagtggtttctgttttcccttttgcccggcattttcgtcttttcacttttgcaaaacgcgtattgaaatgtgctaaaaatgccgccacataagttccattacgtcagtcccacacaacagcaacaacaatcagcacgggtttgtttgtggatcccattcgcactgagatacgtcatgcgcgagaattttcatgaatgaatcgcgaccggcacttttgttaaagcgaatcgcgagctgaaaaggaactggggaataggccgcaaaatgcaataatatatatgctcggcatttataaataaatataaaaattaagtaacaccaagggtagtgaactgttacgaaacgttgcccaacactggtcctattggagcaatatttaaaaattcacttcgttcaattagaaatttaaagttacgaaaattacatgctaattcacatagaaacttggaaggaaattattacaattaaattttctaacgaatttgatttaatcgagtaagaaaagtaaatagtttaagccatctgtttagaatatacctgtaaaggatatttactattgtttgctatatttatgggttctaaaaataccgatttttaagaaaggtattctggcatggtttccccaaataagacattatataggatctttggaactcaccggatatttcgtctgtagcacgactccgcatatctcgtcgccgacgaggaactgctccccgagcatcgccatacaaacgttctcccaggcccggtcgaccttgttcttgcgtagtcgtatcaaccactggccgcccttgctgttcgccgggtcctcccacatcggtatgatgccctgcttgaagaggaggagctcccggtagggcttcagggcggtgggccggatgaggtgcgagtagagcgaccaccactgctgcacgctggcgcaccggccgaccatgtgcagcgacttgctgtagtcggcggccgcgcgctgcgtctccttgcgagagaaccagaggcagtatgtgtgctgcagccggttctcgccgggacccacctccagtggtggcaggttgtccacatctatctgattatccacatcgctgtcgtcgctgtcgacaatatctggccagtttttcctgtaacgcgagtacatgacacacaaaatagattttgattagtatgtcaaaggctgtatgtagatcaaatttgacatttggttcaccaaatgacacaaccgccgcactttcacataactatcacaaattctcgcagccaaattaagtttaacaaaacaaaaacgatgaagctgtctatacgcatgctggaccaacgcaccatcactttggagatgaacgaatcgcaggaggtgagggctctgaagcagaaattgggcaatttacccgaagtcgccatgcccgcggagaaccttcagctgatatacagtggccgcattatggaggatgccatgcccctcagtgaatatcgtatagccgaggacaagatcattgtgttgatgggtaagaagaaggttgataagagctcgccagaggagaaggttgccccgacaccaccgttggccgctggcccaaatgttttgcgcacagaggatgtggtgccttcactagctcccaatgatcagtgggtgagcgatctcatgtcaatgggatatggcgaagaggaggtacgctcagccctccgggcgagctttaatcatccggaaagggctatagagtatttgattaatgggattcctcaggaggttgtttcagagcagggattagctgcaatcccgagcgtacagacaagtgatcaattgcagcaattaatggcagatcttaacattacacggatgcgtgagatgattaatcagaatccagaactaatacacagactaatgaacagactggctgaaaccgatccggctaccttcgaagtctttcagcgtaaccaggaggagttaatgaacatgatttcaggcggcgcaagtcgcaccccgaacgagattgaacatttacagattactttaaccgccgaagaaaccgccgccgtagggcgtttggaggcactgggtttcgaacgtgtgatggccgttcaggcctatctggcctgcgacaaggacgagcagctggccgcagaggtactaatacgccagtcagaagaggatcgagactaataaagcgattcggagcacgtaaatgcacccagaacataacctaacaattttccaagtaaagatggtgctggcccagttttgttgctggctgggattgtggttgtgtgtggcaggcggtgcgcgtgggtggcggaggtgctccacttacgtctcgtactgcttgttggctactttctccatgctcatcctggcaattatgatgctgactggtagctgatactggtgctctcctgctgactgcttggctgttcctgtggcgctgttccaacctctggaacgagtacctgtggatccgggtgtttgcactactagattctttatgctgctgcttcttctggcgcaattcttcttttgctccttggctgcgcgtgtgtgtgttgtgtgtgtgtgtgtgtgtgggcaaatgggtttttggtggattctcttatgggcgattttttggggcagccgctttttcggggagcggttcgctacgggtccgccgctctctctggtaaacaatcgtatttcctgtgccttatcctttccggttatcagtgggtttgcttattttttggccgtttagttttggttcgctcgactttagtttgacgtttctttttgtacacaacacaacatgcgtccgattaagttccacttgctatccacattccacgcggcgctgtcaaaatcgaccagtgctgtaggtcgaagaagaattttgacattggccagcactgcacgtagtgcagttacataccctactgaagtgggtatatatgtttcattaatttcattaatttttcaactcgagttaaattgattaatttccgttgtttgttagggaaattaagtgactcaaataccaacatttatttcaactccaataattataaaaatttactttataatgtaatcaataataaaatgaataattacataaatagtaaacatatattccaaaatattttttaagaatgcagcaacaccgctgacacaacataccccacatttggttacagggtatcagagtatcgaatttttgctgtcattcttcaaaaatcagtttgtttacgttcacctgcaagccgcataatgggaaaaagtgagaaaaaatcaaagaaaaagcataaggagaagcgcagggaacacaaggaaaagcacaagtcaaagaaatccaagaaacacaaccgaaaaaaggaagaatctccgccgatagcttcaccaacaccaatacagcctgaaagggtcaaccaggaggaggaggatgactttgccataccaataggtccgtaagagcccccctgtatatatttattattgctgaacactctaaacccaccccaaaacccaagcactgatgaatagcaaatcacatgccccggaaactccagaggaataccagcgccgtcagagccagatccgcaaagaggtggacccggtgacgggtcgcgtccggctcatcaaaggcgacagtgaggtgctggaagagattgtgaccaaagagcgccacctggagatcaacaagaaggccacccgcggtgatggagagttctacgaagccagatctctggacgccgccaagcgtcgcaaatagctaatttaccaaaaatgcaaaaatataataagctatttcatgacttgta

SEQ ID NO: 22415 - DNA, 1837 bp, DROSOPHILA
cggacgcatgttgtgttgtgtacaaaaagaaacgtcaaactaaagtcgagcgaaccaaaactaaacggccaaaaaataagcaaacccactgataaccggaaaggataaggcacaggaaatacgattgtttaccagagagagcggcggacccgtagcgaaccgctccccgaaaaagcggctgccccaaaaaatcgcccataagagaatccaccaaaaacccatttgcccacacacacacacacacacaacacacacacgcgcagccaaggagcaaaagaagaattgcgccagaagaagcagcagcataaagaatctagtagtgcaaacacccggatccacaggtactcgttccagaggttggaacagcgccacaggaacagccaagcagtcagcaggagagcaccagtatcagctaccagtcagcatcataattgccaggatgagcatggagaaagtagccaacaagcagtacgagacgaaaaactggccagatattgtcgacagcgacgacagcgatgtggataatcagatagatgtggacaacctgccaccactggaggtgggtcccggcgagaaccggctgcagcacacatactgcctctggttctctcgcaaggagacgcagcgcgcggccgccgactacagcaagtcgctgcacatggtcggccggtgcgccagcgtgcagcagtggtggtcgctctactcgcacctcatccggcccaccgccctgaagccctaccgggagctcctcctcttcaagcagggcatcataccgatgtgggaggacccggcgaacagcaagggcggccagtggttgatacgactacgcaagaacaaggtcgaccgggcctgggagaacgtttgtatggcgatgctcggggagcagttcctcgtcggcgacgagatatgcggagtcgtgctacagacgaaatatccggaaatcattgcgaaccggaaggtatattctggtagtgacggcacggtcacactcgaaaattgtttgcccgcgcgaggtgctgtgtttcgtttcggctcgcatcgaaatcacacaaaaaaaaactcttggccgccgggaaaatcgcgaaacaatatttggttttttgtgaaaaaaatcaaaaaaatattgtcaacacatttgcctcagataaatacaaagaaatgtgcatgtgaaacgattggtgacaacaacaaatcgtggaacccagacaaccagtgtgcgagagcgtgataggtggtcgtgcgtccctctcaaacacacaccctgaatcggcgccgacgacgcgtacgcaacaaacgaaaataaaacgcaagcgaaaaggagagagaaagaacaaataacgcccaccgtaacaccccccgcgaataagaagaagcaaagtagataaagcagagaaagacgaagaagcagcagcaaaagcagacggcagaattggagctttgcgcagaaatcgattttttgcccattttaagagattttcggtagcctctcccactgccgaaaatcgtttattgccactgctgcgtgcgtgtttgtgtatgtgtgtgcgtgtgccagtgcgaaagtgaaacaaacaaattcgccgagtaaaagattaatattatatggtaccagtgtgagtcacaaataacaagagagaaaaaaacagaaaaaagaaaaattaattcagcagcagctttagctttttagctgctggcattgaagaggtgctctgccgcagtcgacgtctctgccgccgcccgcaacacgagctctctttgcctctctctccgtctctcttgtgagcgaaataacaccacaccaaacgacacacacacgaaaaaagcataataatattaa

SEQ ID NO: 22416 - protein, 262 aa, DROSOPHILA
MSMEKVANKQYETKNWPDIVDSDDSDVDNQIDVDNLPPLEVGPGENRLQHTYCLWFSRKETQRAAADYSKSLHMVGRCASVQQWWSLYSHLIRPTALKPYRELLLFKQGIIPMWEDPANSKGGQWLIRLRKNKVDRAWENVCMAMLGEQFLVGDEICGVVLQTKYPEIIANRKVYSGSDGTVTLENCLPARGAVFRFGSHRNHTKKNSWPPGKSRNNIWFFVKKIKKILSTHLPQINTKKCACETIGDNNKSWNPDNQCARA

SEQ ID NO: 22417 - DNA, 14940 bp, DROSOPHILA
ttagaatttatgaaggccacttttgtttttgccagcgaaattgcctaaataaataaatagttgctgtgctgccgagtaaaaaaacacgcgacaacaaaaacaacaacgcgaggcgtgtcgctttgtcgcccgttcgtggtgttgttgttgctggtgtaaatactacgtttattattttttttttataattttattccgattttcgctaagcgctaggtgagcaccacaaaccgttcacatattacaccgacacgtgattgcggggcaaattcggccagtggataattaacaattgtcctacgaacacgaaaaatttcacatgcacttcgtcaacgcgcagcccacaaatgttgttgttcctctcacccctcgctagcgatggcactctgcccgcgggcctatcgatagcagcgctggtcgttcggcggtggcaactctgtcgggctgtcgtttcgaagatatcgatattagttggccagaaggggtggccagacaggggaaatttttaaactgctgaaggacattcgaaattcaataaaatgaatcattgaatccacatgaaagtacatttagtagcagcgttaaaggaatacattagttaaagctctcaaatctacttcaatgtttctttagttattaattagaatgtcatacaaatgatttgtcactgtattgccaatcagcaatgttttataggaacttccccttaatctttcctacgttactaagacctaaatcagccacaaactgggaaaactcctttgtgcagaccgccgttcccaacaacaacaattggatcctaaactcgaaacaagtgaaatgtttaatatctacacgcaaactactgccaactgctttccgaaaaatatccggtattattagtgatcacaactttattgattcaccgaatttgttgtttaatttaaaaaaaaaaccctaattcacttttattttgtacaattattattcgtgtttgtagaaaatacaaaatatcaaagggctcgagcacgttgacacggagaaatgggttaaaaacgaatccaaagaacttattgcacatgtgtgtgttcgcgtgagtgtataaataaataacgtaaaatgtatcgagatgttccatagcagaagaagatggttagcacagctccttccttcacttctatgtaactagggtattatttcgattaaggtttctcggcttggggctgtctggcttggattccagggtattccccatattcacagcttccgtatgctgcgatctgccgccgctgaattgagtttagttctgtgaaaataagagaaaaacgaacgttagatatatctagacaagtgcaatatcaatggttaacaattggaaaacaagcttcaaacagtattaggccgaatctgaacgaattaactgaacaatcctcagaaggaattgcattagtatggatcgcagtgcgatcaaaaccgaacgagagtgttaatttagtacacaacacagtggagcagaacgaggaatttcatgcgaatgcgttgccagcttaccccgattttccagctgccaaagggtcaactggaaaatgcgcgaaccacacaaaactgcagcagaacggatctagaaccctggagttttttctattttttgtttggtcaaatcgaaggaggattgtgtaggttcttttttaactatatatatgtatatatatggcgtcagaatgaactcgcacatcgcttggatagcacttaagaatggtatttaactggctttaaagatgctgtgctgtggctgagacctttctactcctcactggccatcctgtgtccgtgtgggtggtttggttgtatttcgtgtgagggatgcgatgagaaaaagagctcgaattagtgcccagaagttatattacacataatgaaacagcgtggccaagcgaggtgacagtgcgattgggtatgggaggatgctagcggaagccggaaaacgaagccgaattttccatttctgacgccaattcagtggagtgagtaaatcaaaaattgctcttggtaaatatcaaactgcatttggcggattcaagttgtttacaaaagaataagtattcagatagttggattggtcacaaaataaggatttagttaactaggtttatatctctctctgtgagtaccggaaatgacgttctgttttatttattttttgtttcattgggtgggtgtgcgtattcgtgtgttgtgttgtgtgtgtgtgtggaaagagaaaaataaaacgaaatcaataaattagtattgggtattggttaggagtttgtaattccctcaaatatcaaaatcgggcagagaaaaggatgaaaagctgacggagattcaggtacacttacagttccatggagagcaccgtgggattgggacatgcttgtggtgcccgtatgtggcactgcttgtgactaatcagctggcagtcgcgacactcgtagccctgctttccgggcctccgcgggatggacttcatacagatggagcactgcagaccgcttctggaatgtgaaaggattcgttaattatattcaaagcaactaatgcttactactttaaacttacccgctcaaatgcttggcgatgaaggtgtgatcgttgtagatgtgcagcttggtgcccttgcgacgccagcgcggtctctgggcgatggccaaaggcacaatgaagtggctaaagatcatgcacatgaagcagttccatcagaatccataaaatgcaaacactcgatcgaaactcaccgctttatgccattctcgatggtctccagcaccagggtggaggcctcgtgcacgtaggttttattgctagccgaggaaaagcctgagatggccgaggattctgaaattgaggagcgacgtgagtggtcggtgatggagtgaccaatgcccatgcgtggtcctgcgttttattaattttagtgtgtgtttgtttttgttttttttttatgtggcaagttgagagtggcacacaaaccaagcacccgttaggacccatcaaatcatattttgcacatatgaaaataaacaaaagaaaagaataggagaggagtatgagaaataatcacaaccaaaatcgaatcagagattataaaaagaaaaattcaaaagccaaattccaaaaataaacccaaatatttacaaaaaatattccaaaaatattcaaccgtgttaagtttttgttgaaataggtgtttcatgtgcgtgtatcggaaccatgaaatacatacagattcgtgttgtggatcacagttcagttagcagttgatgggtattgtgttaagggagagaagataaaacagacaacagatgtagatacaagtacagatacagattaccaaacagttaatttacaagctttgaatggtacaatatcttggggtacttaaactttaagggagaaaagcaatttacacttagtactaaagttattcatgaaataagatgtgatgtatgaaaaataatgattttgtgatttgaatcatggcttataactactacttataaggctgaagcctgaataataaagcgaaagtcccaattacatatgaaaatggacgctttttagagagccaaaaatatgaacaacttaagataggtattagacataaaagattttgcaatgcactaagcagttaatagttgttctatatgaagtgatattccttcgcagagttattagcagaatgcaggagttgtccaaaaaaattgtgcgttaagccgggctcaaatagttaaaacgtggacactggcggaggactgtgactgagatggtaattaccaagtgaattgcttttggacagagtggcacgatcgacagataatgaacgggaagaatcaccattgagggttccggtggctgttcgagggaatccggtggctgttgttgtattcgagttggtggctgatagtgacttatgactgttattattaggttgatcggccgagagggtgcgtgtcttggagcggctgagccgcttcttcagggtgccaaagaaattacgttttttgctgcgcccgcgatcatcgaccacgtcatggccctccaataatccggattgctgagccagctgctgggcaccaccgtttcgtggcagactgttatatccgcccgaaccggcgccattcgagttaccattgccattgaggctatagttgttgtggtaactactgccattgggcgatgaggcggcattgggctggccaaactgcaagtgattcaacggttattaatgcggaatcttctctagctttcaactctaactgcatgccatgccggtgaacttagtgaactcagtgtacttacctcagcggtgctttcctcgttgacggtgccattacctgaatcgatgagaggctcacccagctggctggacttctcctccttggccagctccagctcaagttcggtttgtgcctcattggcggcacgttcgaatgcctgagccactgcctgatccaattccgtcgccgtatcggtcacctcgatttggccatctctattcaactcgacctgattggttcgaggatttggttaaagaagcgcatttttgggggggttaggcagagcaaacagaacgagaaacattttgaaattagcttggcttaaatactaactagcctacatgacttgaacatcatcatgagggcgggattagagacgcagtaactcagataactcaaaggaacgattgaagtaatgatgaccaggtctgggtgtttaccttaaatgcattcgggctgcttgaattctgggcgggatcaagagacggaaatgaaatgaaataaaggtaaagaaaaacaaaaggaaattataaaaaccgtacaatgcggaaaaggagggcacgaaatgtatgaaacctctaacgaaaattgggtgtcacggatgttattttattctcggaatctttgcccgaagaaatgtgtttccacaacaagcgtgaacccattttagccatacacactcacccgctgcacactgtggatgatcaaagtgctcttgctgggttgtccgccacttccgctgctcgagagcgctccatcctgcagagctcttacggctgcatccgctagatctgctccatttcggatgtgttcgttaatggccggtgtgctgagacgcagtgcctccttgagacgctgtggacgtgcgcccgccgggatttcggcaccctcaatgaacacaaagtccacggtgatggctcccgaaacgggctgcgtctcataggggcgtggttgcagctgcaacagttgagtggatgcgggtccaacggccagctcatcgattccaaccaggccgagacccagaaacttgggcggatctgaggcaatcaccggatggtcatacacctcgaacaggatctcagctgattgaggggagagttcactacaatattgaagaaaaacattactatttctggccaatatgaaatcagtgagcacttacaagaggaagtgctcatcccagaagggtttgccgccgcgctgagtacccgtctgattcttctgggccggctcgtccatctcgatgaccacgtagggattctgggcatcccttattccatcgcccttgacgatcttcaccagcagccgacggccggaaaccatgtgttgcgaatccctcaatcccacgccacccatgtgctgctccatgttgtgctgtgtgaattgtaggaggacaacatgcgatgagtgagtgcagtgagagacagagaaaagatagaagtcagggaagaggtacttcattctgagaagagcgataaaaagacggaattaggggcttatgaaattcgcctttaattaggaactaatgcgtgacagacactagaaattgtaataatattgaaagtattggttgccctgaaaagagagagcgcaaaagatagttctttttactttcaaggatcagcagggatcatagggggtaacaaaacgaattctcaacggaaacacgagcgatgaaaggcgaattccataaacacaatgaaggacgggagcaatgagaagtgtctgtttgttttgcttggatgacaacactgtacagatagtctcaagtcgagttctgtgtgcgatgacaagtgtaccaggacacaggagtacaaagaacaataaacacaacactgccacaaatacgggagctggcatcttctcactgctcccgacgctcaccgccagcgagtcatagtgaacgggatagattacgggcaggtccaggggctccacttcggcccttggacaggtggagtaaatggagaagtccaccggatagatggtgtcgcgcaaagccgtcgtcaggatgtcgctgatcaccgtctgcaattgctgttcatcctgatccattgccttgatggcacccacgctgttcatcgcgatgcgaacctttggaaaaagagtgatgtttcggttagtatcgaatatggtcttggtattggtttataattgtgtcgaaacagtaacacaactcataaattaactctactttaagttcactttcatgttaatcaaacttttatgagttgtatgatttgtttaaattttctttttgctgttacaaaaagttacttacatccggatagccctcgactcgcatctcacccttgaggctgttgtagttcatgggaatggccatacgggcgcggaacctagacacggtgaccttgtagtgggaggtctccaccttgcccgacttttggcggaaggtcttcacctgcaacaccggcattgcatcgcagtcaaaggtgatgagctgtgttgatattcgattctcaagtgattaaagttccaattgacaagcaaattgatttaattaccatatcagcgggattgttttcatcgcaattacaaaatatattattcaatccgggggcaggactgtcgggtagcactcgaaccacttcaacggccactccatgctgcaaaagtgaaggaagaatatatgtacgtatgtatttaaccacttgtacgcaatcaaacagatgggctcctttccatcgctgaatgttttattcgcgaattacgtaattcagcagcgtgcgttttttggggctataattcagagacgggataatgactaacgactaaattccgaccttggcctacggactggctccgatcacgtaaaaggcgataaaaaagcaaatcggaggaaagcaagcgaggcaaaatcatgtatttcggcatttcgataccctctagccgaataaagttattaaatattaagattaactaactcgaattgtgattaataacaaaagccatatgaatatgaatcaatcaacttgtttctttcgtatgcaaactaagttcgtaggtgacccactcaagatagccttatttttacaccttttaaaatcagatacaagcgtatttctcagatttcatcatttgtcacaattttgtaaatcatcactatcaactcgtcgagctaaatactacacggtatagaaaactgaaaacaaaacgcgttttgacatcagttacggctgagcgagttcccagtttgccagttggacggcgaaggggaaagagctggagccgaagcagctgaacatcgatttcaagttgaatgtcgtggcgggccaagaacaaaggttaatgcccggccaataaagaccaagtcgggctcagccatgacatcagagcccgtacggccgtgtatgatgtcaaaactgcttgccgtatgatgtcatttagccatcctccgattgagactcacctcctccacagacttgcgcagcgtgtcgttgatggcgattacccaggacatgagcagctcgttgacgatgaccaggtcgctataaagccagcgaaacacttggctggtccaggtgacggagctctgtagaataaatagagtaaatagagtcgttatatatatatatatcagttgattagtttatatggtttataatattattatatattctcaccgtttctggacccacgacattcgatggcggtgggacatagcgcttcttgcgattctctggcccagtggaactctgacgcaccacccgacgacgtggaccgccggcagctgcaccagcggtattcaatggcgatgctgatgaacgtcctcggccaccggatgcgccggccagaggcttggataagtccaagccttcaaccttgctcttggtggccaggagatcgcgcggctccgagagacgtttctccgtcttgccggcgacggacgtgggtgatccggatgtgggggccacgctcgtctggcgactgttggccgcactggccgacttgtccttgttgagatacttgtggtagagcagcttgattagccacacggagaagagggccagaacggcccacaggaaaatgaagatggccagggagtccattgttaagtcaccaagtccctcgaacgaacagatatagtcatcgatttgatctgctagatccatcgttcagttccaggccgagttaatcccacagatcgtcgtcatcgtcattatcgttctgcgggaatagagtcttttagtgggtgtttctcatctggcgagagtatctccgtaatgggttgagatgagaggaatttgtgtatcggggcagccatgaaagatcttaatcccccctcctgcccaaacgtctctgtcgtattctatttatagaatttgtacaattttctttggggaaaaatatgaaacgttgggaaaaactggtcactcacaaaagcacaaaatccacaggaagttaagaaataataatcgtttaaatatttccaactttaattgtttatattggttaaaatatgtatttgctttaaacaaataatgcaattgaaaaagaaaaatcgaaatatttgataaacgggaactaaaccgaaccgaactgaaacagaactcaactgaaatgaactgctcgcatgcaaatcaattcgaatcggatggtatcttttgtggggatcttcgctctccgaggcgagaggcattctcagatgcaaaggaatctgtatccgacagtacgaatccgagcgaaagatactgcgccggcgcctgtagctggtgtcagagatgtgaacacttgttatccatttagttgttcgtgactccaactattccattcttctggcatttattggctcccccaccattgacgtcatagttttttgggtcgcgacagagaaggaaaagcgatgacgtaaggctgattttccgttgatgaacgccacaccgccctacgacttcactctattgtttataatatgtttgttctgcttgtatttttagacctatcactatttgtttcgttctttccgctactgttggttgtattacacggatttattagaaaacattcgagagaattggcattcggacgactatgggacttgcggggaaaatggaaaattcgtttcgtttcactccccttggcacttgttgcagttaatactgaaaacacattttgcgattcgtgccctcgtcccattcattgctaaattatcgcgaaaatacgaaaatgcgctaagcgtttttggcgatagaaaaacaataacaaaagcgctattatgctggcgattatctgttttatatcaaataataatggcagtgttattttcgcttctttttctctacaactacgcacgcaattttttaggcactggaaaaaattattataacttatagaggctagctattaaatatatttctttcaattaccatcatagtaatacttcaagtccatacagcaatgtacttttgcatttttttttaattaaaatttataatcatttaaaacacacactttctttgcctgcgctacattcttcggctttctgcgccactgattttccacttggcttttctgcttttccactctccctccaatgccccagcaagtacaaaacacttttcgagcattctcagccactggcacgtcgtctattgaccccttgccattatgtgggcaccaagggcgctgcggaggggcgtgaaaatgaggggggtggtattgtgtgcgagtgagagggcgattacgagagcaacaagtactcgcgactatatttagcccttggcaagcgcacacaaatcgcgttggggaaaatgccgtctgccacgccccccgcttggtcgtgcaacatcagccctagtacacatgttcccattgcccccgtgattgacagagatctgcgatctaacggtcgtgtgggaaagtgtccacatcgttaggaaaaacattaaataccatataactagaaaaacatacgatacagagaacacacagactcttaattcttaaaataaagttctatttaggtacaagttgatccaaaaaacaaaaaaaaactctgttttttaattagcatattttccagtgcccttagccaactcctcattaaaataatccacccatatgaaccattttccgccgtgtgaaagatgtgcaaagctcgtgtggtaatagtttgtattcccagaagagccgctgggcctggctaattaatgccaagtgtgcggcacatgcaaactattggccaagtggcttttggccggcccgcttcccaagctcgaatttgatgggcttgggcaacggcaacaggtactgccagtacttccgttttaattgcccgcccgtcaaaccttcaagagggtcagaggtttcgggttgaatgccccccgcctttcgagtggcgaacgtctagaaattgcgtcattcttagtgcctggttttttgttttctgaggtctcagtacccttttttttccagcaagctaaggtattcggtgtgcaaacattttgagatgcacacaccaagtgcgcattgctaatcacattcaaatgcgaataaatattgaaaatgatttccgttaccacgccagagctaaaaatagagattgggtaatccaatccaatccaagccgattcaatccgatccgttcgaaagccggcgatcggaatagaacaaaccacaggtctgaatgtcgccaaaaatataatatataatgactcaaatccgaaaactttgacggggaacacacacttgagtcaccttatcttatcacactctttgcatttatcgcatttaatagccattagtgaattggcattatgactcgatatggatctgggcaactggctaataagacagcaacaggctatctgacttgcacccttaatgggtcaataaaatatgtcaaatgacggtatcgccaacagtttcaaatgctctcgaacatgatgtcattccagtgaatgtttcattcaaattgataaggcgctgcttcagattcacacagtacaacaaagaaaaagctaatgttgtaagactcgaaagtttgagcaaagtttgggtgtccaagacctttgaaatcaattgatcttgaaataagtatgaacatcatctcgaactgatggtaaaaaatttgtcataccagttattagttaggttacacccattgatttaagtgcagtcgtgccgtcgagaaagctctaatcagtcatccatgcatgaagagcctacgaataaaattgcacattattatagcccgattaatctattgccctatggcatcgatatcaacgaccgaacttcgtcgtgtttgccatttcaaagtgtcaaggttgggctaaatttggaaatttggcgaaagtaaatggctagcgagcgcagacagggcgtatgctcgatttgcaaccaaagacattaagcatacgcagcttgatcccaagatacaaacgtactttagcacgcaactgaaagagaccacgtcagaggtcaaaggggaaagggccagttgcgtgtttcactttggtgccagccaaagttcagctcagaaaagccgcacaacccattttacacaactctccgagacagacaaacagcgtttcgaaacctttcgactttggcctattcaaaaactcgtttatcgattcaaactggtcccgcgaacccatcgatttgcgctctgtgaatatgagttctatgcagtcgaaggcgttacgcatcttactcgaggaaagtttctgcccccggcttattgatttttccacgggtttccatttcttatctgaatgattggcctgcaaatatagtcggtggtcagtttactcgccacccgccttcggctggccaaaaggtatttgaactgcggggccaattgttttgaccacgtttggtcaaccatttgaggactagggttgccagggcaaccactaaataattaagggtccgcgcattgatttgtcaacgtgaccgagggccaaacaaaaatcggagttgaatcgtaaaaagtgctcacacttctcggtttatttgtttgttaacccaaaaacatcattttcccttttcctggaagttgcttttccgaggaaaagctttgaccggcaaaggatgcgccatgcgaaagagaaaataatggagagcggagagtaaaaagaacgctgagaggggttggaaaatgcaggcagttacacgagcaaaaaaattatattaaatttaagttttgtttttagtttgtggcaggcgaaaaatgaactttaaactggtatagaaaaagtttaagtattaataaaataaaattgatttgtaatggggctcttaactactacttagtgcaaaaacatactaccgaattaaatataaatcgaattaaatttgaattgttttacattttctctataataccttcaaatgttgccctatttatttatttatttcatatttaataataaatgagatgctttaagttatttttttctgtgcacagtttttcctgcctagttttcctggctttcaacagcgccaacagccagtgacacagtttccacattttggggtggcttccaggggtgtagagagatacggaaccagaaacgagggttgcagatggacgaggcacgcaatttgggcctctatcgcacggaggatcgccgcaacgtcttcatagagagccattaggaacacacccaaaataaaagccaagcccaaaattgagcaaaccctgagctcggttgaaggatgtgcggaaaaatgtggcgttttctttttggaggaagaaaaaagggtttgcttcacttaccgtatcacaaagaacgcaatttgtagatgtaattatagttgttgaatccgcaggataaagtgtgttgcaatttgtgttgttcgtggaagtaaaaatggatggcattatttggggagaaatcacaaccgtaaccgtaaccacatatgtaatggctttttagccctgattctgcgacttgtcggccgaaatgtacttggttttcaggtgttagaaaacatatttataaaatgcaaatacccagtgattgattagtgacaaaaagcttagaccctgctcaatttgtgggtattcatgtgcatgtatttcagtatggtttgcacgtgagttaggtggccaaatatataaaagtttcattaaattccagagccagttatttagggccagcaatttctctgtgcgaaatgcaaatcgataaaggagagggagtgtggtggttggttttcaaaagggggtggtggtggcgggcggaaaagcttggcacacatagtaaacaaatggtgttttcactgaatttttatatgctctactcacacggttgaccgaattttaaaggccacgttagcaaataatattcctacgaatttcgatttagtgcaaacaacaaaaagttctaccaaaacactgccgattattcttgtctcaaaaataatgccgtttcgtattttattacttaatatttttcaaattatttaactatttcgctgcagcgagatagaagatagtcgtgctcttctcgcgttgatgatgaaattctttcgtttgttattgttctttttttttgttgtgtttttgtcactttgttcgttgcgaagatggcgataaaggagaagcgaagaggggaggcgaggcaaatcgagtagacgtgtgaagaattttacaaacttccgtaaaattaactaaaattgaaagacacaattgatatcttttgttcaataaagtcgtcatttcagcaataacaatattttcgatttatgctaaaaagtgtaaatctaagttttgacgcttgaaattggcattttgctatataaaatttagtaaagcattaaaaattccacaatatttaaattcaaatcgaatgaagccactcaagttacagataatcaaaaacagaatagtggaagccactcaagtttaaataaaatacaatcgagttattcaagttcgcctgtgttgtattcaaacttaagttcaatgtcgtcggttgcttccgcttgctcataaaagtttcttttgcgattgtttctctgttatatttgaatgtcttcgataagaaatcataacattcaaattatgtagattgtccgttggcctttgtgtgctttacactgcactacccggttttagttttaactactttacactgacacgttactactgggccacacagtcgctttagtggttttctatttaaacttggccaacatttaaatttccccagccacaataacaacaacaacaattagaaccactgaagagaaagagagagagcgagacaatcagctgtttgcagcatcaatgaagaacgctgcttttcggcagtctttaatttcgatttaagttcggcattataataaattgtttttgtgtagaacaagcaacacatagccacacacgcacacacagaaacacgcgcgcacagtttatatgttaaattgtatatttctgcaatgctttttaaatattttgctgcggtacaacaaatatttttgcggtttgttgccaaatttcccatatacaacgtacacacgcttatcgaataagctttcgttttatcattttgtttctttattttatgttcttttttttctgttgagcactaggaacaataagaaatctttgccgccgctattttatttttcatccgcgaacgaaacgaacaccaaccttactcgttga

SEQ ID NO: 22418 - DNA, 3253 bp, DROSOPHILA
ttaattttacggaagtttgtaaaattcttcacacgtctactcgatttgcctcgcctcccctcttcgcttctcctttatcgccatcttcgcaacgaacaaagtgacaaaaacacaacaaaaaaaaagaacaataacaaacgaaagaatttcatcatcaacgcgagaagagcacgactatcttctatctcgctgcagcgaaatagttaaataatttgaaaaatattaagtaataaaatacgaaacggcattatttttgagacaagaataatcggcagtgttttggtagaactttttgttgtttgcactaaatcgaaattcgtaggaatattatttgctaacgtggcctttaaaattcggtcaaccgtaacgataatgacgatgacgacgatctgtgggattaactcggcctggaactgaacgatggatctagcagatcaaatcgatgactatatctgttcgttcgagggacttggtgacttaacaatggactccctggccatcttcattttcctgtgggccgttctggccctcttctccgtgtggctaatcaagctgctctaccacaagtatctcaacaaggacaagtcggccagtgcggccaacagtcgccagacgagcgtggcccccacatccggatcacccacgtccgtcgccggcaagacggagaaacgtctctcggagccgcgcgatctcctggccaccaagagcaaggttgaaggcttggacttatccaagcctctggccggcgcatccggtggccgaggacgttcatcagcatcgccattgaataccgctggtgcagctgccggcggtccacgtcgtcgggtggtgcgtcagagttccactgggccagagaatcgcaagaagcgctatgtcccaccgccatcgaatgtcgtgggtccagaaacgagctccgtcacctggaccagccaagtgtttcgctggctttatagcgacctggtcatcgtcaacgagctgctcatgtcctgggtaatcgccatcaacgacacgctgcgcaagtctgtggaggagcatggagtggccgttgaagtggttcgagtgctacccgacagtcctgcccccggattgaataatatattttgtaattgcgatgaaaacaatcccgctgatatgctcatcacctttgactgcgatgcaatgccggtgttgcaggtgaagaccttccgccaaaagtcgggcaaggtggagacctcccactacaaggtcaccgtgtctaggttccgcgcccgtatggccattcccatgaactacaacagcctcaagggtgagatgcgagtcgagggctatccggatgttcgcatcgcgatgaacagcgtgggtgccatcaaggcaatggatcaggatgaacagcaattgcagacggtgatcagcgacatcctgacgacggctttgcgcgacaccatctatccggtggacttctccatttactccacctgtccaagggccgaagtggagcccctggacctgccccacaacatggagcagcacatgggtggcgtgggattgagggattcgcaacacatggtttccggccgtcggctgctggtgaagatcgtcaagggcgatggaataagggatgcccagaatccctacgtggtcatcgagatggacgagccggcccagaagaatcagacgggtactcagcgcggcggcaaacccttctgggatgagcacttcctctttgaactctcccctcaatcagctgagatcctgttcgaggtgtatgaccatccggtgattgcctcagatccgcccaagtttctgggtctcggcctggttggaatcgatgagctggccgttggacccgcatccactcaactgttgcagctgcaaccacgcccctatgagacgcagcccgtttcgggagccatcaccgtggactttgtgttcattgagggtgccgaaatcccggcgggcgcacgtccacagcgtctcaaggaggcactgcgtctcagcacaccggccattaacgaacacatccgaaatggagcagatctagcggatgcagccgtaagagctctgcaggatggagcgctctcgagcagcggaagtggcggacaacccagcaagagcactttgatcatccacagtgtgcagcgggtcgagttgaatagagatggccaaatcgaggtgaccgatacggcgacggaattggatcaggcagtggctcaggcattcgaacgtgccgccaatgaggcacaaaccgaacttgagctggagctggccaaggaggagaagtccagccagctgggtgagcctctcatcgattcaggtaatggcaccgtcaacgaggaaagcaccgctgagtttggccagcccaatgccgcctcatcgcccaatggcagtagttaccacaacaactatagcctcaatggcaatggtaactcgaatggcgccggttcgggcggatataacagtctgccacgaaacggtggtgcccagcagctggctcagcaatccggattattggagggccatgacgtggtcgatgatcgcgggcgcagcaaaaaacgaccacgcatgggcattggtcactccatcaccgaccactcacgtcgctcctcaatttcagaatcctcggccatctcaggcttttcctcggctagcaataaaacctacgtgcacgaggcctccaccctggtgctggagaccatcgagaatggcataaagcgccacttcattgtgcctttggccatcgcccagagaccgcgctggcgtcgcaagggcaccaagctgcacatctacaacgatcacaccttcatcgccaagcatttgagcggaagcggtctgcagtgctccatctgtatgaagtccatcccgcggaggcccggaaagcagggctacgagtgtcgcgactgccagctgattagtcacaagcagtgccacatacgggcaccacaagcatgtcccaatcccacggtgctctccatggaacttattttcacagaactaaactcaattcagcggcggcagatcgcagcatacggaagctgtgaatatggggaataccctggaatccaagccagacagccccaagccgagaaaccttaatcgaaataataccctagttacatagaagtgaaggaaggagctgtgctaaccatcttcttctgctatggaacatctcgatacattttacgttatttatttatacactcacgcgaacacacacatgtgcaataagttctttggattcgtttttaacccatttctccgtgtcaacgtgctcgag

SEQ ID NO: 22419 - protein, 883 aa, DROSOPHILA
MDLADQIDDYICSFEGLGDLTMDSLAIFIFLWAVLALFSVWLIKLLYHKYLNKDKSASAANSRQTSVAPTSGSPTSVAGKTEKRLSEPRDLLATKSKVEGLDLSKPLAGASGGRGRSSASPLNTAGAAAGGPRRRVVRQSSTGPENRKKRYVPPPSNVVGPETSSVTWTSQVFRWLYSDLVIVNELLMSWVIAINDTLRKSVEEHGVAVEVVRVLPDSPAPGLNNIFCNCDENNPADMLITFDCDAMPVLQVKTFRQKSGKVETSHYKVTVSRFRARMAIPMNYNSLKGEMRVEGYPDVRIAMNSVGAIKAMDQDEQQLQTVISDILTTALRDTIYPVDFSIYSTCPRAEVEPLDLPHNMEQHMGGVGLRDSQHMVSGRRLLVKIVKGDGIRDAQNPYVVIEMDEPAQKNQTGTQRGGKPFWDEHFLFELSPQSAEILFEVYDHPVIASDPPKFLGLGLVGIDELAVGPASTQLLQLQPRPYETQPVSGAITVDFVFIEGAEIPAGARPQRLKEALRLSTPAINEHIRNGADLADAAVRALQDGALSSSGSGGQPSKSTLIIHSVQRVELNRDGQIEVTDTATELDQAVAQAFERAANEAQTELELELAKEEKSSQLGEPLIDSGNGTVNEESTAEFGQPNAASSPNGSSYHNNYSLNGNGNSNGAGSGGYNSLPRNGGAQQLAQQSGLLEGHDVVDDRGRSKKRPRMGIGHSITDHSRRSSISESSAISGFSSASNKTYVHEASTLVLETIENGIKRHFIVPLAIAQRPRWRRKGTKLHIYNDHTFIAKHLSGSGLQCSICMKSIPRRPGKQGYECRDCQLISHKQCHIRAPQACPNPTVLSMELIFTELNSIQRRQIAAYGSCEYGEYPGIQARQPQAEKP

SEQ ID NO: 22420 - DNA, 5127 bp, DROSOPHILA
tgctgccgcttccgtctggcgtaaaatgaactgcaactgtaaatgaaatgaaagtgccgttgaaatgagagaaagagagagtgagagagagtgcattataaacgatgacgtcgcgtgggtgtgataacagcgtgtgggtgtgtgttggcgtgggtgtgagagaaatgcctgataatatccgctctgggagtcatttttacaaatacagtgcacgtacgacacaaatacgcacacattgaaccgcccataatccctctgacaatgtgtgttctgattagtgagaggtttggttttatcttttatatgttaattgcgctgttatgttactgttattgcattgtattgattcatcgcttctaaaaaaaaaaaaaaaaaaaaaaaaaaaaaaaaaaaaaaaaatgtgtgttctacttttttcgggtcaacgcttcggggcctcgagaactgaccattagccactgaacccagccagaaacagaaagtttagcaatatgtcaaataaaaggctataaatagctactacaatgttctgcccacaaaagcgcacgtgcactgggaaaaaaattagggggaaacattttatattttatgttatctatacatctatatgatgcttaaaagtttcgtaaaatgcatgagccattgtaaattttaaattgaagatttcgtgattaaaactatgatttgaatatgcagctgcacctaaaagattgttatagttttcgcaagatgtcagtttgaacctgaatatcacatattaatctagcttgtaagcaaagtgaaatggctaatttgtaccaaactatgaagataatcccaaatatttcccccagtgtacgagttaaaccttcgcttggataaggttagtggtcagttggggacaggcaactcacgcaggacacgcaaacagcgcaccctaaatcaatacgtcccaagaatgtgaatcaattatggcagagagcgctgtacgtcggttcgcgtgcggttttggaaaaagcaattaggcgaacgagggaccgacttcttccgggtgcagccgtgtcacaaggacactcccaaccgccgactcgcgctcgagatttggtctcttgtgggtggtgtagtagtaaaagctgtgtctatataccccactcaaaccactaacttacctttttgtccgcgaattggtcatcatcgccagcattggcagccaccggtttggaaatgacctttttagcctccggcacaaagctaaattcgtagttatcctcgccaccccagatggccaggcagttatccttgttaatgtactggttgatgtcctttttcgatatcatttttaaaatctcaaccgctttgggtggcagcaccgccttgatgaccttaaaagcagctagtagaaaaacaacaaaaggtcatggtcatggttaatgttcaaagtgaaaaaatgactcccaaagatgatagttaccatttagtacccagcccagttcatataccaaaatgtagttcaagctattgggatagaactgcttaaatgtctccacaatgcgtttcacaaactccagatccatggaggccaaactcgtgcccgacatgtcgaagaatatggtcaactgggtcagatgctgctccctctgagtcctttccacccagtacaccacgatgcgtatcagttcgtccaggttcttggacttactgtgcatcttaacgcggaataccaacaacggcttgccatccacatcagtgttgtgcacaaacacggatccctccttcaaatactcctggttcaactcgctctcatcgatatcgtttgccccagttgactgacgcaagatacaggtttcccacagcgaattaaaggaggtctccatgtcgagatcatacatttccagaaacctttgaagccacagatgatcgttgcgaatacgatcaatatcggtcggatggaaaggtgctaccagcgcgaatcatgtaaaacaataataaaattattggattcttatctgtgtttatatatagttattgaagataatgtagcttattgtgtattgttacaatatcatatctcagctcttctgatgtttagctcatgaaattttgattttaatctctgaacatatgtataaggggtgaatttaaatttggacaagataagaagaggatcgatagcataaagttgaagaactaagcaaatgaaactctaatctattaaaacattcagaagtgcttaatctttgactgctgatacttaacctttcgtccataggtagtccatacccaattctatattaagtactttgagaagctatagctcaggtctcaagttcaaagctttcgtttgagtgcacttggaacagccaagtcattgggaaaggcgggtctgtttgatttattcacctactaattggagaatttgcactacaaataagacagctggaatgaatcatataaaaaatactactaaccgaacgcagctatatacatatctggtaattacggaataaaacctgccagctatcataaacccagtcgcacataatttattagagccgctagttgcaccttgtatccgtcatttgcttgggattagctcacctgccggaggggatgaggcatatttgcgattgaacctatcgcgcagctcctcgatttgctggggtgtcgtttccttgaccttgacgcccatgctgccagttagttttcgcactcgttcgctaccaagcttgtggcaagactaagcattcaagttgaattccaatgggtaaagcggtgctcctcctatcgcttggcgccctatcagaaatcgactttcagtgtgattagattgtgcttaacggggagcagaggtgaaggtacaaaaggttgaggtactacagcgagaactacggagcgctatccaagtgcgttccacgagcgtgtgcggcaaactgaacatccgactaacggtgctgccagcggctagccacgatcgtatatcgcggcgatcgttagcagtcggccggcgtgcggcttgaatgtggagcacctggttctgcgcggtactataatgggcctccgaaaagggcaagccacccagcaccaagccaacctcccacccgcgagttgctgcaatggatcgtgatcgtgtgggtggtatgccacctgcattgcaattagctcgagtggaagcactacgaaaagctttcaaagcttttcgctggagtaataaaaacaactatgcggtatggtcaataaatatcgtatttttatttacactataatacaaagttgttgggcaagttgtttaggcgaatttgtaaacgtagtcatcattaccgccccagattttcaggcagttatccttgtccacatactgatcgatgtcctttttggtggtcaccttaaggatcttcagcgcttcggggggcaggaaggtcttcaccaatttaaaggcagctaaacacagaaaaccatcctttcaatatgctgatctttacagataccacaatgtttacataccatctagcagaaaaggcaaatcatgtaccagaatatagttaggcacatacggatacttggtctcgaacactccgatgatgctcttgatgaagcccatgtccaagttactcagaccggcgccagtcatgtccatgaaaatggtaatcttgtccaggttactatcccgctgcaaacgctcaatccagaagacaaggatgcgcagtagatcctcctgattgcggctcttcgagtgtttcttgatggtgaggatcagcagcggttttccgtccctatccttgttgtgcacatagatggagccatcgtttagaaactcctgattaaggtttgcctcggtgatgtcgtaaactccaaagctcttccgccacgcgaggttatcccacaacctcgtgatgcacttctccacatcgaagtcatagacctgcagtagcttggtgatccaaaggtcactgtccgtaattcgctttagatcgttgggatggaatggttctatttttgggattgtatgtgtatgtatgtatataccagattagatgtgattctttcgactgccctaacttacctgctggcggctctttctccaatctctgcagaatgctagtcttgacttggcttatctgctctggagtcggatcctgatcggaaggcatgttgctgcttggctttgcgtgaaccaattgaaatgtcttctgcagtcagcttcaaatttatgccgatttcttatctatttgaaaacaattttcgtggacgagctcgggggggtagttttctttatctgggagcggaatgtctaacctgcgagcgggctaatcatcgactgacagccagcactgccccaaacgctcgtcgttgcgctcgtcgagaggcgttttcatttgttctccaattgtgctctgctttcccgacgatcatgtaaatgactcaatgcaagtggtgggggcactggaaggggcaaccgcatgccgcccgttctttaatcaatattgaagcccgcagaacagctcatggaggaggggaggggcaaaaagtaggggatcccgtcaattgcgataagagcaacaaacgggggaaactggcaatgtttatgaggtttgtgcaggcgactcttcgggaacttggtttttatgatactcgctgtggttttctttgcgatatatgacgtatctcgtagtatcctagtatctcgcatttagctgtggaaattctttgcggcttatctcgtctcgatgtgggaagctaagtctactgggctcgattattcccaatcaattgacagtcgctgattgcggtggctgtaattgatatcaaagagcaacggttattgcataataacaaactttttttttttgtttttagattgcattctaattgcacatatatattgctaagcaaaaatagcccacattttaatcttatcaaccttatgagctttaatttattagccagccagagggattaaaggtgtactattctataattgcaaaaattgtactgaatatacagtttattaaggaccagagttcaaaatataaacattttgtagactagttaaagtaagcaagtcttagcaaaaatgcgcatttgttacaaatggtgttatttttattatatttgactaagtgcacaacagttgcttacttacagactttt

SEQ ID NO: 22421 - DNA, 1716 bp, DROSOPHILA
atgccttccgatcaggatccgactccagagcagataagccaagtcaagactagcattctgcagagattggagaaagagccgccagcagaaccattccatcccaacgatctaaagcgaattacggacagtgacctttggatcaccaagctactgcaggtctatgacttcgatgtggagaagtgcatcacgaggttgtgggataacctcgcgtggcggaagagctttggagtttacgacatcaccgaggcaaaccttaatcaggagtttctaaacgatggctccatctatgtgcacaacaaggatagggacggaaaaccgctgctgatcctcaccatcaagaaacactcgaagagccgcaatcaggaggatctactgcgcatccttgtcttctggattgagcgtttgcagcgggatagtaacctggacaagattaccattttcatggacatgactggcgccggtctgagtaacttggacatgggcttcatcaagagcatcatcggagtgttcgagaccaagtatccgtatgtgcctaactatattctggtacatgatttgccttttctgctagatgctgcctttaaattggtgaagaccttcctgccccccgaagcgctgaagatccttaaggtgaccaccaaaaaggacatcgatcagtatgtggacaaggataactgcctgaaaatctggggcgcaactcgcgggtgggaggttggcttggtgctgggtggcttgcccttttcggaggcccattatagtaccgcgcagaaccaggtgctccacattcaagccgcacgccggccgactgctaacgatcgccgcgatatacgatcgtggctagccgctggcagcacccttggtagcgaacgagtgcgaaaactaactggcagcatgggcgtcaaggtcaaggaaacgacaccccagcaaatcgaggagctgcgcgataggttcaatcgcaaatatgcctcatcccctccggcagcacctttccatccgaccgatattgatcgtattcgcaacgatcatctgtggcttcaaaggtttctggaaatgtatgatctcgacatggagacctcctttaattcgctgtgggaaacctgtatcttgcgtcagtcaactggggcaaacgatatcgatgagagcgagttgaaccaggagtatttgaaggagggatccgttaagtccaagaacctggacgaactgatacgcatcgtggtgtactgggtggaaaggactcagagggagcagcatctgacccagttgaccatattcttcgacatgtcgggcacgagtttggcctccatggatctggagtttgtgaaacgcattgtggagacatttaagcagttctatcccaatagcttgaactacattttggtatatgaactgggctgggtactaaatgctgcttttaaggtcatcaaggcggtgctgccacccaaagcggttgagattttaaaaatgatatcgaaaaaggacatcaaccagtacattaacaaggataactgcctggccatctggggtggcgaggataactacgaatttagctttgtgccggaggctaaaaaggtcatttccaaaccggtggctgccaatgctggcgatgatgaccaattcgcggacaaaaagagaccaaatctcgagcgcgagtcggcggttgggagtgtccttgtgacacggctgcacccggaagaagtcggtccctcgttcgcctaa

SEQ ID NO: 22422 - protein, 571 aa, DROSOPHILA
MPSDQDPTPEQISQVKTSILQRLEKEPPAEPFHPNDLKRITDSDLWITKLLQVYDFDVEKCITRLWDNLAWRKSFGVYDITEANLNQEFLNDGSIYVHNKDRDGKPLLILTIKKHSKSRNQEDLLRILVFWIERLQRDSNLDKITIFMDMTGAGLSNLDMGFIKSIIGVFETKYPYVPNYILVHDLPFLLDAAFKLVKTFLPPEALKILKVTTKKDIDQYVDKDNCLKIWGATRGWEVGLVLGGLPFSEAHYSTAQNQVLHIQAARRPTANDRRDIRSWLAAGSTLGSERVRKLTGSMGVKVKETTPQQIEELRDRFNRKYASSPPAAPFHPTDIDRIRNDHLWLQRFLEMYDLDMETSFNSLWETCILRQSTGANDIDESELNQEYLKEGSVKSKNLDELIRIVVYWVERTQREQHLTQLTIFFDMSGTSLASMDLEFVKRIVETFKQFYPNSLNYILVYELGWVLNAAFKVIKAVLPPKAVEILKMISKKDINQYINKDNCLAIWGGEDNYEFSFVPEAKKVISKPVAANAGDDDQFADKKRPNLERESAVGSVLVTRLHPEEVGPSFA

SEQ ID NO: 22423 - DNA, 2716 bp, DROSOPHILA
cgacgtcactgcacgcacgcacacatgcacagcttatatttatatgccgcccatgtattggtgtatttttcctcaattgcggtggcggcaagcttacacacacacacacacgcatacacgtgcacgcacacccgcgcactcattgacgagaacaacaacagtggacgtaatgcgtgattttcgttggagtagagagatggtggtggggggcctatttgttgctactttgtttgctgcctctctcagttttgttctaaaaccgcgatttgttcacttatcaggcgcattaaacaaaggctcgttggcgttttaatcgttgccacaagcatatgtatgttgttttctttttattttcgttttttgttattgccgtgattttatgttcacacacgctatctccgtcgctcgcacgcaagaacttttgtgaatttagagcacttgcaattggcacacagaaaccgattcgtattggctgtgtggcggcgtacgctttgatcatttaccaaagttatttaccccgatcttgttttcaattaattgattgcagcagcgacgcgcacgaacgaaccgcttgccgtgaaaattgaacgcagagtgaccgtgattggagagtcgagatatacgtaggtgcggtagaaacgtgctaaaaataaccacacaaaacacactaaataatcactacaaattaagacacttattttaaaaatgcaactgcatagaacttaaaaaattgtatttattttcttaatgcattatttatagtctttaatttatgagtaatatttgattcccgaccgcatgcactttaaaaacagtgctgtaaaatatgctccttttgccggcatgtaatgtaacggtcctttaattacagtatgttaatatacatttttgttagctttcaaaatgctgcgatatctcattacaaagttgttaacacactacagtgcaataattgtcaaataaagctgtgtttatggaataagttaagcaaaatgaagtttaaatacgaaaacgttttaattctttccaaattgacaaactggcatcccacattaaagtgttgcaaaacaacggacgggctcagctgtttcgcccatcgccaaaatgttgttgttaaataagctgcccaggataacgcaactactcgccagagatcccaaggatcagcgaggcatctggggctatgtggctgtcgccttcaaccaggtggacgcggaacgtctgtcgaaagtgggtgccaaccgcctgtgcgccgagtggattattaaaaacggaggcggagtgcgctttgtggagagtccctccaggctgtggaaggattacaactcgttgccgggagagaacacgcagttctgcatcaaagtggtggacgcgtcaaattcgtcaatcatgaaaataggactggagcacttaaaggactgccggagcatcgatacagtcatcttccacaattgcaagcacttggagaacgatggcttggagggacttcatcacatcagcagctccctgcagcgactccaggtctccggatgttacaacatcacggattccggtcttgctgtgatcggggagctcaagaatctgcgacaactgctcatattcgatatgattttcgtgaagaacatggaggctgtagccgcctctctgaaaaaacagcttcccagctgtgatatcaaggctaccaagatgggcctaactctgaagcccaaagaataatccccagcagaacacgaacttattggtttggtccaataaaaccttttgcagtgttgagaaaagctaaggcttgcacagtgggtaaaaattgatttcaataagtttaatagtcataaacctcaaatgaaatgttattgcatataattaactccttcaattgatataaatatatttattgacacatgaactatatatattttagatttatcgattcattgctgaatttgcttatattattaacggtctatagccaacactgtcatatcagtatttttggttgaccgttatacggtcatgttatcttgggaataagagaaaaggacaatatgtgaaaatatcaataaaatgacaaaaataaagaatctgctgagttttgtgacccagtcacgggccatatcgcacaccaatcccagggaacatatacttaactgcctgacctatgggctactagtcattgtggcgctctgcgcgggttttctgctttgggatctctccagcagcccacgggatggattcttccatgggaaaagggactcgcacacattaatcctcgacctggagcacatccaggagcttgccgtaaatccggaggccgaacagcgggcacggaatgtaaactgcaccttctgggactgcctgaacatctacaaatgcgagcacgaccgcctaaaggtctacatctatccgctgcaggagtttgttgacgagcagagcgacaaaacggccaccaccctgtccagcgagtacttccaaatattggaggcggtactaaagagtcgctactacacgtccaatccgaacgaagcgtgcctctttctgcccagtttggatctcctgaaccaaaatgtcttcgacaagcacttggcgggcgctgccttggcttcactggacttctgggatcgtggtgccaaccacatcatctttaatatgctgcccggcggagctccatcctataacactgtgctggatgtgaatacggataatgccatcatttttggcg

SEQ ID NO: 22424 - DNA, 716 bp, DROSOPHILA
taaatacgaaaacgttttaattctttccaaattgacaaactggcatcccacattaaagtgttgcaaaacaacggacgggctcagctgtttcgcccatcgccaaaatgttgttgttaaataagctgcccaggataacgcaactactcgccagagatcccaaggatcagcgaggcatctggggctatgtggctgtcgccttcaaccaggtggacgcggaacgtctgtcgaaagtgggtgccaaccgcctgtgcgccgagtggattattaaaaacggaggcggagtgcgctttgtggagagtccctccaggctgtggaaggattacaactcgttgccgggagagaacacgcagttctgcatcaaagtggtggacgcgtcaaattcgtcaatcatgaaaataggactggagcacttaaaggactgccggagcatcgatacagtcatcttccacaattgcaagcacttggagaacgatggcttggagggacttcatcacatcagcagctccctgcagcgactccaggtctccggatgttacaacatcacggattccggtcttgctgtgatcggggagctcaagaatctgcgacaactgctcatattcgatatgattttcgtgaagaacatggaggctgtagccgcctctctgaaaaaacagcttcccagctgtgatatcaaggctaccaagatgggcctaactctgaagcccaaagaataa

SEQ ID NO: 22425 - protein, 203 aa, DROSOPHILA
MLLLNKLPRITQLLARDPKDQRGIWGYVAVAFNQVDAERLSKVGANRLCAEWIIKNGGGVRFVESPSRLWKDYNSLPGENTQFCIKVVDASNSSIMKIGLEHLKDCRSIDTVIFHNCKHLENDGLEGLHHISSSLQRLQVSGCYNITDSGLAVIGELKNLRQLLIFDMIFVKNMEAVAASLKKQLPSCDIKATKMGLTLKPKE

SEQ ID NO: 22426 - DNA, 3581 bp, DROSOPHILA
aaacgaatcggattcgcggttgtacccaaaagagataagtctgttaacgccttaagattcggtgcacctgaacacttgggcctaaaacaataatagtagcgccctgcttagtccataaatgaatgggcgattgctccgtggaactattgtagaaagacatatctaaatgatgtttattgttccgtctatcccctaaaatgagtttaatcaaagtcttctaacccgttctatgagtatgagttaccatcagactgtgatatgttatgaactaattcatcccatgacttccagaacaaatggttcctacgctttcccaaagagacaaaaaatcgtattaggttgtcagtacctgaatttgttaattgtctaatttacgcaaactaaccaactaacacctacacttattctggattggaaatctactagcatgtagcagtaaccacaactaaaacactaaacaaagtagagatcgttgctcaaagtattatgcaatccaaatcattcaacccgctaccttgctgattccacagattcgaaagattggctcgtctactgcagtctgtacatgcaggactatgactatgactacaagcaccgaaagaactaaggcaagaaatcgggtggagagccttctccaaacagagacatacacagcgtgatataagttagagttgcagaaggtggaacaactaaattatttattaactacaaagctcgcctgctcatcgcggaaaccaaattatgtatagatgccatatggagcgatagtttaggaagtatgtatgatttacttaggctaaacgaatgtcgacaaatatactgtgttaggaatgcaagctctcttgtttaatcgcaataaagaatagtatttcagttgcctttgttttattcaatattatgttgcattaacatattttactcctacatactgtgtaattcgtataacttttcattcccttacatggtaagtgtccttttctacgcgcgtgcttaagaggttggctgagtcttcgctgatcattggtccaatcaaaaaattcgttaggcgatgtcacaatcttcgaatgttcaatccgaatccgacgagatgttggtgcacgaatcgtgagcgatgcgtttgttgatggggttgtagatgccattgagcggatacgggccgcggtagctgataatgttctttggggtctcatggatcttcacctcgtacagcagctccggcttcttcagctgcagacggatgttgtcccagatgtaaacggccaagttttctgtggtgcttggctgggggggatagatataaaggataagtacggtaagttgtgttgtgcttgctggttatttactgtattggcaaagtattcgacatccttatcgagattcttgtggtccaggcgcttcataatcacagtttctatagcctctttcagctcggtgatgtttagcaccattccggttcgccgatcgatgggaccacggacggttatctcaactgaaaagatcacaaaggattataaaagaacatctttcgtagtctattcacacattttttggtataatttggtataatcggcatcgagtcaagcttgagttcttaaggtttagctattgacaatctaaatataatccaaatttctaatcagttgagcacttgcgacactttatgctcgttcagaaccattattcattatcaattctcggtcgccagtcaacatattgattgcctttgagcgttgaacttgaatatggttttgataagcgagcttgtcggccaaggttttgctatggttaggcaccactttgggctcaaattaccagtttagtagggggttaagcctgattgagccggggttatgtgataataagtgtggcactttgcaggtaatcatgcgactaagtgtatttaaggggtatttttttttttacctgtatagttgtgtccgtggccgtggaaattgttgcacttgccgaagacttccagattctcggcgtcgctcaattggggactgaagagaaaatagatgcagcaatcaatttaaatcgaactgaattggtttgccagccgtgattgaatcaggcaattgaatgattcaatttgattcaatctaattacctatggagacgatggcaggcgctgaaagtttcgcgacgggttaaaaaggcaacaggttgctgcgacatttcaagtccgatttatactatatatctggatctgtatctggatgtggatttatatatgcggctgatcagctgcgcgctttggcaatgttttacaatgaatgcaaaacctgcttttgagccgcgcttatttatatggtacttggatcgagggaacaaggaaatataagccacaaatgcggcgactgcgatatcaacacgctcggaactagtttctctgaacttttcgagtgcggctaattgcagctgattagcgattgatgttccctcgttttctgttgcaagtgcctatgcgtgctgcaaagacagggtgtggtatgctatagccatggtaacaaactcaattcagcaaggaactcacctttaattgctatggattttcaataatatttacttttgtctacgttgctcgtcaacagctgctcccgataacaaggcagcgcgtatcggttatcggccagagctgagcagtttgccgccacaactgttctcagtgatttacaactgcacaaatagactattgtatgggtagaaatccttacactattacaatttcgctatatatttatttatttcatgttagttctttgtcaattatctcataatttaaatgagctgattaacagagttagctaacagagtatgtaagtgctgttcatccctggctcgtggtggcgttgccggacctcacgccgctcactgtaatcaaccctgctttgctatcgatcgccgcccttcactagaaaaaaaataacaaacgacgccgcgcaataattcgaaactcttcggcgttatttaaaaaacgagcagagatacctaaataataatctagacatgagcaacaagagcactccggtgcggcagcgcatccagcagttccagacgcgaggagtccacaaatccacgccggcatccgagatgcgcaagaaggtgctgatgacgcgggcggaggatcgggagcaccgggatcgtcccgaacagctgctgaacactgcattcagcgggagcacgccacagccgaagcccaagcccacggccctgaatgcctgctacacaccctcgtcgctgtacaggaatgcgaactctactcctggaagagcaaagacgcccggcaccgggaaatccagctgcagcaggacaaaggagcgggactctctgatggagtcctgcctcagcgtgtccgaggagagcaacatgattgtggcggtgcgagtgcggccactgaatgccctggaatgcacacgtggtcaggtcaccaatgtggtccaggtgcacggaaacagcaacgagctgactgtccaagcgggcagcagtgctgatgcctccgccggcgtgacgcacttcttcagctacgaccaggtctactactcgtgcgatcccgaacgaaagaacttcgcctgccaggc

SEQ ID NO: 22427 - DNA, 914 bp, DROSOPHILA
acgtagacaaaagtaaatattattgaaaatccatagcaattaaagcacgcataggcacttgcaacagaaaacgagggaacatcaatcgctaatcagctgcaattagccgcactcgaaaagttcagagaaactagttccgagcgtgttgatatcgcagtcgccgcatttgtggcttatatttccttgttccctcgatccaagtaccatataaataagcgcggctcaaaagcaggttttgcattcattgtaaaacattgccaaagcgcgcagctgatcagccgcatatataaatccacatccagatacagatccagatatatagtataaatcggacttgaaatgtcgcagcaacctgttgcctttttaacccgtcgcgaaactttcagcgcctgccatcgtctccatagtccccaattgagcgacgccgagaatctggaagtcttcggcaagtgcaacaatttccacggccacggacacaactatacagttgagataaccgtccgtggtcccatcgatcggcgaaccggaatggtgctaaacatcaccgagctgaaagaggctatagaaactgtgattatgaagcgcctggaccacaagaatctcgataaggatgtcgaatactttgccaatacaccaagcaccacagaaaacttggccgtttacatctgggacaacatccgtctgcagctgaagaagccggagctgctgtacgaggtgaagatccatgagaccccaaagaacattatcagctaccgcggcccgtatccgctcaatggcatctacaaccccatcaacaaacgcatcgctcacgattcgtgcaccaacatctcgtcggattcggattgaacattcgaagattgtgacatcgcctaacgaattttttgattggaccaatgatcagcgaagactcagcc

SEQ ID NO: 22428 - protein, 168 aa, DROSOPHILA
MSQQPVAFLTRRETFSACHRLHSPQLSDAENLEVFGKCNNFHGHGHNYTVEITVRGPIDRRTGMVLNITELKEAIETVIMKRLDHKNLDKDVEYFANTPSTTENLAVYIWDNIRLQLKKPELLYEVKIHETPKNIISYRGPYPLNGIYNPINKRIAHDSCTNISSDSD

SEQ ID NO: 22429 - DNA, 3366 bp, DROSOPHILA
taaaagctgccattggcaatccggttgcaaacccgcccaatggttgctccaaaatacggatttctctcgctctgatagcccgccaaatcgtcaaatccgagggtcacgtcatctatttgaccgctggcatcaggcgtctttatgctggtaatggtggctccacgggtgatcaattgcacggacattccagctccatttgtcagggtgaaccgcttgatggtgtcctttgacttggtgaacggattcaccgctccgttggcgaagacgtcttccgtgacgttgaccattttggatccggctgcagctgtggaatgattacgagtgccaattgcactgcgtttttatctgaccctctccaagccgtaaaggttaatcagcactcgatgtgcgtatgtgtttgttttaattatcgcaaaaaagccgcaaacaaaatgtacatatgtacgtacatatataaacagatctagttatcacaaattggtgggaaagtctgcgataagggggatagacaccttgtggagtctttaagaattgtgcaatgttcgtattccaaatttagcggtaattcagaaaattcttacttaaattatcttttaatcgccgtagttgcaattcaaattttagagttgccttacctattttagaccagctgtttttacatgtgcgtagtaagtaaaaattcgcaggggcttgttttagtagttaaaaatttgttggtaaaattttttgatatttgcttattaagccttttaaatagaacaattttattaacatacttgaatacaatatacatttttttatatatatgtttaaatgcccatctttgctacacagtggtggcagttgcaaagatctggcagccctgctctagaaataccacacagcaaatagtccacctctaagcaacaggtcggttgtttattgaattcgtttatttaactttatgggtagtttggcaaatagaaagctagctaaccggtgcagttaaccctttttgttgacagagagctcagaggaaacggcagattagatccccctgagttcatccccacccaggcaccactaatccgacgagtataaatcccaaaatgcaattgacgtggcagagagatcagataaatctagtacttccgattgctctgatttgttgttgtcttttgatcgacgtaaccagcgctcaggaggcccaacaaccatggtacgagaatctgccagcggtggccatggactataaggtgtgtgctgattttaagactcctctagagcatcaaatttcaccgggaacgtggtttctctttcaggttcacatagatgctggtaaggaggactgctaccatcagtacgttaaggcaggagccaccttctacgtgtcctttagtgtaagttgatagaatttgggatcaatagcatgtttccgatccaatggatgggtttccccttgagcagtctgtgatattctaaaataaatcaaatcgaatccattaatacagtaatataatctatctaatacaatgaaattattcatataaattttttttaggtggtgcgcggaggcgatggaatggctggtttcgccgtccgcaatcctgctggtgaagtggtgaagccctaccagtggcaggctactgcggactacacggatcaggtatcgcccggtggctactactccgtctgcattgacaaccagttctcccgattcgctggcaagctggtcaacatctatatcacggtggtgaagtacgatgcatgggacaagtacgccaaggagatcgagcagctgcagctgaacatgcaaaacttcactgtaagccaaactggttttcagacacacccaaacatccatttacaaatattcacattgatctatttctttaggccaccgttggcactgtggagcgcaacatcaacgatatgatgggctatcaagcccacagtcgtcatcgcgaatcgcgtgattatgcgttgctcctggacaacaatgcctatattcaaaccttctcgattagccaaattgtggtcatattgatcacgtgctctgtacaggcgagtatagacatgttttttgcttttcctaaattaataacctaatatttgcaggtattctttgtgcgcaaactatttgaagtaaaatcgagctccaaaagtcgcatctaaggcgcaaagatacttttcaaagacttcgcaacatgtttctaaaattccatccgcatttccaagacattcattctattctacctgctgaatgagtttttgtaacttattttatcactggctaattgatcaagcgcaactgagcagacttttttataattgggactacttatgtcatacgagttatagacagcaaaacttattgtgataagtgtacatttgtgtgttttgtttaattaaaagattgaagatttttgtatttgctttgttttatttgggaaagaaccttaaggatttattcgaagccatttgggtttgttaatttactaaaagctctacaagctttaaagttaagctgctttggtaagctcacttaaccgttaaatttcattatcctggaaaggattttaaacttaaaaatatataattcaggttgttgttttaagaaacctgtttttctttttatatgggagtaagttattttcaaattacgacattgttgcaaagacatcttctcgttgcctaaaaccaatcttaaatattaaatacatgctgtacatgagctcattagtttaaattgagagctgaagacatttcgaagacattccacaacttgggctggcaaattaatcaccccgaatgccgcttatcgcaaattatcctgccccatccatcgcaggaccttaaatcatgtcaccaggctcaccgcttatctagacgtcatttagcacatgtgtgtgtgctctgcagcagctggcatgttaattatatcctttttggcaggcagcaggagcatctgggtatcttggcgggtcttttgtggccactgctgctcgaaattaaaatgttattatgcgaggcttatctgcgggccttaaagccaccgcaaaactaaggtcctaatggcctcgcacaccagcacacgctctttaactgttttaaacgccattgttaaaatattgctcatacgcacttccgcccaaaatggggtcttctctcttcggcagcactaatgatgccccaagaacgcggagcaaaggacccggcgaaaggcaggagcatccacagccatagccacatccacatccacatccccgatggcacagagttggctccgcccaccagcagccgatgacagcggcagataacagagcagcggcaaagtgggcggtggatggggttgtggtgcggagagcgcgcctgcgcattagccgc

SEQ ID NO: 22430 - DNA, 987 bp, DROSOPHILA
acagagagctcagaggaaacggcagattagatccccctgagttcatccccacccaggcaccactaatccgacgagtataaatcccaaaatgcaattgacgtggcagagagatcagataaatctagtacttccgattgctctgatttgttgttgtcttttgatcgacgtaaccagcgctcaggaggcccaacaaccatggtacgagaatctgccagcggtggccatggactataaggttcacatagatgctggtaaggaggactgctaccatcagtacgttaaggcaggagccaccttctacgtgtcctttagtgtggtgcgcggaggcgatggaatggctggtttcgccgtccgcaatcctgctggtgaagtggtgaagccctaccagtggcaggctactgcggactacacggatcaggtatcgcccggtggctactactccgtctgcattgacaaccagttctcccgattcgctggcaagctggtcaacatctatatcacggtggtgaagtacgatgcatgggacaagtacgccaaggagatcgagcagctgcagctgaacatgcaaaacttcactgccaccgttggcactgtggagcgcaacatcaacgatatgatgggctatcaagcccacagtcgtcatcgcgaatcgcgtgattatgcgttgctcctggacaacaatgcctatattcaaaccttctcgattagccaaattgtggtattctttgtgcgcaaactatttgaagtaaaatcgagctccaaaagtcgcatctaaggcgcaaagatacttttcaaagacttcgcaacatgtttctaaaattccatccgcatttccaagacattcattctattctacctgctgaatgagtttttgtaacttattttatcactggctaattgatcaagcgcaactgagcagacttttttataattgggactacttatgtcatacgagttatagacagcaaaacttattgtgataagtgt

SEQ ID NO: 22431 - protein, 228 aa, DROSOPHILA
MQLTWQRDQINLVLPIALICCCLLIDVTSAQEAQQPWYENLPAVAMDYKVHIDAGKEDCYHQYVKAGATFYVSFSVVRGGDGMAGFAVRNPAGEVVKPYQWQATADYTDQVSPGGYYSVCIDNQFSRFAGKLVNIYITVVKYDAWDKYAKEIEQLQLNMQNFTATVGTVERNINDMMGYQAHSRHRESRDYALLLDNNAYIQTFSISQIVVFFVRKLFEVKSSSKSRI

SEQ ID NO: 22432 - DNA, 3330 bp, DROSOPHILA
tccgctaattaaataactaaaaaaaaatagagtttataattgcgcgctttgttcattttacaggccaacttttctgctgttaatccgaccaaaatgagccgagtttccgagttaattcgaccgcaaatcggtagtcacttgaactttcgttctggcggaaaatcacttgaattaagtaattaaaataaaatggaaacaagcatttgttatgagtgagcaaatgaatatacacacattctatgtcgcgttagaacaaaatttaatttcgtaacatttaaaattttaatactacatttaataatttttaaaaaaatgttaatcaatttctcctatatttccttagatatcaactataatctttaagtccaatagcattttactgggcaaacagacaaagaactcactccataagtttgttgacttgcgtattcacacatttcacattttcaagttcaattttgcgcaattagtaaacatttattgttattattattattttcttcggcttcgaatcgtttcttcatatatttgtatatacacatgtcagtgctttccgtggtgtgtgtgcataataaattaacgtattttttatcgcttcaatgataaaccgttttgcttgattggtctaaggcgcataaataaagaataaataaagcgcaacaactgctttctgtgttattgttgctccttttgttgttcgcgttctttgataagcgctaggcgtgtgatatcagtgatatcatatgccaaatatcgtatcctagcactatctacctgattttggttgtgctggctgccagcagtcaggtgaatttgagttttaagctcagctgatcatgaaaataaacttaagtgtttactccttggaaatagtttgtatcttcatccaacataaaaaagcaaatatagtattaaggatacatctcagtagctttttaaatcagtttcacaaccacaaacagacatatcaaaacagttcatatccaaatatacttcagtcagtttgatacacaaatcacacaacaaagtacaaaaccattaatttttaccaaaaactttgtaaacaaatgtgtaaacagcagaattgtcttcatcagaagagctgaggtaagccgacagtagaattgctcgtttagtgcatttcgattattaatgaagattgcttcaacaacccaattcttctcagaagtcaaagccatacaaagaatcaacaagaaatacaaatgaatctaacgaagtataactatcgaaagtctaaatataataagtctcgcattttgaattgcgataaattgagaccagaaaatctgtacatgaattgcgtcgatgttaaaggcaaactttatagcctatcgctaaaaaaacatcattccaaacgaaataaacgtcttaaaatcagatctcttcgatccgaaaagtataaattttcgaatatatttaaacgcaaatcgcgaaggcaaacagctaagaatactactgataaggggctaatggattgtgacgtaaatatggaaccttcacgatatgtgccgcccattacaaatccaatggaaaggatcagcgaagccgggactaaaaatcaaccgcataagttggaaactgagaaaccacgacgactgcgcggaaggccgaaaaatattgtgaaatcctctagtcttattgcttcagaccatcgcaaggaaaatcctatggaaataaacgatgaacagaagactttcacaaagatattaaagaaagtaaagctcaaggtcgacgattatttgaaggacatgaagctggctgctgcttttcgcaagcaacagaaaaagtcgcagctacaagttagtcgccgaaaattaggattagctaagcagcgtcaactaggacgatccaaaaaggattcatcaaaagtgaaggagagacaaatggatgagcaatcagtggttatacaacaaggtgcggggattcgagctgcaaaacttaaaaaggaccagcagctattggaaagaaacgtgcaggaggataaaaagaaactgaattccagaatttcaatggattgggaaaaattagatagtccagaaaaggttaaagaaccacccattgtattacgacgcagtgcccggattcaagcggcaaaactcaagaaggagacattggaagccaatatgagaaagagcaaacaggagaaagtcagtactactactaaaacggtatcgaaacctagaatcactcaactagcagtgtgtcgtttatgtcctaattgcaattctattaactatcttagtccgccgtattcgaatacatactttgaatgcgccgatataaacggaaggctctataaactaaattaaatttattgatgatatgtaaatgggcactgatattcgaacgaaacataagaaagtagaagcaacaacatataatataatacatatatattatattatacaaaattttcgtgagcatgcaaatgcatctttaagatttttatatgtgtccatatattggttatttataatataaattcataagtaaaacaataaatcgagtttttgtatgtttttttccggtattttgcccgttttgtgtggcgctaatcttatcctgcaccagccaatttcccagaatagccattgcgaagtgtttgttggtgatatcatgcctgagtacgagtgacagacttgcaccgtttttttcaggccttccgaaatgcgcgcggttatcaggcagatgataaacaaatcgccccctgatatcgcgcttttttacgctttatggtgtttgtcaaactgggaaggcctcatcgcactagcggaatatggtatcgccagttagtgtaaaagacgttggaagactgacgtccaaagctggatctctcaccttgaaccaaaacgacgacttgtaatccccgcgacttaagctgctcgtatattcgagtatctgtatctgtatctgtatctgtgcatcagataaaagcaaaaaagccgcaggaggagagctcaagcagcgcgttcaaaattaatctgcggcggcaataatttctgattttttgtgctctcatgaaaatcccaagcatgtcaaattgtattcccattcaagatgcaaaataaagaaaaggaataaaaaaaaaactaaagctggcgggaaagaaagaaaaatgctcacactgagccgactgtcaagggatcttaaacgcagcgaaggaaaaagttaagaaccgatcctgcttaagcagtcttacacataacgaatgttgatatgaaacatgacatcgactatctgatgacctgtacagaacatacttacagatacatttaaggattgtatactaaactgaatgtcgcttttagt

SEQ ID NO: 22433 - DNA, 1251 bp, DROSOPHILA
agtttgatacacaaatcacacaacaaagtacaaaaccattaatttttaccaaaaactttgtaaacaaatgtgtaaacagcagaattgtcttcatcagaagagctgagaagtcaaagccatacaaagaatcaacaagaaatacaaatgaatctaacgaagtataactatcgaaagtctaaatataataagtctcgcattttgaattgcgataaattgagaccagaaaatctgtacatgaattgcgtcgatgttaaaggcaaactttatagcctatcgctaaaaaaacatcattccaaacgaaataaacgtcttaaaatcagatctcttcgatccgaaaagtataaattttcgaatatatttaaacgcaaatcgcgaaggcaaacagctaagaatactactgataaggggctaatggattgtgacgtaaatatggaaccttcacgatatgtgccgcccattacaaatccaatggaaaggatcagcgaagccgggactaaaaatcaaccgcataagttggaaactgagaaaccacgacgactgcgcggaaggccgaaaaatattgtgaaatcctctagtcttattgcttcagaccatcgcaaggaaaatcctatggaaataaacgatgaacagaagactttcacaaagatattaaagaaagtaaagctcaaggtcgacgattatttgaaggacatgaagctggctgctgcttttcgcaagcaacagaaaaagtcgcagctacaagttagtcgccgaaaattaggattagctaagcagcgtcaactaggacgatccaaaaaggattcatcaaaagtgaaggagagacaaatggatgagcaatcagtggttatacaacaaggtgcggggattcgagctgcaaaacttaaaaaggaccagcagctattggaaagaaacgtgcaggaggataaaaagaaactgaattccagaatttcaatggattgggaaaaattagatagtccagaaaaggttaaagaaccacccattgtattacgacgcagtgcccggattcaagcggcaaaactcaagaaggagacattggaagccaatatgagaaagagcaaacaggagaaagtcagtactactactaaaacggtatcgaaacctagaatcactcaactagcagtgtgtcgtttatgtcctaattgcaattctattaactatcttagtccgccgtattcgaatacatactttgaatgcgccgatataaacggaaggctctataaactaaattaa

SEQ ID NO: 22434 - protein, 368 aa, DROSOPHILA
MNLTKYNYRKSKYNKSRILNCDKLRPENLYMNCVDVKGKLYSLSLKKHHSKRNKRLKIRSLRSEKYKFSNIFKRKSRRQTAKNTTDKGLMDCDVNMEPSRYVPPITNPMERISEAGTKNQPHKLETEKPRRLRGRPKNIVKSSSLIASDHRKENPMEINDEQKTFTKILKKVKLKVDDYLKDMKLAAAFRKQQKKSQLQVSRRKLGLAKQRQLGRSKKDSSKVKERQMDEQSVVIQQGAGIRAAKLKKDQQLLERNVQEDKKKLNSRISMDWEKLDSPEKVKEPPIVLRRSARIQAAKLKKETLEANMRKSKQEKVSTTTKTVSKPRITQLAVCRLCPNCNSINYLSPPYSNTYFECADINGRLYKLN

SEQ ID NO: 22435 - DNA, 20261 bp, DROSOPHILA
tgtcccatttgcacattttgtttcttgttatctaacttaaccatagccacctctctaatgaccaatttggttggtattcttgcagatctaactgccgaagccctttcgccactggactcctttctggacctgctgactgcgaaggccagtctaaacgaattggactacaatctgcttattgaaactactctaagctccatcgatcagctgaaactggaggcttgaatttaatgttaagagtaactaatgaagtattgtgtcaaattatcaagtacttagccaaggccagtttgcaaatattccaaagatttgatttgtcaaatgtattagttaagattcttctcgtgcagctttgatttttgttagggttcttctgtgtgcttttagtattaattttctgttcctattatttgtgtaacgactgatacacattccaagtctgtaattataaattatttatgttgttaattgatgtacctaaaatcatgtacgtatttatatattctgtacttatttattttatgcttctgcaagcttctgtctctctttctgtaataaactaacgatttataaagtataaaatgtcgtaatgtttatttttggcaacatgagtttaattcgaaattgaatcaaacacaataaaaaaaagttaaaaggttaaaatcattatattacatcattaattcgaattcatttgggaagtttgtgggtctattttttaaactttatatgaatgtttgtttagttaatttaataaaggatatcgaacagtatgccagttttggtatttagccaattggagatgttcgatgagatgttcgaactgcaaccgagttcgaggttccaacacgactgttatacgggttccagccttcaagttctacagaacaagtccacgagcgccacacacagtccacagtccacactccactccgctcggcgtggaagccattcgcttcgtggcgaagtgtttgtttatccagttgacagtttgtggaaaatcgtcacggtgagcggatcaaacgcggaaaacgaacgcggacgaacggcgagaaaagcgaggaaaaacgggtgcagagacagagactgattgggaaatatgtgcgcctgagttttcccggccagaaggcaaagtgccaaatgctctgacaaataattcctgtaataatcagcgcgattgaaatcaacgcgacgctcgtaaaattgcaaatgcagcgcaaaaagtgaacagcagtgcagcggaaattaaatcgttttagcgagtgccaaacgggaaatagaaaatcggcagagtagccgaactgcagttaaaactatctcttcctcttattgcgactaaacaaccggcggattaatcgaatccgaaagatggcccccaacttgctaacaatcggattacttttgaccctgatcgccagcggtcaggcccatctcaatattttcctcaacttgcacgaggtgctgcgcctaatcggtaagtaatcgtgttgattttcgcctgccttttggcttttcaattaactgggcaattatttgccactttgtgtgcgttcgttcgactttaaatcaaatttgatttatgccaagccgggattttgtctcctgggcaaacgaatgcgacttgctgggattatttactctttttgcgtaaataatatatgccttttaattgtttctagcctcggagctacatataaagtagtattgtccctccttcaattggccagctcaccgagaaacaagaaaacattctatttgtctagcatgatttcctgtttctttgatttaattgttcgttagacttatctagataaatagaaatgctaaagcgatttaaatttgtatttctttgcgttaaattaaattcgattggcaagtggattcatctctagataagtaatccctctataatcaaagtttttatttaaaaaatcatattttttcatagtttatccaatttaaaacaatacaaaacaattttagatatattttataaacgtcttcaaaagaaaataaatagtaaaatcatgtagtcaaaaaatgacaccaaaatgagtatttaaatatttagtttagtttagtttatattatttatttagcctaactattttccatagaagaatactactctaataagcttaaaaatccgagtgactgattcttagcccttatcaaaacagatttgtttatctccatctaataaccaggtttccacttggccaagcaaatcggcttgggatagctcgagtccgcagcccaagtacctttaatctacttttatatttatacctcgccccgatccccatccccaacctcgtcttcttggacccaagccattccccgccagaaagaaacacacacaaatcctgtcgaagagattgccaagctaataaaagtggggaaaattgttttacaatgtgtcacagggcccagacaaagaatttacaacccagtgaatataaaaaataaatcagtagcctcaatccatgggccaaaaggaaagggtgaagcggcccaagttgtgccacatccatgtggcatcataaaacacatgcaaagtgtttgttttgtaggcagtgtgttctgtggatcgggggcgcagggagctgtatagctgatagggaaaaattatcaaaaattatgttgtaaaatttacaacactcgcgtgtttgtgcctccggctgattgatgggcgtcaggagtttcggagtgcggagtgcggagtatgtaggtacgcagattgcatcgcgtcacttgtgaataactgggtaaatatttgaactgcagtgccgggctgctaatcaggcgcttatctagccgcttatcagcgtctgccactcgtcgtaattcatgtttgattgcagttctggcccccgagtcctggctgctccactacacacctcgcaatcagttgaaagcgccagcagacaatcaatcaaaggcgatacggcaagtgggtgggatggtttgctatgggatggatggccagttgaggctttccacttgacatggcagcggaaaatttattagttgtgtcagccgagtgtcaaacgaaatcagcattaaaacccattaagcggtggccgctattcatttttcgcccgattcccgactcctccaattgcactttccccagagggtttttggtttttggttttgggctttcgggattgggtggcgataccctctccaattattcagcgctgacagcgggttgcatgcctgacctactttccgagacttcactgtgtgtgtgttcgcaacgcctggctaggtgtcactctattttattttatttcactttatttttttagcggtcgcttcaaaagcctttgtgtgagtgcacatcaattaaattgtcaacccaggagcagagtgaaggagaatcgcccaaagaagagctccatgcacttgcatgcagctgcggcatggcattcactgttcgttaggctaacatccatacccgaacacatacccatagcacacatgttccatcccatggcccacccacttctccatccagaagtgcgccccaaattgctgtgctctatgctatgcaaaccatgtcaggtgtggatcaagccgggcggcggtggcgagggtcttcttggttcggtggctctgtggcccagctcgttagcgaaatgagcggatatgtaaagtcggtgcagttgatggattttgcggttgcaatgagtgaccaaagttgtcggcgttgggtgtggatagtcaagggtaacacgttatctaaagggaactaccattattccatcttaggacactgatctcccaggctttgtggcaccccactgttaatggcaaggaaagcaattaaattcatatagccagaacctataacatcctataacattcggaaaacttttcccccgccacacacttggctcaatggggcttttaactttgcccaactttgtagccctgccagctgtctgagcagatccctccctaatccatgtaacccatggatgttgccagtcacgtttcgggtctgtctatcaacacttgctaatctcaaccccatcccaactctctaaatggtttgacactttcaactggcgcgggtcgaaggattcatcatctcgaaatgaacatgatttgccggcgaacaatggcgattgttgccaactcacgtttggctaataaaagcaagagcatttgcccccaaacgcaacatatttcggcaagtaatgtgaactcaattagggcgcagcagcatcatcgccatcatctgcatcccaggatttggcccagaagttgtagtgaaatctctggcgtgcgtggccaaaaatatttcaccctcggaataattaatgctgcagttggaagcgaaggcattagatctgcccgagcgtgcggcatgtgttgccaacttgccacgccaacacaaacaagcggttgcccctgccacctgtctcctgtctacacggcgaaaaacatttactcagtacatcaattacacttgtacttacttattatgtttgtgatttaaaatcactcttgagtgcaacgagtacacaatgatacttttatctagagagtttttgatactcttttgctacttttggaattttcgctgcgtgtagcgatccattcagttgccaggttgttatgtctggcttcatgcagagttaaacgcgtaattggcaaatgaacaacgcggacagagacaggcggcagaaatgtcgatgcaacagtgacaaggacgacgacatcagatgctgcagcaacagcaacatcaatcgatgcaacagcagcaactgcagcaacttctgtgccaacagtatgtgcaacttttcgctggtcgggaggaattttatgctttcattcgaaattatataaatcatataggaaaaaggatataaaaatatatttgaatatgaacaaatatagcaaaatagtaattaaatatcgaattgattatggtatacttagaaatgtcttgtactttctgtgctaatgatacgtataattatcttatgcatgagagcacaaaatttaagttctagattagtttttctgcgtgcacttccatcccccacccctcgattatggctagtcattgtgccccttctggccatcacttcatccccgtgtgttgcacaatattactatgcatcattaacaaaaaatcggttatggttaggcggcaacgcctacgtaatttaagccaccactgcgcttaattaaatcactaaatcatttgcggatgttgtgtttgcttgattattgttcagggtgacaattatagcaaattatcatgagcaacttgttgttcatcatgcattcgcacccacatacacacacatgtgcacaaatgcagattttccagtcaaaatgttaaagttttcgaaccaaaaaaaagtgcagtaaacataaactaacagcttatggggagtttacaataaatggaggctttgaatgttttatggtgcctgcagagcaattttctgtttaaatgtaatcggattccacaaataaccctttataatcttacatgctttactgcaatttacgatgcaagctgcatctcgtcgccaatagccataaaatgtaataattatatttgatttatttctacatatttcgtatattatgagagaagcccttacgcataatattagattcatagcctatataatatgggtaatatatatttaaaaagttcaataaaatacaatactttttgtattgtaaatacaagtttttgatgaataatacttaatatacccaagtgctcacttccctgtcaatctttataatttgtagcatggaactgaacccaaaaaaaggccaaaataaaaagagcgaaaccgaattaaactatctgtaattgctttgaagcagcccatttatccagctttcaattaaactaaatttatttaaattaaaatcatatttcacattccaattcagcagcgccacaaattccccaaagtgctttcacatatcaactcgattttcaccccctcagtgaaaaagtgaatttcctcagtcatatctaaagtgcttcaatgctcctctgtcagtcggtccggacttgttatcaaattaatttaatcagtttcaattgtttatgttcttttggacttcttcttgctgggggatctgttttcggttgcattttcttcttcagtttttttttttcggattttgcatgattggtggtggtcagacacgaaatgggagagttttccgttgccgcccattttcccatacccctcgaatgaagagcagaatgagttgcataactttcagtcgacttcagagtttttcccaattttcggttggcgtttatcatttggtttttatgagttcttttttttttcttccgccaattatgggcctagacaaattgttgcgtccattatgcggcggatttaatggccttcttcgatggcaaacacatgtgggcgatggaaaaacttgctgggctttcacaagaacgagctccgattgcgtgtggggattaaatcaatggaaaagcctcttctatttatgctaatccttgggaaaatgccaaaatcatcttacccgcgcacggcaagctcaaatcaaataacctctgggccaaccgaaagcgaggaaaactccagcctgagggcaattaagccggaggaaaatcactttcccacaatcatgatcggtgattagcagggggttgtccgttttaatcctgcaaatgcatccactaggctgcaaataaaatgtctaaataaacaaaggccaatgcacgcgaccaaaaagcaattgtatctagtggataccaacgcatccaaccaaccctcccctgtcccgtacgacgaagtgacaaaagtcgcacacaacaatgtcaatgacggaggaggggcattggaaaggtagcaacctttccagcggcacgacgtcgctacctaatggaccagaaatgcgtcgtgcaaacaagcagccgcaccgggagcaccaggagcaccaggagcaccgggagctccccctagaatcacagctcggtgtccctgaccctcgtcctgccgtcgaactgcgtatgcaaacaaacgggcgcagggggaggaggactttcgcccggaagcgatatgccggccaggatggctctgccactgaaaactgaatgaatagcaggcggacccggcacttgagcacgccgtggcttccatcccaaccctcctcggagtcagcgtctcgaagcctgttccacccctggcgagcaaggggtcctcctcctcctgctcctcctcctcctactttcaaccctgcgtgcaacccgcgttgagtgctttatttgcaaccgctggtggcaggggtgcatgtggatgtggatgtggatgtgcctggccaggagccttcgcctgcaggcgaactgcaggctgacattaccgatgctgacagcggcacagtggtgtgctgtcacaaaaacaagttatattcacctaaagaaaaaatcaatatacctgtttattaagctagaatgcataaatgcgtttatgtaatgcgtaaaacttatggaagacattttattatgctttgtattttacccacccttcgttccactgtcatatgcttgccatattttttgattgctggcgaattccggcgggcgcctcgacgtcctcctccctttccaaccacctcttcgcttcccaccacccctgggccatcttgacatgactctcgtaatgagcccgtaaattattttttattattttgtatttaattttttcattgcccgcctttgttccttggcacaactcctttgctttcggacgaccgacaggaagcagaggaaaaaatgccggcgcgtgtgtggcatccatttgatatgagagaattgattgtgggaatcgaatgtggtgtttccgtcgcatggaaggaggaggaggaggaggggtggtaatgaacggccaatcgatattcaacgagatggcgaggcacaagtcgccactgaagaagcctaaatgaagcatattatgggtctgtcggggaatccattaaccaaatgctaattactttccgcacaattatgtgcttcgagctccaaaaatccataagcacatatttacccagtgcagcttattggaaaatttcacacgcccgcacaacagaagctaccatggatgcagtagctccagcttcttcccacgcacagggaagagatagcgaaagtgggggactttccctctacgaaaacacatctggctgattctctctgtctgtgtgcatgtgtgtgtgtgtgttctgataacatggatggcaattaaccatattctggagctcttaagagcccatgaaaaggcgatatgcatgtgggggccagtaatgattttcttttgggggataatctacagattgaactaacagctgagtgggggatcgtatttatactgcacttttctatcttaaaaaaaacagtagttacgggtatttaacccaggaaaacatgagctattgaaaggtgtgaaaatttttgcatttcaaatacttcaacttaaagtgctgtttaattatggaacttttcgaaatatatttaatgcacaggcaaaggcacgtgaattttgtgcatattatacattaatatttccatacaacaacagttggggcacgaataaaagcattttatgagccgagtggaacacgtttaacaaaacttttgaaagcagcttaaacttgcgagcgttattctttggcatcataaaaacaaaactttggtccacagccgagctgaaactaagtcccataactcagacaaacaaatttcgaaactgcagtgcgttcgattgccccaaatttctgcttttttttcttccttatttccttctgtcagttgggaatgatggatctcaacaccctcggacatgtgccaatcgtttggcgctaatcaaaatatatttcactcttcgcatgaggctatgtgatcagcagacatggcctggcctatataatttatgtctgcaattgacgacagtgaggagttcctgttttttttttttttcatcatcatcatcagctgcgttcgtaattttcctgtcacgcccgatgaaaactgcacatggcacgtgaaggggaaggagacagccgcagaatcctgattatgttgcggtttattttaagtttaattaggcgatgaagctgagtatttataaaattcatttactgcgagggggtttcgactgattcgctccacggcgaatgcaattcgctctgcgttcttccgtgaattagtcgcggttattatcatgtctgtttcatgatatgtgagtgcttttgttggattctcttcggtgtggagcgtgaaatgtctggtagttcagggggtgagtggccattggcaacataatcattaacatatttaaatgtaggaaaagccaggaggggttggctatcaatgaataaataagtgaatgagtgtgtattcaaatgtaaatctattaagtgagcggaatgagctacttgaagtgaatttcttttgagtatctaaatagagaccattcaaaatttcaggcaattaagtgtcatttaaacagtttgtaagccattataatgtttactaagaaggattatgtattaaatgaagttgttacctgttgtccgcttgcatttttcatgttcttgttttcatagtacgtcattattatgcttaccacttacccacttaaacaaacatttatttaacgtccgtctaattagttaaaagcccccgcatacaattatctcaccgctaagctgtgctaattatacagatcttaacatatggatgtattttttccactttccacttatccaccggacttgatgagcaaagcaaaccaccgccaaacggagcagagggaaaagcggtgggaaaagcagagggaaaaacttctgattcagcatcgtgtgtggcaaagtttacactttttggttggattttccgttttattcttcgcccttctgcatcgtcacgtttacaagatgatagagccttaaccacttttcaacggcgaatgaaaacaaaccagagtccaaaaatatatgtgcgtgtgtatttgcttgacccaaaaaacactcgaaacaaacaaagctgaaaagtttccgaagggggttacaccagccacttttttcggtggggttttttgggggggcggcatgggtgacaatgtccacttcagtggcagcaacgcctacgccaatgcaacaatgctaatctgctcgtcctgccgccttctgctcttttgttcttgtttgtcggacgagcagctggtccgcaacaaaaaagtcaatactactggaggttcaagagctcctctcacacggtcagagtcataaattaccgcatccctggggtgctattgaaaaatatgtgcgtttcgctccctgacgatccgcctcggccgctccctccactgtttgtttgggccctcaacgatgccccgaggacgaggaggctcctccggcgttggccaaaaaaccgactgccttgtcaaaattgttcataaatttttggtctgaaatttcagcacaggaagttgctgtttacttagctcactcacacacacactgcgtctttttgtcttttgactgcggaatgggccacccatggcgactgaggctgtatgcatatccaaatccacagcacacattaggagctgacccgagcagacccagccagtaaaccgcagggcaacgcttggggctccatctttcagccaggtggtggagattttggaggtggtgccacctgtccctccccccagagaacccagtcccaggcccagaaaccccacccatggccaatcctaagcagaccatttgcttgtccctgtctggtggtctggtggtggtcggtccaccgccctcgctttatgacttaccataaattttatgacagcgcctagacaccgatatacagacggattcggagatccctcagccagaggtgataaaaatttcattacgtcacgcaatgcagctcgagcaaaaaggctaacaaatcacactgagagaaatgacaattagtagggttacgaaaacttttcacatagtaatgcagttcctaagtagttatatgcccaccttttctgcggaaattattcaccaaacaaaataaacccattcaagttggaaattgataaaaaaaacttggcaccagtggcaagttaatggcagaaatccctgtcgagggtggagcccggaggcaggactgatggatgtgggcgggtcttgccgcatgaactggattccccgttgtcttcgccaggtgtcggttgctatcgctcggataataatcacattaacttctccagataatcacattaaatttaagagctcgcccgttaatgctgcctttgattttttatgagtcaataagacttcacttcatttcagttcacttcactccctatcacgcctttgatgaaggcaacagccatctactaaccctacatttgtggttccactgcgcacctgcccaagtgcccgtcgaaggacctgctccttcgtatcagccaagtagcttgagcattagattaattaccgattagtggtagaataattaagctgtttaattgccttgacccaaatgggtttcagtcaggaaaggtccttatgagtgagcttcgaaaatcgcttgcgtagagcctgaataaaataactggaaatcgttgggcgccagttgtagagaaataatagcggagttttgtctaactatcctttttagggctcgcaaatcgtagtctttctctttgtatataatacaattttattaaatagtatcccttggcaccttggatggagttcaagcataaaatgcggtaattaactctttcttgatggttagttcaacacacatttaagactattggaagagcacaaagcaaggcaatatagtttcgtaactagttacgatctttgctcctttacatttttaattgaagttgaagagactcaagtaacgaggcttaagaatatacattcttccgccccaaggacaggcaaacgccataaatgtaatgcgtttctcttatgggcctcgtcatagagatccaacaacagttggcaacataatttatgcaccacagcccgcctcctgcgcggaatttatcgtcttgaccagcggagagcatccatatccatcgcaccaggccgcgtcgaggtgataatgtaagggaaaacacacgagtggggctcgggtggaggtagcatgtgtgctgcaggcgcatggaggcatggctatggctataagaagagcttcagcatcgcggtataaggagctgtaccagtatccagcggtatcagaccagaaccccaagatgaaagaccaaagaccaaggcaaataaattgcagctgctcgagcggggcgatgaaatacaaatagaaatacttggcagctactggacgttggatgaagttgccacagagttggttggtcggaacagggggggaatctgccggaggcaccacaccgactgtcagtcgcagtcactccacatgtcctttggcttgtttgtcttacactctgacgctccgtggatcgcagccgggtgaagtaaagttgtttggccagacgagacttggccaaatgtcgggccaacgcagtcgagcacgaatcatgaccatttgggcataaaaattacctttccttggccaatggttcactggaagaaaatgatgtggagtcgagacacaatgacatattgatttattcattttaagccaacagtttaataaatttcttaaatacaatatatatcatttcaaaatactacaaatatgaacttctttttcactaccagtgttttcagtgtaccaagttcgtatatttttccaacttttcttgaccttttatggttagttggagctcagattcccgacttaccactcgactcggctccgatttaatcagcctcgccgactaacatataattttgtgaattgcaagttgcatgataggcacaacggccatgtagtttgcagtttcccaggcccaatggagagtaacccttcctctgcatggaggccagcaaattgaatccgcttgggttgcgatgtacttgcctctggctgagataaattcagggctttctgggctcgtatgcagattgaaatggcagagcccattagatttcgacacaagccttttcccgcccaagaaaacagagagttggcccgcggtaatgaccctaaatcagcatcaacttctaggccaatgcccaaacgaatgtcatcatcggccgcgggaaccatccagcctcccccccttcaaaagatggagcatcccccagatggtaataaaaatgtcgtctgactttcgacgggggtgtctccttttggtttttggtcccactgtctgggtttaatgcacaacatattcatgtgtcaaaagacaatttcggatttatggcctgcgaaatccccagccagaatccagcgaatgacgcaatgtgggcgagcaaccaacaacgacaaaaaatatgttaagaaagcataaaatgatatccaaactacccactatgatctggtctgggtttcagtctggtcctggtttcgaaatctctcgctcatgtctgtctgccttgggtttgcataaattaggatctggacgggttgctgaaaggaaaaggaagtttaggtgggggggaatattcagttggtagcgcaaaaaatggctattttcttttttccttttttcctaccatatctctgcttgtgtgtgtgtggaagagtttttcccttttttggttgatgcgtttgctatggcatttttagggttgtaattgaaattaaatagatgtcgtgccatgaattcaaatcgccctcgtttggcctgcaaaatggggtttcttaaagacttaaggatgtgaaatcatttttgcgagtaactgcagactttgtcaaaaaattaaattccagcttccagctatatagaagtaaaatagtttccaccaaaaactgttagctgaaatgcattcatcctttttgcgttccttcagcacaaatggctgtacttaaactcaactctttcccgcgctcttttcacttcgttttatcaacacccagcgagaaaagcaattgcttttcctccccttcagacatatttcctgcacttgggtaactattttcgcacagcttgaacaacttttacttttctccaaacgctgaatttatgtgtcactggtactggcgagtggaactggcgagtggaagtggaaatggaagttttggggcgccgtctgccctgcccgctcactttcccttcgtcctttgccctgattgatgttggccaaatcgattttctttccttcgagccacctggcttccccgtgtcgccagcgtttccacatccgcagcatcgacttcatttgttgggcaatcagctctaattagcaccagaccaagttgaaatgcaaaacgcgttgcgaggggcgttcgaggggttgtgggcgatgggttgttcaaagtaaattgctattacttgcctataattgtgttagaagtcgagcggtgtggcgggtgtggtgcaaaagttttacatctgcggaattttaattgtaattgtattcaaagttgaatgccagaatgggcgactgactgataggaattgaagggcaaataaagattgcgtttaaagggtttcgcagttttaatagttggtcaacttgggcttacataatgataatgctataataatacaaattagacttagaaaaagtcctcacgactcttgtaaactatgttctataaaccatttaagatggcttaagttaagttacagaaaggattgcagcaagcggctttcgggctcttatcatcgcatttcgtatatccgctcacatatccacttctttttctgtttaatgagctgcacctcacatgtctccggcccattaaccctttgaccccgcaccgcggcggcgctgcagttatcacgagctctctatctggcttagctgggctcattatgcgacagtttctcatatctacccttagacctcgaactccattcctaccataccctaacccttaccctacccattcccaactaaactcaactcgactcgactcagttcaactcaactcacagggcttactaattacattttcagagtgcaaacgaagcgtgtgcgagcggcggggtggggtttgtctgggggtctgggggtttgccccactaattagtacgatatatatgtgtttataatgcggaccgctttatgcgctcctctagttcccggtggcatgaatagaccgaggaataagtggcataaattaaaataaaatgtacaagtatgaaatgtaactgcggccgggccgcgactgcgataaaaatctaaaataaacatgctgcagcagcaacatgcaacacacacacagcagcagcagcagcagcagcagcggcagcggggacatcagcattaattaagcatgaacatttaacctgcccacacggccacgccccctccatgccacatccgaaagggagtcgcgtgtcttggccaggggtctgacttccctttttttttgttttataatttgattgatttattgtgtatcccatggaggcgcctccgcgcagttgcaacagcaacagtagggaggggggatctcacgacgcccggctaatttaattaaaaatgcattgttgcacaggtaacagttgcaggttgaacaacgcacgacctgtcaaaactatccgattaatttgcagataaggataaggacaagtgaaggggtgctgtcggaacaggtgtcagccggtgctcctaaataggcataaatttaggtggaaaatgtaggttttccttgcgggtcctatacggcttctgcgttcgtccatcatcccgtcattgttagccaacttatttgttgattgtccgcaataaaaagggtcgaaaagcgggcagggcaaaaaaattacaatcactttggcagcgcacagcatgccatttaactccttcaatatgtcactaaagtgtctcgaacgacagatatttgcccagttgcgatccagctggaggaaaatcaattttccacgccttcgatgagcagaagaaaactgttatcccgtgtgattgattatgcagtcgggtcgagtgactgagcgaaaagtttttctcccattcactggcccacaaaaatatatcattaatttcgtcccgactcgatgggattatcattggcatgggcggattaggtgatgtgcaacaagcttgcacacgaaataaaatcgcaacattgaattgaatgaactgcttacttatataagcaccttcaatgtactaatgttagtttgattgtttgctaagatacatttgccgagccatttttgcaagtgtactaaatgtgcttacccctttttccatccatttgcaggagtctcggcggagctttactacgtgcgggagggcgccattaacgactacgccttgaacttcgccgtgcccgtgccggcgaacatcagtgacgtgacctttacgtggcaatccctggtggaccatccgctgccctacagcatcaatatcgccacatcggacacggaggtgttgccgcgacccattctgaacatatcccggatcggggatgtgcccgtggagccacagacatggggcattgcgctcaagtgctcgggcaccaggaatgccgaggttacggtcaccataaatgtggaggtcattctggatcgggctaccaataacaatacgaatctgatcttcaaaaggaagaagatctgtttgagggaggaacaggacagtgcgcacgaggagtacgacgacgatgacttggacttgctgcaaacggcgcgtaagggacatggcggagatattcactatgtggatcgaaacgatgagcatgtggtcgccaatggacaccaggcgccggagaagcaacgtccggttgtcacagagtcgccagtgggccgtggaaactccggtggatcgaagcgcgactttgacccgatgctgagggagaacctggtgccaccggccagtggcctggttaccctaattgtgggtggcattctggctctggtccttgtttccaccctcatcctgatagcctactgtgccaagggcccgtccaagcgacatccttcgaacggagtgcatctcatcaaaacctctagcttccagagactgcccaccatatcgtcgacggcccacaactcgatctacgtctgcccatcgaccatcactcctacatatgccacgctgacgcggccctttcgcgaatatgagcatgagcctgaggagttcaaccgccgtctccaagagctgacagtccaaaagtgccgcgtccggctctcctgcctcgtccaggagggaaactttgggcgaatctatcgcggcacttataacgactgccaggaggtattggtcaagactgtggctcagcacgccagccagctgcaagtgaatctgctgctccaggagtccatgatgctgtacgaggcctcgcatccgaatgtcctctccgttctgggcatctccatcgaggactatgccacgccctttgtgctctatgccgccaccggaagtgtgaggaacctgaagagcttcctgcaggatccgtcgtacgccaggagcgtcaccaccattcagacggtgcttatgggctcacaactggccatggccatggagcatctgcacaaccacggcgtcatccacaaggacattgcggccagaaactgtgtgtaagtattccccttgaaaatggggttgcaaatgagaaataagggtagatatagcgggaatattaatgaaggattaagatcatatttaaatgaattggaacaattactaacaggcttataattataattatattataatttaatttgcattccttttcatcctcagtattgatgatcagcttcgagttaagctcactgatagtgctttgagtcgcgatctcttcccgggtgactacaattctctgggcgatggcgagtaccgacccatcaagtggctgtccttggaggccctgcagaagtcccattacaacgagggcagtgatgtttggtccttcggcgttctcatgtgggaaatgtgcactctgggtaaactgccctacgccgagatcgatccctatgagatggagcactatctcaaggatggatacagattggcccagccattcaactgccccgatgagctgtaagtattgctccaatgtacttatacatagtacaatatatatattattttgataagttattatgattaacgcagtttgttttcttaaactaatgcaatggtttgccatctctgtcacttacagcttcaccattatggcctattgttgggcctccatgccagctgagcgaccttcgttcagccagctgcagatctgcctatcggagttccatacccagattaccagatatgtttaaccagcggtgctgaagcatgccaagacctgtaaatataacaagaggcgacgtcgcaagattttccaacagaccacgtcgtccactctgttcccaaagacatattaaatggtagcgcctaaaaactggggttcgtagcagctccccaggcataaatgtacgaacgacttatgagaagatgtggagggcggacggtgaacggtgaagcggcctgaaaacgtctatccacataactcctagttatatatttagtcagtaaggacatgtgacatttcaatgcaagaattaggattatctgaaaaacataaacacaccctatgaactcccctgttaagaaaaacacaaatgttctctcaaaaaaaaaaaaaaaaaattaagagccaaggcccagtaaaattgatactaagagaatccttgaaaaaatccacaatgaattaaaataaatagcaaatattgatatacaaatcgtagctaaaacagatccattaaatcagaaccccacgaaaaaccagtgctaggataggacccaaaaaatatgtcgtagtttaacagagagcgttgcaagtttgccattataatgggataccaatacgataccgatacatatatctatgtatggacatgtattcaagtgtgtgtttatgtctaagaaccgtagtgctagtaagactcgaaatatttatctaatgttagtgcacatacgaccccaaaatccttaaccctaagttaccgcctccttgtacgcgtagtgcagtctcgagttgtaagtttttgtgtaatatacttaagcagtttgcattagttcttaagttactcttatggttttctatggcagagacacaaaagaaaacgatttcaataaacgtccgtgcataatatttaaaaacaaaaccaaatgctgcctcttttttgaagtgggccgaggggaaatggcacgagcaacgctctgcggtaagtaaggcattctcattgagccgggccacgcccgtcacttagcctaaaacaacgcactctaagagcaatgtgctgtttggttaccacctacaccagcccccaaccacccagaaacctatccccaagccccaagccccgagtaagtccaaccagacccaacgcagccgaaccaatctctttgcagcacaaaagcatgtaatgccaactgcctatttgagagtaggcaatgtgccctacctctcactacaggtgtcactcgataatggcaactgtctcgagcgacatttatagcaaaaaaaaataatatctttatcatgaattctcctcttgtagttacataaaaatcatgtgttttcttagaattgctaaacaatgccttttaactctttgtgacttaattgtataattttgtacatattagttattagttttcataaaagtcctccttagggactatccactgtatccactgacacaggtaaggtccttcccgcacacctgcacgtgaattgtaggtcgggcgagtggaaggaccaggtcatggcatgccttttgattgccatgctgacactacttagtttttggcacgtcatgctgaggacatgatgttggcagcgtcctttttaatatgcccgtcacaccatcaacgagggaagactagtttttgtccgcctcctcttggttactcctcttcgttgctcctcttagatcctcctccttggatcctttaaaaccgctccgagtcggctgcccgcttggcacgtgcccacaggcggggaatttggctaaagccaccacgcaaatcgaaagctaataagtacgcgaccatcaaggactcccgtcctccacgaaagtggcttatactgagtcacaaatctcctgttttatgcataaatttagttcattttaaaaagtgtttcttctcgttcttta

SEQ ID NO: 22436 - DNA, 3085 bp, DROSOPHILA
atcgtcacggtgagcggatcaaacgcggaaaacgaacgcggacgaacggcgagaaaagcgaggaaaaacgggtgcagagacagagactgattgggaaatatgtgcgcctgagttttcccggccagaaggcaaagtgccaaatgctctgacaaataattcctgtaataatcagcgcgattgaaatcaacgcgacgctcgtaaaattgcaaatgcagcgcaaaaagtgaacagcagtgcagcggaaattaaatcgttttagcgagtgccaaacgggaaatagaaaatcggcagagtagccgaactgcagttaaaactatctcttcctcttattgcgactaaacaaccggcggattaatcgaatccgaaagatggcccccaacttgctaacaatcggattacttttgaccctgatcgccagcggtcaggcccatctcaatattttcctcaacttgcacgaggtgctgcgcctaatcggagtctcggcggagctttactacgtgcgggagggcgccattaacgactacgccttgaacttcgccgtgcccgtgccggcgaacatcagtgacgtgacctttacgtggcaatccctggtggaccatccgctgccctacagcatcaatatcgccacatcggacacggaggtgttgccgcgacccattctgaacatatcccggatcggggatgtgcccgtggagccacagacatggggcattgcgctcaagtgctcgggcaccaggaatgccgaggttacggtcaccataaatgtggaggtcattctggatcgggctaccaataacaatacgaatctgatcttcaaaaggaagaagatctgtttgagggaggaacaggacagtgcgcacgaggagtacgacgacgatgacttggacttgctgcaaacggcgcgtaagggacatggcggagatattcactatgtggatcgaaacgatgagcatgtggtcgccaatggacaccaggcgccggagaagcaacgtccggttgtcacagagtcgccagtgggccgtggaaactccggtggatcgaagcgcgactttgacccgatgctgagggagaacctggtgccaccggccagtggcctggttaccctaattgtgggtggcattctggctctggtccttgtttccaccctcatcctgatagcctactgtgccaagggcccgtccaagcgacatccttcgaacggagtgcatctcatcaaaacctctagcttccagagactgcccaccatatcgtcgacggcccacaactcgatctacgtctgcccatcgaccatcactcctacatatgccacgctgacgcggccctttcgcgaatatgagcatgagcctgaggagttcaaccgccgtctccaagagctgacagtccaaaagtgccgcgtccggctctcctgcctcgtccaggagggaaactttgggcgaatctatcgcggcacttataacgactgccaggaggtattggtcaagactgtggctcagcacgccagccagctgcaagtgaatctgctgctccaggagtccatgatgctgtacgaggcctcgcatccgaatgtcctctccgttctgggcatctccatcgaggactatgccacgccctttgtgctctatgccgccaccggaagtgtgaggaacctgaagagcttcctgcaggatccgtcgtacgccaggagcgtcaccaccattcagacggtgcttatgggctcacaactggccatggccatggagcatctgcacaaccacggcgtcatccacaaggacattgcggccagaaactgtgttattgatgatcagcttcgagttaagctcactgatagtgctttgagtcgcgatctcttcccgggtgactacaattctctgggcgatggcgagtaccgacccatcaagtggctgtccttggaggccctgcagaagtcccattacaacgagggcagtgatgtttggtccttcggcgttctcatgtgggaaatgtgcactctgggtaaactgccctacgccgagatcgatccctatgagatggagcactatctcaaggatggatacagattggcccagccattcaactgccccgatgagctcttcaccattatggcctattgttgggcctccatgccagctgagcgaccttcgttcagccagctgcagatctgcctatcggagttccatacccagattaccagatatgtttaaccagcggtgctgaagcatgccaagacctgtaaatataacaagaggcgacgtcgcaagattttccaacagaccacgtcgtccactctgttcccaaagacatattaaatggtagcgcctaaaaactggggttcgtagcagctccccaggcataaatgtacgaacgacttatgagaagatgtggagggcggacggtgaacggtgaagcggcctgaaaacgtctatccacataactcctagttatatatttagtcagtaaggacatgtgacatttcaatgcaagaattaggattatctgaaaaacataaacacaccctatgaactcccctgttaagaaaaacacaaatgttctctcaaaaaaaaaaaaaaaaaattaagagccaaggcccagtaaaattgatactaagagaatccttgaaaaaatccacaatgaattaaaataaatagcaaatattgatatacaaatcgtagctaaaacagatccattaaatcagaaccccacgaaaaaccagtgctaggataggacccaaaaaatatgtcgtagtttaacagagagcgttgcaagtttgccattataatgggataccaatacgataccgatacatatatctatgtatggacatgtattcaagtgtgtgtttatgtctaagaaccgtagtgctagtaagactcgaaatatttatctaatgttagtgcacatacgaccccaaaatccttaaccctaagttaccgcctccttgtacgcgtagtgcagtctcgagttgtaagtttttgtgtaatatacttaagcagtttgcattagttcttaagttactcttatggttttctatggcagagacacaaaagaaaacgatttcaataaacgtccgtgcataatatttaaaaac

SEQ ID NO: 22437 - protein, 610 aa, DROSOPHILA
MAPNLLTIGLLLTLIASGQAHLNIFLNLHEVLRLIGVSAELYYVREGAINDYALNFAVPVPANISDVTFTWQSLVDHPLPYSINIATSDTEVLPRPILNISRIGDVPVEPQTWGIALKCSGTRNAEVTVTINVEVILDRATNNNTNLIFKRKKICLREEQDSAHEEYDDDDLDLLQTARKGHGGDIHYVDRNDEHVVANGHQAPEKQRPVVTESPVGRGNSGGSKRDFDPMLRENLVPPASGLVTLIVGGILALVLVSTLILIAYCAKGPSKRHPSNGVHLIKTSSFQRLPTISSTAHNSIYVCPSTITPTYATLTRPFREYEHEPEEFNRRLQELTVQKCRVRLSCLVQEGNFGRIYRGTYNDCQEVLVKTVAQHASQLQVNLLLQESMMLYEASHPNVLSVLGISIEDYATPFVLYAATGSVRNLKSFLQDPSYARSVTTIQTVLMGSQLAMAMEHLHNHGVIHKDIAARNCVIDDQLRVKLTDSALSRDLFPGDYNSLGDGEYRPIKWLSLEALQKSHYNEGSDVWSFGVLMWEMCTLGKLPYAEIDPYEMEHYLKDGYRLAQPFNCPDELFTIMAYCWASMPAERPSFSQLQICLSEFHTQITRYV

SEQ ID NO: 22438 - DNA, 3303 bp, DROSOPHILA
ttgatggcagcggagactatgtggaaccacaagatgttagagaatcaattgcagggcaataacttatataccaaaaggtacttaaaataccaaccaccaaaggtatttaaaataccaaccaccaaaggtatttaagatgccaagcaccaaaggtatttaaaataccaaccaccagaggtatttaaaataccaaccaccaaagctatttaagatgccaaccaccaaaggtatttaaaataccaaccaccaaaggtatttaaataccagccataccgcgtgtttttaaatttcatcatttacttgaaaaaaagttgttttctttgatttactttgtgttttattattatacatctacattatattagattaataataaacccagaaatggttctggatgaatagatattcaagatttgtgcgcactgtttgttgcttttttttcgaaggaattacatataaataaatgcatcgaatttcagcgagtaagtcactaacttattataatgtacatatggcgttgtttggtcggcttgagattacaataattaagtggttttcagatgggtctacaatttcatgtacgagtatatacagctatccaggcagtcgattacaacataagtaatatggaattgaaaatacacacacctcgcacaaaacatgcaagtaaaatacgaaaaaaaagaagcttcaaaattaatattgcaccgtggaaaattcatcggtaagtctgacggatctcttagtcaataattagggagaactgggaaatataggtctcacttaagactaagactatcgtttaactattcgaacttatccatacatatttataatattcgcttactactgggcttatcttccattacgatcttcgacttttcattactggcaatccggtccgcacgtgagtggtgcacaaaaaaatgagtactgattccgagagtatgtatgttcaggtgcggttgtagggcccgtagaacttgggctgtcccggatctcacgccagccaacgcgacttctgcagctcgatttggccctccagcgtcttggccaagtagatgaccagcagctggatgagcgcaatgcccagagcattgccggcaatcacgtacagattgtgctcggcccaaactcgaacgatttctatgcagccgctggtccagatcagtttcgtggcctccggaacgggagcgttttgaacgccgtagccgcacatgatgttcaccaggccggaggatatgtcggtggcattgatgcaacaactgtatggcactccgcacttctccaccgacggcgagctgcagttgaagtactcgtttttgcctgcaaaaattaattaattgctattaatggcaattcctctgcgattcaactcaagttttatgctattttctgatgaaaatgttatcaatgattctgcatcaactcactccagtcctggtagcccgaattactgaggccacagcacttgaactcctgctgggcaaagtcaatgaagttctgcaggtcgggatcgtcgcggtacgagtggatgatcttgtgcgtgaactgcttctccaaaaaggtgttcatgtactgcgggcacacgaagcagacgatggctgttggcgcagacagagaggaaggtagagaaagttgatgacaatacgaaatcaggtgcccgatggcgtgactcaccgatggccatctccagcaggaagaaaagcagcaggcacatggagtagaacttcagtaggaatgtgttctcgcgcagtgcgcccacgcagccggagaagctgaccagaaagatgaccgtgccggccaggatcatcaccagcgagatattgaggaatacgtcgtagaagttctccagccgcaccgatccgttcgcgtcctcccacttgtccctgaacgcatagacgccaatgcccaggagcaggccgccaaagagccagaacacgaagttcagcaggaagatcatgtacttgacgcactggctcacgtaggtgaagtgatgcggatgcatcacctcgtgcacctcgatgccgctgtagccacgccccccggccatgccgacgcccccgagcccagcaccctgatatcggtagttgctcatcctcgccgtttatctgtatccgtatcttcaactttaaccactcgctttgccaccgatttcactttgcgtccgcttcagtcgcccgtttatctcgtttacccaattagcattggcagtggcagttgcacattcgcttgataatcactctttatttatctaatctccttttattagcgtagtaatattgcacgaaaagtaaagtgtacaaacaatggacacaatcggatggattcgtatcgttcgtgttatcgattaacgatagcggcgcacagctgttcgaaacggggagccactacactgtgcagcaaaactgtgcaacaagttgaacaaggtttttgaaacttaagcaatttgtcttctgtactcaaatcaaagtatttggcgccttgggaacggtaactttgcagtccaaccgtacgccgtgttggccagtgtaatcactatcattatcactccgaagccataaaattggaaacaaaatcgtttcggcactgacctttgagccgccggtacaacgtctggggatcgcggatagatggatcacagccattgcgccatatgtgaatcagcagtcgatagagtccatgcaaatcccacagagagagaaagagacgacttcgacgcggtggccactatcgggaattggaaactggaaattgggcactggcgatcgggaaacgataagcaatcgcggatcggcgctgatagcagcagaatacaaaatacctagcttggctaattgctgttccagttgcagctagtgcttgactgccaccatgaacatcctgctgcgcttaatcgtcttcgccctggatcctctgggtctgggccgacgtttcctcattcggccggccgtgaatctgggctggaatgtctacgatcgcgtgcgcagcaaggcggacgagaaggtgggcacggtgcgagagctggtcctccggctgggcctcatcgccttcgccgtggtgctcatcatctggctggcggtcttcatgtacgccgccttctactacgtctacatgccggccatatcgcacacccgacccgttcacatgcagttcaagtgagtagcttcgaatgtgaaggaaatcgatgtggctacaggttttcttcctgtgccatgtacatttatctaaatataggccatttgtccataaatatatgtagacctaatctgcttatcagtccatgcgattggctattgcaag

SEQ ID NO: 22439 - DNA, 1120 bp, DROSOPHILA
tacactttacttttcgtgcaatattactacgctaataaaaggagattagataaataaagagtgattatcaagcgaatgtgcaactgccactgccaatgctaattgggtaaacgagataaacgggcgactgaagcggacgcaaagtgaaatcggtggcaaagcgagtggttaaagttgaagatacggatacagataaacggcgaggatgagcaactaccgatatcagggtgctgggctcgggggcgtcggcatggccggggggcgtggctacagcggcatcgaggtgcacgaggtgatgcatccgcatcacttcacctacgtgagccagtgcgtcaagtacatgatcttcctgctgaacttcgtgttctggctctttggcggcctgctcctgggcattggcgtctatgcgttcagggacaagtgggaggacgcgaacggatcggtgcggctggagaacttctacgacgtattcctcaatatctcgctggtgatgatcctggccggcacggtcatctttctggtcagcttctccggctgcgtgggcgcactgcgcgagaacacattcctactgaagttctactccatgtgcctgctgcttttcttcctgctggagatggccatcgccatcgtctgcttcgtgtgcccgcagtacatgaacacctttttggagaagcagttcacgcacaagatcatccactcgtaccgcgacgatcccgacctgcagaacttcattgactttgcccagcaggagttcaagtgctgtggcctcagtaattcgggctaccaggactggagcaaaaacgagtacttcaactgcagctcgccgtcggtggagaagtgcggagtgccatacagttgttgcatcaatgccaccgacatatcctccggcctggtgaacatcatgtgcggctacggcgttcaaaacgctcccgttccggaggccacgaaactgatctggaccagcggctgcatagaaatcgttcgagtttgggccgagcacaatctgtacgtgattgccggcaatgctctgggcattgcgctcatccagctgctggtcatctacttggccaagacgctggagggccaaatcgagctgcagaagtcgcgttggctggcgtga

SEQ ID NO: 22440 - protein, 304 aa, DROSOPHILA
MSNYRYQGAGLGGVGMAGGRGYSGIEVHEVMHPHHFTYVSQCVKYMIFLLNFVFWLFGGLLLGIGVYAFRDKWEDANGSVRLENFYDVFLNISLVMILAGTVIFLVSFSGCVGALRENTFLLKFYSMCLLLFFLLEMAIAIVCFVCPQYMNTFLEKQFTHKIIHSYRDDPDLQNFIDFAQQEFKCCGLSNSGYQDWSKNEYFNCSSPSVEKCGVPYSCCINATDISSGLVNIMCGYGVQNAPVPEATKLIWTSGCIEIVRVWAEHNLYVIAGNALGIALIQLLVIYLAKTLEGQIELQKSRWLA

SEQ ID NO: 22441 - DNA, 3793 bp, DROSOPHILA
tcggagatatatatccggagagtgactttgttgtttcgaacaaagctagagatgaccacgaactcattgtggtggcctcgctcatagacaaattgccaaatctgggcggattggcgcgtacctgtgaagttctgggcgttaataccctaatattgggtttaaaatcacaggcggagaaaagcgattttacaaacttgaggtatgcacgtcaaacatcgcggtagccctattatattgctttatataattataattatattattttagcatgactgctgagaaaactttaaacatacttgaagtgaatccagaatcgcttgctggatttctgctggaaaagcaaatggagggttataaaatcgttggcgccgagcaaactgcacacagcacaaactttgttgactttaagtttcccaagaaaagcattcttcttttggggttcgtaatcaacatcttgggcgtattttttgaaaacttattgttctgcatccctcctcaggcatgaaaaacatggaataccagcgaaccttattggattcttggactacgccgtcgaaattccccagtatggcttagtgcgctctctaaatgtacatgtggctggatcactatttatttgggaatattgtaagcagcacttaaattaaattcataatttgaccaccaacaaatgcctttaacaaataaagtaaatacctaaaaatattgtacaaatgttactatataaatgttttgtgttgtatatatcttaaaaaaaatacacccaaaataaattacctatataaacttaattgtactagctattagtattatttctatttttttaaatgtgtttgtttgccttcggtgaattaatcgaagtaaatataattcattctcttaaagtttcgcgccttgttatcgataaccagtatttaccgatgacgcttgcctgaaacagctgatcctataatcacaacatcacaacaaacccattgtaaacaacttcgaaaagacgaaaatgagcttctcggaaaacacctccgattctgaatggtaagtccttgaggccggaaactctcaaattctatacgaatgcttcgcttataggaagacagacaaaatgctaaaggcgcggactgctaagaaatctttaaagctggacaaggagcacagaactctgaaacctaaatataaccagaagttctgcgaaaagtggctcaagattttcgatccatggctccgacgggcggccgaggatcctaacaagccattctgccgcgcttgccagtgcaccatggactgcaatcgatgccacctggtgcggcacgagcgaaccaccaagcacaagcgcaatctggaggctctgctcacaaagggcgaaggcgcggcggtccaggagttccggattcgccagcagcgtagcaagtactatcaccagcgtaaattggtagtgatggagcccttggctgagaaccacgagttggagccgccttccactccagagcctatgcccgtgatggccattgctgatcaaagcctctgttctgcagccagtgagaaggtgacagtacccaaacaggagttcttatcagagacagaggtcacaacaaagatgaccgaacccccgtcaagccatgccaattgcagtgacagctcctcttctgcctctaagcaggagggcataaagttactaatgcagatccaccaggacaaaaacgaactcatggaatccttccgcgagctgatgggaagccagaggaccctaagtcacacaccgccgcccaaggagaagaatcatgtggatctgtttttcgaaagcgtcagttccagcgtgaaagccctctcgccaaagttggtagcggaagccaagatgcgagtatcgcagctgatctgtgagctcgagcttcgcggcctcagtgaaaccagccaaacggacgcactgaatccaaaccctcaagctaatgaatcgctcgcactgcgcccatcatgacaatcccttgtccttcagcatgaatttagaggcatacattaattttaaatttaaaaataaatgttatcgatttttataagatcaatgcaaatatactttatttgttagatatacgaatcaaactattcaaaataggtgcgagaaatggtatcggactgtttatcgataggctagaggctactgctactgccatctccaaagcgcggctgtgttttcttccaatgtttattaaatttgaagcagctaatgcaatttaaaggcttaagtgacaaaatattcataacataagaatgtggaacacttcaaatgtgtatgatgaaacgacctctgaaaatggcgacaacgaagagcagaaagcttcatacattaaagaagatcatatagaggtataattactaagttgcccttaaatttacaaatatttaaacgaaattatgcatttgcagaccgagaggaaaagtttgctactcatcaaacggaacaacgtagccctacagaaaagacagctaccctactcaaggccaacgccgcagaaccgccaggaacttgtcgagagcatcgaacaagaccgtaaagtgctgtcggcgtacttcaaaaggttgagctcccagcgagatgaagtcacttcaccaaatgcagctccaccggcggctgattcccctgttcctcagagaaacagctacgatcttttctttgagagcgcctgcatcagtgtcaaaggcttgccacccaaactggcggcggaagccaagagccgcatctcccagataatcaccgagttcgaaatccgcgccatatcagaaatggaggcccagcaggagcacaaaatgcgggcccagaacagaatggataatgcgtccggggttgtttacgagtttcgtccctgctcgtaaagtaggttgggtgtttgcctttcaactaccttaactcatcctatacacttcacatttggacgccacctaactctggactatcaaaattcataataaaaatttaaagcattctacatccagttaacacttaggcggtcatttggtcgcgtttcggccctaaattattgttgttcgttaatttaaagttggatcaatggccggaaagttgaaaatatgcatcattggggctgagggctggtaagttctttcaattaccaagtctaaaacacatttaactgctttcaaatggcttttctaggggctcggccattgccgccgtcgtgagcaacaatgtcttggagggagacttcgacagccgggtgcatttatatgtctacgatgaaatgattcgggacactgccctatcggagatcataaacactcgtcacgagaatgtcaagtatctgcctgggatcaagctgcccaataacctggtaaggaaattcttgcagtgttttggtatctgcattatacaaaatatttttgtattagatcgctgtaaatgatcttttggaagctgcccagaacgcagatatcttggtattttccaccccgctggagttcgtgcaatcctactgcaacattctgtctggtaatgttaaggagtcggcctttgctgtttccatgaccaaaggattgttgagcgagaatggggaggggattgagcttgtttcgcacgccattagcgagagtctgggtatcccgtgctactctatgatgtctgcacatagtgccatggagatggcacagggaaagctgtgtgaggtgaccatcggttgcagcgataattctcattccaagctgctgatctctgctatgcaaaccaataactgcagagttatttctgttaatgacgttgacggagtagagctgtgtggaacgctcacag

SEQ ID NO: 22442 - DNA, 1339 bp, DROSOPHILA
atgagcttctcggaaaacacctccgattctgaatggaagacagacaaaatgctaaaggcgcggactgctaagaaatctttaaagctggacaaggagcacagaactctgaaacctaaatataaccagaagttctgcgaaaagtggctcaagattttcgatccatggctccgacgggcggccgaggatcctaacaagccattctgccgcgcttgccagtgcaccatggactgcaatcgatgccacctggtgcggcacgagcgaaccaccaagcacaagcgcaatctggaggctctgctcacaaagggcgaaggcgcggcggtccaggagttccggattcgccagcagcgtagcaagtactatcaccagcgtaaattggtagtgatggagcccttggctgagaaccacgagttggagccgccttccactccagagcctatgcccgtgatggccattgctgatcaaagcctctgttctgcagccagtgagaaggtgacagtacccaaacaggagttcttatcagagacagaggtcacaacaaagatgaccgaacccccgtcaagccatgccaattgcagtgacagctcctcttctgcctctaagcaggagggcataaagttactaatgcagatccaccaggacaaaaacgaactcatggaatccttccgcgagctgatgggaagccagaggaccctaagtcacacaccgccgcccaaggagaagaatcatgtggatctgtttttcgaaagcgtcagttccagcgtgaaagccctctcgccaaacgcggctgtgttttcttccaatgtttattaaatttgaagcagctaatgcaatttaaaggcttaagtgacaaaatattcataacataagaatgtggaacacttcaaatgtgtatgatgaaacgacctctgaaaatggcgacaacgaagagcagaaagcttcatacattaaagaagatcatatagagaccgagaggaaaagtttgctactcatcaaacggaacaacgtagccctacagaaaagacagctaccctactcaaggccaacgccgcagaaccgccaggaacttgtcgagagcatcgaacaagaccgtaaagtgctgtcggcgtacttcaaaaggttgagctcccagcgagatgaagtcacttcaccaaatgcagctccaccggcggctgattcccctgttcctcagagaaacagctacgatcttttctttgagagcgcctgcatcagtgtcaaaggcttgccacccaaactggcggcggaagccaagagccgcatctcccagataatcaccgagttcgaaatccgcgccatatcagaaatggaggcccagcaggag

SEQ ID NO: 22443 - protein, 269 aa, DROSOPHILA
MSFSENTSDSEWKTDKMLKARTAKKSLKLDKEHRTLKPKYNQKFCEKWLKIFDPWLRRAAEDPNKPFCRACQCTMDCNRCHLVRHERTTKHKRNLEALLTKGEGAAVQEFRIRQQRSKYYHQRKLVVMEPLAENHELEPPSTPEPMPVMAIADQSLCSAASEKVTVPKQEFLSETEVTTKMTEPPSSHANCSDSSSSASKQEGIKLLMQIHQDKNELMESFRELMGSQRTLSHTPPPKEKNHVDLFFESVSSSVKALSPNAAVFSSNVY

SEQ ID NO: 22444 - DNA, 2635 bp, DROSOPHILA
gcccgtgtgtgtgtgtgtatcgttttcattttcacggaacaaatatggctgcagcacattttttttacgttttttattcacttttttcacgttcatatagctcgttttttcacccaaagtaatgctgactggccgattgagggttcgtggatttggattccgtttgcgttgcgtttgctggctgccttttgggtttcgaagtgcgtgattacgccattttctttactcgttcgcttttcgctgcacgcccatctttcgaattaccttttttcaatacgatttgatcgatcggtggatctcttaactcgctgcacacgcgtacactgggtcgaaacggtggctgattgggctctccaatcaatttattgactattccgttgaggggttttctttaaatgcaagtacgcaaaactcacgggttttcaccgacacacgaatccgtcttcctcgactttgcatcagtgtgaccgtggcgtgcaacgacgatggccaaacatcgatagtctgggactttgctactatcgaagttattttatacatattcgataccttctgtccctgcatatggtttttaaaggatataattaccacaccgttgtaattattgtaatctttccaattatgtacaagccgtggtagtctttaattgccaacataacataaatgttcacctaatagcaacggaaacaatttcaaaggtaacaagagaatacatatctctcgcttcgaaagtattcgataaatacgtcggtgaagcggatgcttaaaccaactacccaaacatcaaacaacttcaataattataataatattataataattaattgttcgtgttagaattagcgttaaaataaatttatcttttggagtcatttgtttcaattagagaacgcatatttcagtttttgaaaataaagaatgaatgcccctatcaatagttatagcggactaacagctgaaaacacctgaagtttacagagcccaaaatgtttacgtgatgtcattttatgcataaatatatttattgtatggagtacaatttcattacattataatttaactttccatttatacgctgatgattagaatacagatataaatgtgcagataattcagcaatagtcgcgatgcaccatgccatttagtcggttgggttttggatgacaatcaggatgaagtccttgtcgggtgccaccatgatctcgtgcttcttggatcgcacccgcaggaatgtcatgtcgttggaaggatccaagtccctcaccacacttcgtgccttgtccgccagctgactcattaggccagcgtactgaacggtggtagtgttgtccagcgtggatttgaccggaatacctatttgggaggcgttgagaattagttagatatcttagcacacactggggtgcagttgaaccacccaccttcattgttgaccacaattgtacccacaacacctttgtggctctggattctcttgagtgtttcctcaacctcctgcgactgtaagccatgaaggtaacgttattttcttaatgtttttgtgtatgcacaactcttacttaccattttttcttataattttgttggaaacacggcagacactaccgctacctgcagttcaatgaaatagtaaactttgtttgttcaatattagagatgcactgtcagtgatggcacattgttcattgttaatttaacagatttccacataagttaacagaaaatatcgatatgaagttttcaatgagaaaaaaatttgcaacggtaattatcaaaatatttgtgattgaataatttaataagtttattatttactaacaatacattaataacaactacacagaattgtttaatctggcatattgacccatatagcaacacgcaccttggaaaccaagaaaacaaaaaaaattaggttaaaaattcacgaaaccgttactacgaagttcaaggtgtttcaaagcagacgagaaatatgtttccggatcttccacaaaaggtaaaatatttccatattgaatgtaattatatttatttataggttacatcattaaatagccacctcgaactctacgatatgtggaaaaagcattcgacctggtcaaatcgaaaaaacatgttcgagatgtagtgatcctcaacgagtcgggacatccggtgatgagtacgatggaccgagaggatgctgtccaattttcgggaccttttcaggctattcgaggaagactggaacgcggtatgagtaaaatagatcccacggacgaactactaatgctgagaatacgcacaagaaccaacgaggtgctcctggtgccagactccaagataacactactcgtagtacagaacgcgcatgattacttcgaaaaatgattaaatattttagatttctcaaagacaatttcttattcgttagcgtatgttactttattattaaaacatgtaccaatcactcgtatgtcagtaattggtatttacacgtgcttttacatttttaaggcatttaaatattttaagatgacgtatttaacgaatatagcaaggaaagaatccaatccgtgtgcctcataacattcgtaaaaacgagtatgtttttcgatgaaaaactgaaaatgcccaccaaaatgtagcgtat

SEQ ID NO: 22445 - DNA, 504 bp, DROSOPHILA
gtttactatttcattgaactgcaggtagcggtagtgtctgccgtgtttccaacaaaattataagaaaaaatgtcgcaggaggttgaggaaacactcaagagaatccagagccacaaaggtgttgtgggtacaattgtggtcaacaatgaaggtattccggtcaaatccacgctggacaacactaccaccgttcagtacgctggcctaatgagtcagctggcggacaaggcacgaagtgtggtgagggacttggatccttccaacgacatgacattcctgcgggtgcgatccaagaagcacgagatcatggtggcacccgacaaggacttcatcctgattgtcatccaaaacccaaccgactaaatggcatggtgcatcgcgactattgctgaattatctgcacatttatatctgtattctaatcatcagcgtataaatggaaagttaaattataatgtaatgaaattgtactccatacaataaatatatttatgcataaaatga

SEQ ID NO: 22446 - protein, 97 aa, DROSOPHILA
MSQEVEETLKRIQSHKGVVGTIVVNNEGIPVKSTLDNTTTVQYAGLMSQLADKARSVVRDLDPSNDMTFLRVRSKKHEIMVAPDKDFILIVIQNPTD

SEQ ID NO: 22447 - DNA, 3751 bp, DROSOPHILA
atccgcgaagaggttgacacgtttatgttcgagggccatgacacgactacctcggcgatttcattctgtttatatgaaatctcaaggcatccggaggtccaacagcgtctgcagcaggagatccgcgacgtcctcggcgaggatcgaaagagcccagttacccttcgtgatcttggtgagctgaagtttatggagaacgtaattaaggagtcgctgcgcctgcacccgccagtgcccatgatcggtcgctggttcgccgaggatgtggaaatacgtaagaagttccatatgagattcttcaatctcaggtaaacatattgctcttgtcaggtggcaagcatattccagcaggcaccaactttacgatgggcatctttgttcttcttcgtgatcctgagtacttcgagtctcccgatgagttccgacctgaaagattcgatgcggatgtcccgcagattcatccgtatgcgtacattcctttctccgctggaccaagaaactgtatcggccagaagtttgccatgctggaaatgaagagcaccgtcagcaagctgctccggcacttcgagctgctgcccttgggtcctgagccccgccactcgatgaacatcgtcctgcggtcggccaacggcgttcatcttggcctgaaaccgcgcgcctaaggaattcattcttgtgggtctatccagctctatttgcatagaataaacgtgtatacaagtatttaattaactattttgtctgttgggtaattatcttaatactctcaacaatacatacatgtgcatatgaatgaccataggtacatatgttttgtgttttggttgattccatcagctgttcttgctgaaaaacagctggctagttgttttcctcggattttccgtcctgctcaccttagtggtcccgcactgtttctctttcgaagtggtgcactattcgaaaggttttgcttatataaagtttagctacgagcaataaatccgaagtgcctgtatatagataggcgacacatttgtagtgctccagataagattgccagctactcgagagcccaagtgctccttaagatacgcagcaaagcttcaacatgttggtggttttgttggtggccctcctggtgactcgcctagtggcctcgctgttccgtttggcgctaaaggagcttcgacatcctttgcaaggcgttgtgccaagtgtttcgagagttcctctactaggagccgcctggcagatgcggagttttcagccagacagtaagttcccgtttgaactcttcaatatttgatatttactctattaaattccagacttgcatgataagttcgccgagtatgttaagcgttttggtcgcagtttcatgggcactgtcttaggccatgtggttatggttacagcggagccccgacatatcgatgcactgctgcagggtcagcatcagttgaagaagggcacgatgtactttgccttacgcggttggctgggcgatggactgctgctgagtcgtggaaaggagtggcacacgatgcgcaaaatcatcacgcccacgtttcactttagcatcctggagcagtttgtcgaggtcttcgataggcagagcagcatattagtggagcgtttgagaacgctgtcgtacggcaacgaggtcgtgaacatctatcccttggtgggcttggctgccctagacataatcaccgaaactgctatgggcgtgaacgtggacgctcaaggagctgactctgaggtggtgcacgctgtaaaagagtaggttgtaatatgttctaactgacattttttcttaccgtttatctttctttagtctaaccaacatcttggccaccaggttcatgaggccgcatctcctctttccccacctctttcgcctgtgctggcccagcggattcagaaagcaacaggcaggagtcatctgcctccatgagtttaccaacggaattatagagcagcgacgccgtttactggccagggaggctaatcaagataagccaacaaagccccacgccctgctggacacgctcctgcgggcaactgtggatgggcaaccattgactgacaagcaaattcgcgatgaagtgaacactttcatctttgagggtcacgatacgacgacttcagcggtttccttctgtttgtatctgctttcccgccatgaggcagtgcaacaaaagctttttgaggaactgaggatgcactacggccaggatttattcagaggcgttattctctcggatttcgcgacgttaccgtatctaagctgcgtggtcaaagagtccctgcgtctttatccgcctattccggccgtcgcacgctgcctggaaaaggatttggttataggtgagtgtaaggtctgagaatttaagactcacctaagtcaatctacgtcaatctacaccagatgagggctacatccctgtgggaaccaacgtggtcgtacttctctggcagctcctccgggatgaagcgatcttcaccgatccactggtcttccagccggagaggcatctaggagaagaggcacccagactgagtccctacagctacatacctttctccgctgggccgaggaactgcattggtcaaaagtttgctctgctggagatgaaaaccatggtgaccaaagtgatacgccactaccagctgcttccaatgggagccgatgtggagccatccattaaaatagtgctgcgctccaagagcggggtaaatgttgggctgcggccgcggttgtattgaaaatctgggagtcaagaataaaaacaaaggatttaggatcagctggcgccagacagcttgaatctgcttatcgctatcgataacagcaaactgcaatcagctggcgcagtgatgggcaggtgtagtttttcaccgccaaaaagtgatagaaattagttcaaatttaaatgtctaaactaataccaggaattcaatataaatacaagtgcttatacatcacatatacagcagaagtcaaaccaaaatggatgcgctgccttatcagctaaatgggatcagctgaaagcacagaatgtggaataaacccaattaatgtgattaagcttagtaaacgagcgaccacagattacattactgcgttacaaacaaatgcattatatatgtatttatatacattaaagcattatctttgtaatttatttatttcagtttcgcgctgatcaatcgataaatgtcacatcgaatcgatacgcgcaactgttgaaatatatggaagctatcagccgtttgttttcccagcttttccgagatttccctaacaaatgtgctttctacgatttttggcccaggccaggggcaccttgggacgggtgagaattctgaaagagcaccagaagtgagaaggtcaagcactaatagggtttctcttctcgcgcagcatctggcggaggcctcaccagttgcctgggctgctgctcccgacgtttccggccggaaattacatctggtaatgggcaacgaatcgtgtgacttggactccgccgtttcggccgtcactttggcttttgtctacgcgcagcgtcatcgggagcacgactatgtacctatactgaacattcctcgccgggactacccgttgaaaaccgaggtgggccacttgtttgtgaaatgtgggattgccgagcccgtgttgctcttccgagacgatattccccgggaagtggtccaggatgtgaacgttattctcgtggaccaccatgtaagcccgctggcgccaaat

SEQ ID NO: 22448 - DNA, 1581 bp, DROSOPHILA
agataggcgacacatttgtagtgctccagataagattgccagctactcgagagcccaagtgctccttaagatacgcagcaaagcttcaacatgttggtggttttgttggtggccctcctggtgactcgcctagtggcctcgctgttccgtttggcgctaaaggagcttcgacatcctttgcaaggcgttgtgccaagtgtttcgagagttcctctactaggagccgcctggcagatgcggagttttcagccagacaacttgcatgataagttcgccgagtatgttaagcgttttggtcgcagtttcatgggcactgtcttaggccatgtggttatggttacagcggagccccgacatatcgatgcactgctgcagggtcagcatcagttgaagaagggcacgatgtactttgccttacgcggttggctgggcgatggactgctgctgagtcgtggaaaggagtggcacacgatgcgcaaaatcatcacgcccacgtttcactttagcatcctggagcagtttgtcgaggtcttcgataggcagagcagcatattagtggagcgtttgagaacgctgtcgtacggcaacgaggtcgtgaacatctatcccttggtgggcttggctgccctagacataatcaccgaaactgctatgggcgtgaacgtggacgctcaaggagctgactctgaggtggtgcacgctgtaaaagatctaaccaacatcttggccaccaggttcatgaggccgcatctcctctttccccacctctttcgcctgtgctggcccagcggattcagaaagcaacaggcaggagtcatctgcctccatgagtttaccaacggaattatagagcagcgacgccgtttactggccagggaggctaatcaagataagccaacaaagccccacgccctgctggacacgctcctgcgggcaactgtggatgggcaaccattgactgacaagcaaattcgcgatgaagtgaacactttcatctttgagggtcacgatacgacgacttcagcggtttccttctgtttgtatctgctttcccgccatgaggcagtgcaacaaaagctttttgaggaactgaggatgcactacggccaggatttattcagaggcgttattctctcggatttcgcgacgttaccgtatctaagctgcgtggtcaaagagtccctgcgtctttatccgcctattccggccgtcgcacgctgcctggaaaaggatttggttatagatgagggctacatccctgtgggaaccaacgtggtcgtacttctctggcagctcctccgggatgaagcgatcttcaccgatccactggtcttccagccggagaggcatctaggagaagaggcacccagactgagtccctacagctacatacctttctccgctgggccgaggaactgcattggtcaaaagtttgctctgctggagatgaaaaccatggtgaccaaagtgatacgccactaccagctgcttccaatgggagccgatgtggagccatccattaaaatagtgctgcgctccaagagcggggtaaatgttgggctgcggccgcggttgtattga

SEQ ID NO: 22449 - protein, 496 aa, DROSOPHILA
MLVVLLVALLVTRLVASLFRLALKELRHPLQGVVPSVSRVPLLGAAWQMRSFQPDNLHDKFAEYVKRFGRSFMGTVLGHVVMVTAEPRHIDALLQGQHQLKKGTMYFALRGWLGDGLLLSRGKEWHTMRKIITPTFHFSILEQFVEVFDRQSSILVERLRTLSYGNEVVNIYPLVGLAALDIITETAMGVNVDAQGADSEVVHAVKDLTNILATRFMRPHLLFPHLFRLCWPSGFRKQQAGVICLHEFTNGIIEQRRRLLAREANQDKPTKPHALLDTLLRATVDGQPLTDKQIRDEVNTFIFEGHDTTTSAVSFCLYLLSRHEAVQQKLFEELRMHYGQDLFRGVILSDFATLPYLSCVVKESLRLYPPIPAVARCLEKDLVIDEGYIPVGTNVVVLLWQLLRDEAIFTDPLVFQPERHLGEEAPRLSPYSYIPFSAGPRNCIGQKFALLEMKTMVTKVIRHYQLLPMGADVEPSIKIVLRSKSGVNVGLRPRLY

SEQ ID NO: 22450 - DNA, 3443 bp, DROSOPHILA
aaacatatgaaacgtaagtaaagcaagttcaaacttaccatcccgatgatcctcagatggaaatgtatcttatggctgcaatttaggagcaggatcagcactggccactaatccactgaacataaaacataattttcacacacatttccgacgaaagcaacttcgcgacggaccgaaaaataagcagaacctgtcggctcgagagcagaagaacatttggccagcctcgaatatctccagcttggccagaatttgagaaccagactgggaaagccagcctttccattccacttttccccactttggccaacagctacacgcagaaaaagttgatttcaatctagaaaaaggtatttataactaattttataacataactatatacatatattccaagcaacgtttatatatctgatttgagatcttgatactatacaataatataaacatatataacatatacatttttcgctgagtgcacgggccaacggtaaagcacaacaaagtgtggtcaccactacgaattgggccagaaatcggtggccaagtggatctggcatggagatggcgacgaagaggtggccactccgctcctgacaggtgcttcgccttgggatgcaaaaaagtggatgagtattgcgatagcggtgatcggggtttggggatcgggaatagaggtgcgccaatgcgattcggtggttagcaggcttctgttctggccgattagcgatcattattgatttcgcttttaattcggtatctacttgatatctacagcagggaatacactacaaaaaacaaattggcacatcgtgttctaatttatttgcttacaatacagtgtgtatcatattggaatggataatcaagctacagttgggatttaaaatccctaaaactagcgcatcctatagatacatatatatatagatacgcatattatgcgaaatttgatagattatatatatgtatttctcagtgcatcaacgataaatggtcttcaatttgtcctgttgaatcgctcgccgagattcatccccttgatgagcgtgtagagcgaaaacgagaacttggctatctaaagatatggagaaaatattattaatatagaggaaaatctataaacatcatgctaaggataagaaaattggtatgtgctttgtatttggaaaatagaaagagtatgtcctcagttggtaatcctctaactcttaagccaagattgttattcataacctatcatctctaactatggtaactaatagtagagcggacttacactgaagtacgtggccagattgatgggaaacagcttcatggcggtcagcgtgatgggctgctgggcgcgatgaagatagtagagcagcatcttacggaaccgggcactctggcccagccactggcactggaagatggccagggccagcctctcgttgtccaacatcagcgaggtggcctgatagcaacatggagccgtctgcagggtcaccgccagcaggtaaatgatcgatgcgatcttcgtgttcgtattggcgaaaatgaaaatgttgatcatggtggtgcccatgatggcggcggtgatcaggaactgaacgaatatggtacgcgagatgacgggactaatgcagtcgagcagctgcagcatcgtctggtgatctacaatgcagcgctgcagttccgcgcaatgctcctcctgccgccgctcatcgggatagatctccacctggccactatcatccgtgcccagcttctccacccgcctggccagcaattgcacttgaatccggaccacatacagatagataacggcgtacacatcatcgctagcttggtgcaggcacgtccagttcatgataaggaactcaatccaggcctggatgcagaactgcatctgggaacgctgccaatcgaggccaggcaaatagagggcatatggcggttggcccagcaggaaggcgcacacaaatgtcgacgaggagtagatggcatagcagatctggtagaaccataccagatagttgcaaaacctcaccgcatcgaggatcaattggaactcctcctgttccctgcaccgcgcatccaaggcggccagatgatgctctgctctgcgcagcaatggcaaattccacgccagtgccacaatcttggccggcagaatgaccgcatcgatggccacctgggcggaggtcagcacctgggtaatctccatgccgcccatgtaccgatagctgatcacaaagaatgtgggcaccagcagcagttgccacacgtacatgaccaccgagaagcaggcgtagatgcgttgccatgtgctgctcgtggtcggtcgactgccatccggtgcctgcatgccaagggcatagaagcaattgaagagattcctaaacgctcgccgggattcgggcacttcctgctttgtggccacacgagtgctcaccgccatggctgatggacttttgacgcctgggaatattcgaatggcctcttttataggctgcccaattaaaagttgaccctcatttcgattcgattcgttacttttttttttctataaaaaatagttttttattttcgcattttggtctctgaatgatttaaatgaatcgtcaattgttaattgctaatttgtacataacataagtcacaagcagcattttgttattgcatatttgtgagtccttttcgcccctcccccaaatctaccgcccattattcccaaccccccatcagaatcgaacttttcaattcgatttcaattcaatttcgttcgcttgctaattcaaaggcaattaagcagcaaatacaaataaacttaacttaagaacccgaagaaccccatccttccgactaattaataaataatgcaggcaaatgcaattaagctagtgggtaaatgtaaaggttaactggtttcattcttcttctggttttttttttttttttttttttttttgggcagatatttgtggctatattgcttggttttgtggttcaatcggttcctatttttggttaacttcggctttgtgtgtgagcataaacaacaatttgtctaaattatagttattaatttatgcgcatatgcatatgaggaggcctctattgcctgccaccagctccaagaaaatgtagcccagagtttcggggttttggtcgcgtggcaaacgagtcgagtaacgaaatcttcaatttgattcagctcctcgaaagtcgaaggtagctattttgtgcatcctgcgttcgggatgttctggaaatatcttaagatatatgtatatacacggtattatctcaattggtaaacttgaggaatatctcgagatatttccaatagaaaaaaaaaaaccactttgcaaacaaacatgattatataataagtatctgtgtacgtggcatacatacatacatatatgcaaaggtagttcaaattcattgccattata

SEQ ID NO: 22451 - DNA, 1242 bp, DROSOPHILA
atggcggtgagcactcgtgtggccacaaagcaggaagtgcccgaatcccggcgagcgtttaggaatctcttcaattgcttctatgcccttggcatgcaggcaccggatggcagtcgaccgaccacgagcagcacatggcaacgcatctacgcctgcttctcggtggtcatgtacgtgtggcaactgctgctggtgcccacattctttgtgatcagctatcggtacatgggcggcatggagattacccaggtgctgacctccgcccaggtggccatcgatgcggtcattctgccggccaagattgtggcactggcgtggaatttgccattgctgcgcagagcagagcatcatctggccgccttggatgcgcggtgcagggaacaggaggagttccaattgatcctcgatgcggtgaggttttgcaactatctggtatggttctaccagatctgctatgccatctactcctcgtcgacatttgtgtgcgccttcctgctgggccaaccgccatatgccctctatttgcctggcctcgattggcagcgttcccagatgcagttctgcatccaggcctggattgagttccttatcatgaactggacgtgcctgcaccaagctagcgatgatgtgtacgccgttatctatctgtatgtggtccggattcaagtgcaattgctggccaggcgggtggagaagctgggcacggatgatagtggccaggtggagatctatcccgatgagcggcggcaggaggagcattgcgcggaactgcagcgctgcattgtagatcaccagacgatgctgcagctgctcgactgcattagtcccgtcatctcgcgtaccatattcgttcagttcctgatcaccgccgccatcatgggcaccaccatgatcaacattttcattttcgccaatacgaacacgaagatcgcatcgatcatttacctgctggcggtgaccctgcagacggctccatgttgctatcaggccacctcgctgatgttggacaacgagaggctggccctggccatcttccagtgccagtggctgggccagagtgcccggttccgtaagatgctgctctactatcttcatcgcgcccagcagcccatcacgctgaccgccatgaagctgtttcccatcaatctggccacgtacttcagtatagccaagttctcgttttcgctctacacgctcatcaaggggatgaatctcggcgagcgattcaacaggacaaattga

SEQ ID NO: 22452 - protein, 413 aa, DROSOPHILA
MAVSTRVATKQEVPESRRAFRNLFNCFYALGMQAPDGSRPTTSSTWQRIYACFSVVMYVWQLLLVPTFFVISYRYMGGMEITQVLTSAQVAIDAVILPAKIVALAWNLPLLRRAEHHLAALDARCREQEEFQLILDAVRFCNYLVWFYQICYAIYSSSTFVCAFLLGQPPYALYLPGLDWQRSQMQFCIQAWIEFLIMNWTCLHQASDDVYAVIYLYVVRIQVQLLARRVEKLGTDDSGQVEIYPDERRQEEHCAELQRCIVDHQTMLQLLDCISPVISRTIFVQFLITAAIMGTTMINIFIFANTNTKIASIIYLLAVTLQTAPCCYQATSLMLDNERLALAIFQCQWLGQSARFRKMLLYYLHRAQQPITLTAMKLFPINLATYFSIAKFSFSLYTLIKGMNLGERFNRTN

SEQ ID NO: 22453 - DNA, 2743 bp, DROSOPHILA
gaacaaaaacaacaactaaaaataaaaaagaaggaaagaaaaaagtttttgcgaccaacagttgacagtcgaaaagcatttgacattttaccttggcacgcacacaagcaccgccaagtgcgaaagggacaaaacgcgggcaaatgtcactttgaaaaatgccattggcccggccagcgagtgtgagcgagagggcgcgacggccggagagcgtgagagcgagagagcgccattttgcgcatctctcaatgaagcaacaataaaaaaaccagttgcttagcaacgccccctctaaccgcaaaaaagagagctggagagcaggagagccagtgttgcaacaacaatgggcaaaatggaagggcaacaacagcaacaaaaaccaaaaatatccttacaggaacaacgccagcaccaatcttgagaaaaggatcaaaagcccaagatcaacagaagaatgtgtgtagaatttaaaaaaaaagtgaatttttggatttttaaaatcttatgaatctaacaagcatctagtaaggctaactaaatatttagttatcatgctaaatatatcaaaattttcaaagaacttatattgtgtattatcgaacaatcacctaaattaaatcctaaaaaaggaaaaaaaattaagatttcttgatatttttttccaattgttatgaaattgtatatccttttccaaaatatttttaataataatctagatatgcataccaaatattctagtcatattttttccatttttttagaaaacgttttgaaaaacaatttttttatttaagaataatatgatttcttcatgcccaacacgagagagccaggagaagcgacggaagcgagagcgagagagcctgcgactccattgcagcgccgccagcagcgcagtcggcgtcgcagcagccccagctcaacattcgctgcatctcgctctggcgcaggcgaaatatgcgagcactgcttgccgcattcggtagcacgagtgcgagcgatgcgcctgctagcatctcgctcgcacccaggcgcgccattcgtcgccgcttcggctcgccgttcgtgtgtgtgcgtgtgcgctcggctggcagctatcggtaatcgggccgtccgctttgccgtcgcgtttgccgttttccgttttcagtttttgtttgacgttcgcgtgaagcgcccgcaaaacgcaaagcgcacgaggcaacgctcgaaaaaggagccaacgcagccgtttaccgttagtcagctgtttaccgttccgccgcgagatcgaaaaccgagaatttttgccgttgttcaaatttttttgcaagtgagaatcttgaacaacaagaagaatatacaacacataaatacaacaaaaccaaggaatcgccgaaaagccgatagtgcaaagtgtttaaaaagaaaagaatcaatttcatatacaacaactaaagaaatactggaatataaggcataatagaagcggaggaagtttcttcaactcaaagaggagcggaatttcgcgctttgtttttgttttgccaaatttgccgccggcacacacgtgctatccccctcttgctcgcaccttgccacccagtctttatgtgcgttaaccgttaagtgtgcagttggggcccgctcctatctttctctccctctctctctcgcttccgcacccgcacacacacacatatatccacacccacgcgcgcctcgttcacatacgcacacacacgcgggacttaacccattgacggcccccccaaaaaagcagtcactcttaacccccccgaaaaaaagaaaaactccatccccccggcatcaagatattcgacaacaaaattctcaccgaggcctcaaaagcgcccctgagggccgtcgcactggcgtcatatctgggcgacgggttcgccgccctcggtagccgcgcccccccgcccaaggaccatctgatggcgttcggggcggtactacacaccagccagcacaatatcggtaagtgatcgttttggggaatttaggcattaagcggttaagggtccaggaaaacatagaaaatctggggggtttgcagtgagaatcccaaacaggcaagttcttaaggttagtcacatataggatactgcaatcgaaatcatttcatccaagaatcagcactaaatctttgagttgtgcttgtagttctatagaataatatcattgggaagtcaaggatgaaacattttacagatcgaaaatagaagttgtttacatctaatctagattaagtaatattcatgatgtcctctatcgaaatagaatgaaaacacctgtttgtaggcttcgtataatatttaaattgtttataaaatctgtagacgagtgatcaatgacaccaatgacacatttcaaaaatacttttaaaagatggcaaagaagtgaattttcgaaaaatgtactgacaaaaaagtggaatctattaaaaatggcttgatcgctatgccgacgggatgtggtcttagattttcaactggtggtagaaagacataagaaaagtagggtcgagtgcggtcgaaagtccttaaaaggaagtcaaccccttgaaggatcggcgaaatgcgatccctaggatggtgggttaatacaataccgcttgcccgcaatgggttaagatggccaaggagtttttaatggcgacggctgggcagcagcaaagtttttgcacttttgaacttgcttcccgtttttaggggaccgccggcgaggaggagagggg

SEQ ID NO: 22454 - DNA, 743 bp, DROSOPHILA
atgcgcctgctagcatctcgctcgcacccaggcgcgccattcgtcgccgcttcggctcgccgttcgtgtgtgtgcgtgtgcgctcggctggcagctatcggtaatcgggccgtccgctttgccgtcgcgtttgccgttttccgttttcagtttttgtttgacgttcgcgtgaagcgcccgcaaaacgcaaagcgcacgaggcaacgctcgaaaaaggagccaacgcagccgtttaccgttagtcagctgtttaccgttccgccgcgagatcgaaaaccgagaatttttgccgttgttcaaatttttttgcaagtgagaatcttgaacaacaagaagaatatacaacacataaatacaacaaaaccaaggaatcgccgaaaagccgatagtgcaaagtgtttaaaaagaaaagaatcaatttcatatacaacaactaaagaaatactggaatataaggcataatagaagcggaggaagtttcttcaactcaaagaggagcggaatttcgcgctttgtttttgttttgccaaatttgccgccggcacacacgtgctatccccctcttgctcgcaccttgccacccagtctttatgtgcgttaaccgttaagtgtgcagttggggcccgctcctatctttctctccctctctctctcgcttccgcacccgcacacacacacatatatccacacccacgcgcgcctcgttcacatacgcacacacacgcgggacttaacccattgac

SEQ ID NO: 22455 - protein, 153 aa, DROSOPHILA
MRLLASRSHPGAPFVAASARRSCVCVCARLAAIGNRAVRFAVAFAVFRFQFLFDVRVKRPQNAKRTRQRSKKEPTQPFTVSQLFTVPPRDRKPRIFAVVQIFLQVRILNNKKNIQHINTTKPRNRRKADSAKCLKRKESISYTTTKEILEYKA

SEQ ID NO: 22456 - DNA, 3068 bp, DROSOPHILA
actggatcctggtggccacgccctcgtcgcccactctgcgccgcatgtcgggattgcatttgcggcgactttgccgctttctgggcctggcacgacccaccttggagcccggccatctgctgagcatcagttatgagcggaatgttcagcggctgggcgattcgagtccaaggccaagatccagttacgcctatctgggcttgccctttcagtacctatatcgtttcctggccactggacgtctggagcaaccgccaggtgttgccattcgtttgtatgcccaaccggaaacagccttggttcactgcgacgagctgagctcgctgccgcagcagcagcatgtccagtcggaggagcaatcgtccagccaatccattgcagagagggagcagtctggaaattcaagctcgctgtgctggcggaactccacgctcactgcaccgcaaagggcactggtcatatgcgaactaccctcggagttggacgaatccattgcccattcgccggagaagcattttctcgagtactttgtgcaggaatcgctgtcactgcgaccctgctatctgctcctcttcgacgaggcggtggcctccaacataatgttcgtctggccgggcaaatgtattgagctggagcatccgggtccttcgatggtccagagatcgcgtatcaggatcatgaatatcgtccggaatctgagcaaccggttgggagcagttaggcgggctttagccgccatttagatttttattttatatatggccaaggacactgatctcggccaggtgccgtccgtcgttcaaagtcctggacatgccaactccggtgaactggagctacttaatttttttggaatttctcaaacaattgttaataaatatttggcaacttatactaatttattgatttttggccattctataaaagaaaaaactaaataaggatcagtggatctttgttgtaactgatggatgcctgcagattctagatgccttcagcgctaccgggactgatagttgatacgattgcgaggagtgtagtccatgacgaatctgtggcgcctctgttgatactgcgactggctaaggaagatactggccaatcccttgatggtcacaaaggtcagtccgcccaggaggatgctcaataacttgttctcctcgtagatcctgccgaagagcttctgtcccagcaccacggaaatggtgggcagacttagggcaatgcagaagctggtggaggcgcgaccaagttgctccgttgccaagttaccgccaattaggccatccgaggccggatactcgcgctccagctcatcgaagtactcatcgctcagcggagcaccgggcaggggtagacccacagcatccagttgctcggcgggaatggcgctacgtttgcgccgacgcagccaacggatcacgcagtcctcccagcgcacaagcctgctgagaagtaggagcgtcggcaccgatggcagcacaatcatcagcagcgagggatcctcttggagcagcttcatgcccgtgctgtagccggccagttggagcacggtgagtgctccgtagatcaccgcggagaagtaaacggtggccgccaggatgcccatcagaacactgggacacatacgatcgcagcccttgtccagtcgctccagcatggcatcgaagcggcatagtggcggcatcactataatgtactccgtgcggcattgggtgcacgtcacgggagcacccggcgatagcatctccttctcatcgatccagcgactcagacaggcctcgtgcacccatttattggtgccgcgacagcgacacggatgcacccaatcccttcggcggtgatcctcatcgcccctcaggcaaatccagcacattctgtcatccacgacattgccggatggcggttccaatccgcttctcaaacggcgcagccggctgtgaagcggtaaatgcataaattgtcggctcatagtgatggtgatgttttgggcgatggcaacgatgaccaccgaagatccagtgatccaatctccaggcggagcaaatgaaatttggaaaggtggcaacttgaattttgaacggctgcaaataacccgcttatatgtactttaaactcgaaggttcctgattatcctgcttctcgaatcatttttgtgacatttcgacataacatacacttttacaacactacgttttcgaaacacaccgatttcttaaacctaacaatttttcaaatattctatatgattaattccctaatacttggaaattctgatcaattgcttaattctaaattatattatataatataaaaactacagcaataagtttcagatacatcataccaatattttcgattatatttatatatttacaatgctaagaactcgattttgaggcatttttcgagtgcattccctgcggtctactttgttttttttttttttgtaggtggtttactttcggcgaatgtggcacatgccaaaaggaaaacctgttggcccacaaagtgaaaataggcgaaggccaagtgcaagagtagccagcacaaactggatctgctggatgtggatgcaaatgcgactttgcctcctttttttctttcccaaacatatgaaacgtaagtaaagcaagttcaaacttaccatcccgatgatcctcagatggaaatgtatcttatggctgcaatttaggagcaggatcagcactggccactaatccactgaacataaaacataattttcacacacatttccgacgaaagcaacttcgcgacggaccgaaaaataagcagaacctgtcggctcgagagcagaagaacatttggccagcctcgaatatctccagcttggccagaatttgagaaccagactgggaaagccagcctttccattccacttttccccactttggccaacagctacacgcagaaaaagttgatttcaatctagaaaaaggtatttataactaattttataacataactatatacatatattccaagcaacgtttatatatctgatttgagatcttgatactatacaataatataaacatatataacat

SEQ ID NO: 22457 - DNA, 1068 bp, DROSOPHILA
ttgccacctttccaaatttcatttgctccgcctggagattggatcactggatcttcggtggtcatcgttgccatcgcccaaaacatcaccatcactatgagccgacaatttatgcatttaccgcttcacagccggctgcgccgtttgagaagcggattggaaccgccatccggcaatgtcgtggatgacagaatgtgctggatttgcctgaggggcgatgaggatcaccgccgaagggattgggtgcatccgtgtcgctgtcgcggcaccaataaatgggtgcacgaggcctgtctgagtcgctggatcgatgagaaggagatgctatcgccgggtgctcccgtgacgtgcacccaatgccgcacggagtacattatagtgatgccgccactatgccgcttcgatgccatgctggagcgactggacaagggctgcgatcgtatgtgtcccagtgttctgatgggcatcctggcggccaccgtttacttctccgcggtgatctacggagcactcaccgtgctccaactggccggctacagcacgggcatgaagctgctccaagaggatccctcgctgctgatgattgtgctgccatcggtgccgacgctcctacttctcagcaggcttgtgcgctgggaggactgcgtgatccgttggctgcgtcggcgcaaacgtagcgccattcccgccgagcaactggatgctgtgggtctacccctgcccggtgctccgctgagcgatgagtacttcgatgagctggagcgcgagtatccggcctcggatggcctaattggcggtaacttggcaacggagcaacttggtcgcgcctccaccagcttctgcattgccctaagtctgcccaccatttccgtggtgctgggacagaagctcttcggcaggatctacgaggagaacaagttattgagcatcctcctgggcggactgacctttgtgaccatcaagggattggccagtatcttccttagccagtcgcagtatcaacagaggcgccacagattcgtcatggactacactcctcgcaatcgtatcaactatcagtcccggtag

SEQ ID NO: 22458 - protein, 323 aa, DROSOPHILA
MSRQFMHLPLHSRLRRLRSGLEPPSGNVVDDRMCWICLRGDEDHRRRDWVHPCRCRGTNKWVHEACLSRWIDEKEMLSPGAPVTCTQCRTEYIIVMPPLCRFDAMLERLDKGCDRMCPSVLMGILAATVYFSAVIYGALTVLQLAGYSTGMKLLQEDPSLLMIVLPSVPTLLLLSRLVRWEDCVIRWLRRRKRSAIPAEQLDAVGLPLPGAPLSDEYFDELEREYPASDGLIGGNLATEQLGRASTSFCIALSLPTISVVLGQKLFGRIYEENKLLSILLGGLTFVTIKGLASIFLSQSQYQQRRHRFVMDYTPRNRINYQSR

SEQ ID NO: 22459 - DNA, 3077 bp, DROSOPHILA
aagccctacaagtgcgacaaatgtgattcggccttctcccgcccgaaggcgctctatcaccacaagcatctgcatttgggcatcaagaagttcaagtgcaagatctgcggtaatgcctatgcccaggcggcaggtctatccgctcatatgcgagcgcacaagctccaggcgtccgtaaatgcgacggagggtgccgaggcggaacccatcgagatgcttttcacctactgaccgaactgagtggaaacctcctgtcgccttaagctctatttccatataactcaagatattcaagatacaccacaaacaatgttcactgttctagattttatagatagcttatcaatgtttatggacacccgactctttcgttccaacttttcacatatatatatatatctgtaaatagtattagacattttccaatctaaggccgcaaatgttcttttttaatttaagtgatgaagccttccatttctgtgtctcaaaaattagtacctacatatcagtagaagtcgtgtgtaagctgttatatctgttagtttagctagttttaagccaagaccttgcttccgactaggacaaaccacgtatgtacaataaatgttctgatacacgttactccaacatggactttcaaatgggcgcacaaagaagccagtttgtctatagctcaacatttatttcgaacaggaacttataactagtcgcatattggttacacttggatgcatatacatgtatatatttagattcaatttggtacagcagctggtagtaagcataacactgcggtaaccaagacatccatgctggcaatcccgacatgagacatatgtacacacttgggggatcaccgaatccgtaacttaactatcctagagatgcgatgcacaacacaaaaaaaaaaaaaaaaaacaaatcagaagagagggaaaacaaagcgagacggcatctgtcctggacaaatgcatcccccaacaataaggtgccacatggcttaggcccacacccgtatggtgtagtcccaactgccggtggatagagcggtgccatcgggcgagacctggacgcaggacaccttgttctcgtgcccgtacagcaggcagaccctttccgatttcagcgtgtcccacaagttgacggtgtaatcgttgtagccagcaaacagtaatcttccactgaccgaaaagtccaccgaattgacgccaaagatgatgctctccttggcgaacacggccacctcgcgatccgctcgcatatcgtacagccggcagctgctgtcatccgatccagtggctatggcatctccgcaaggatggaacttaacgctattcacatccgattgatgaccctcgaaggactgaacgacatgaccagagcgcatgtcccagatgaaggccatgcgatcgcaactgcccgagacaaaggtgttgcccgtttcgttgggagccaaatcgatggccattacatcgccggaatgtccgtggaagctttgcagtagctggcccgattccacgtcccacaaagcgcatgtggaatcgccactgcccgtgaggatttgctgatcggaattcggatagatgcagcacgacatgtagctggtgtgggtgcccactgtgcgcttcttggcggccatctcctcatcggaggttatcggatacacggtgaccttattgtctagtccgccgcaggccacaaaattgcccgacggcgcgtaggcacaggccataatccaggtggtgggcatggtgacggcgtgctccttgttcgtggtgaacgcatcccagatgatcagacgtccgtcctgcgacgaggagatgatgtgacgcttgtcgggactccagtcggtgcacaggaccttcgcctggtggcccttgagcaccttacgcggcttgatgttcacataggcgatctgctccagccgctctgcgatgttcgacagattgacgtcgttcagcttctggcgctcctcctccagtttggtcttcaaattctccgcctctcgcaccaaactggccatcttttcagtggcattcgcgttcgcattgctcgctggcaccgccgcctccgacatggttgctctgagatggcgcttctatggatatctctcggggattgtgtgtcctatcccgttcgaacttctccaattggacagcgaaaaatcaatccgaaaaaaagtgtatactcgaatacgaaaatccgaatacacagcgataggcgcggtcggttatcgataagttttaccgttggtaaatggcagaatgtaccgttacatatcctttattttcggagaacttgataaaagattgtgacgatgttattattattaattttcatcaatatgacaaggtattgatgaaaattggcgtcaaaatttgttaaatttttgttctgtttttgttaaaagccggttttccgaatttccctcataaaataatcagttttttgcccagaactttgaaaataattgaccaaatatggtatgtcatatctcgttgaactcgtaatgaaatttccaatcgaattgcattcaaatttgcgaattcaaaatttttccatttttttgcaaattttaatttaatgttaccccttaaaaaacatgaaaaatatgacacaaaaataaatttttctatgcccgcccaaaagtgatagggttcgttagtagtgataattggctgttcaaaacagttattctttaagctgcatgatgattttccgccaagttatgactagaaactacttgtgataacgaacttatcggagtaaataccatttcaaatgtggcgccacaaccaaggtaagctcaacactgcggttcgttagccaacactaccatcagctggggaaaaccacccttccccacccccttgaaacaaacacttacaaaaaagcgacgccaacggctggaatcctctgctaatccggagccagttgaccgccacttccacacaggcagaccagggagcaagccgcgatgatcaaggtgcagccaccgccggatgtggccggtggctaccacaatctgcgttgcggcgaggtcttattcagtgcacccgcctcctacgaagtgagct

SEQ ID NO: 22460 - DNA, 1077 bp, DROSOPHILA
atgtcggaggcggcggtgccagcgagcaatgcgaacgcgaatgccactgaaaagatggccagtttggtgcgagaggcggagaatttgaagaccaaactggaggaggagcgccagaagctgaacgacgtcaatctgtcgaacatcgcagagcggctggagcagatcgcctatgtgaacatcaagccgcgtaaggtgctcaagggccaccaggcgaaggtcctgtgcaccgactggagtcccgacaagcgtcacatcatctcctcgtcgcaggacggacgtctgatcatctgggatgcgttcaccacgaacaaggagcacgccgtcaccatgcccaccacctggattatggcctgtgcctacgcgccgtcgggcaattttgtggcctgcggcggactagacaataaggtcaccgtgtatccgataacctccgatgaggagatggccgccaagaagcgcacagtgggcacccacaccagctacatgtcgtgctgcatctatccgaattccgatcagcaaatcctcacgggcagtggcgattccacatgcgctttgtgggacgtggaatcgggccagctactgcaaagcttccacggacattccggcgatgtaatggccatcgatttggctcccaacgaaacgggcaacacctttgtctcgggcagttgcgatcgcatggccttcatctgggacatgcgctctggtcatgtcgttcagtccttcgagggtcatcaatcggatgtgaatagcgttaagttccatccttgcggagatgccatagccactggatcggatgacagcagctgccggctgtacgatatgcgagcggatcgcgaggtggccgtgttcgccaaggagagcatcatctttggcgtcaattcggtggacttttcggtcagtggaagattactgtttgctggctacaacgattacaccgtcaacttgtgggacacgctgaaatcggaaagggtctgcctgctgtacgggcacgagaacaaggtgtcctgcgtccaggtctcgcccgatggcaccgctctatccaccggcagttgggactacaccatacgggtgtgggcctaa

SEQ ID NO: 22461 - protein, 358 aa, DROSOPHILA
MSEAAVPASNANANATEKMASLVREAENLKTKLEEERQKLNDVNLSNIAERLEQIAYVNIKPRKVLKGHQAKVLCTDWSPDKRHIISSSQDGRLIIWDAFTTNKEHAVTMPTTWIMACAYAPSGNFVACGGLDNKVTVYPITSDEEMAAKKRTVGTHTSYMSCCIYPNSDQQILTGSGDSTCALWDVESGQLLQSFHGHSGDVMAIDLAPNETGNTFVSGSCDRMAFIWDMRSGHVVQSFEGHQSDVNSVKFHPCGDAIATGSDDSSCRLYDMRADREVAVFAKESIIFGVNSVDFSVSGRLLFAGYNDYTVNLWDTLKSERVCLLYGHENKVSCVQVSPDGTALSTGSWDYTIRVWA

SEQ ID NO: 22462 - DNA, 3539 bp, DROSOPHILA
aggatgctgtccaattttcgggaccttttcaggctattcgaggaagactggaacgcggtatgagtaaaatagatcccacggacgaactactaatgctgagaatacgcacaagaaccaacgaggtgctcctggtgccagactccaagataacactactcgtagtacagaacgcgcatgattacttcgaaaaatgattaaatattttagatttctcaaagacaatttcttattcgttagcgtatgttactttattattaaaacatgtaccaatcactcgtatgtcagtaattggtatttacacgtgcttttacatttttaaggcatttaaatattttaagatgacgtatttaacgaatatagcaaggaaagaatccaatccgtgtgcctcataacattcgtaaaaacgagtatgtttttcgatgaaaaactgaaaatgcccaccaaaatgtagcgtatctggccattggcattcatccctccaaccactatgtagctacgtttctggcggggattacttgtgtcggatggatctaccatgcacacttgattttcgttgatttgaaatccgagatgtttcgcgcattggctcccttccattagcctgacgtcgaattgttcagctaaatctgtatcaattattttcaattctcgagccttttcggcgttttgctggtatatttgcgttgtcaaaatgcagatgggtttcattgctgtaaaagaatataactgtaaatcgaggcaattgctatgatagtaggtatgttctacctgtgctgcttattgatcgaacaagtttgagtactgctatgtcatttcggtaatcattcgtagtaaaatttgggtgctttgaaaccgattcaatttggttgattgcgcttattccttcgagcactacgaacacgtatctgaataattaatttaaaatggtatcaaaataaactagtaactaatgtgaaaaatagcagttaatgcacaagggataatccttcgaacaacttacaaataggcggcaactgtgggcaggtctgtggcagcagcgatgatcaattctaagaaaagaaactcaatcttgttaaatttatactcatttaattgtggaattctcgagtgaaagagtatacttacgatctgttattaatacgccaacggcataagaaccaggccaataaattcttagctgcgcgatcggtgccgcgatatcctgactgcagctattgtacaacatcgaaggaagtggtggtgaagccgcaggagtccagtgccgattagcgtcaggagcaatgggattgcccatggcaatgtctcccccggacacgccgattggtaggtagtcatttctagctattgtcgatgagatccaatccacatagctggtcacgtcggtatagactcctactccacggcattctggatccccaaagcttacgattcctaactgcacctcataacttttattggaaggaaacaatatattcgtggacaagggacccccagaatcgcctctacaggtgtctccatttttggttccagcgcaaatctgtcttgaattgagattaaagttcaatttgcgtttgcactcatttcttttcaagtgtagaagatagatggtttgcaacattatgctcaattttccgttcctatttccccagccaagggctctgaacgttttcaatttttcaacactccctttgagagccggatccaaaaagatgcaaattggttgaactcgaactgcgaagaaatgcattgaaatggggctacggtggttaaattgcatacatacctgtgtagacgatactctccgacagttgaagcagtcctatatcatttcggtattccgatgcaatgaagtcatggtgcacaaagacattaatgactgtgtggacagcagcgggctcatttatgttgcgtgcccccaacctcacgtatctgtatttcataaatccacatatttatatattcgtttttaaattaaccgcgtaagcacgaattattgtaacttcgaacttcacttacagatcatatcctcttaccaagcaatgagcagcacttaacacaaaacctagaaaaaaaatatatattcattaatatatagagaaggcaagaacagtaatcgcgactactgtatacccattacacagctaggaaacagagacagaaatgcagatatgcaacatttagtcaatgacatttaaataccttaattcctacaaatttcaacgcaacatgattagctaatgacatatgtatgtgtattatagggtagaaaaattgtgcatatacttgtgactggtatggtatacataagttaaaaaagacactaacgcatatgtataattgtgccaccgcattgaaaatcggatgaattgaatatcgctgccatccatatagaatttggctcggctgcatcgtcaccaccgctaattttgggacgggttgatatcccacaaggagtctctaaaaacttaaagtgttcattttctgtaacacacaaagttaacaaagataacaaagcaaccgagaccaacgaccgcatttctccctaggcaatgtacgactaaatccataacatttcagaaagcttcttatcagctcaaaacgcctgaatattaaaagatcttttgaattttcttttttatatgattttgcacaactttttgggttttcccttttagtttaaattaaaataactattgataagaaaaaaaatcaaagaatgtttttttttttttggtttgtgggcgttttaggatttgcattattgtgcgttcctagaatgtgcatgtttaatctcgcacatgggaatctcggatgaagaatgtacatacatatgtacatacaatgtgtgctttataaggtcggaaacattttcctctatgtgatacgttcttttcgaagaatctggcgtaccctttgacccacgagtaactagtatgttaatgcctttcaatcagagaattaatattaaagattagaaatgtaacattgatattcacttagatatgttcataggtaaagaaaattgtacatataaagacataagatataagatgtaatagttcctaacaaaactttagtgctaatcacgcagacgtatgatatgacttattttgtttgaaaaccgtttgtcacttaacaaaaaacaatattggaactgagttccaaactgagtttagttatagaactatcaataagttcagaaacaccttttaaaaataaaaatattaccttttatttaaaaaaaataaactggtgtggtgaaacaattggaactagtatcttgtcaattaaatggcaactctatcgttcgaagaactttatggaacacacggacgcaatctgaatttgtgaaaatggaagactagtctctttttcgacgtggaacggatcagtcggtaaaaaagataacgcggctgcgaatatacacacttgtatattttattttaaactttaaggtttattggtatttaaatttgtcgcggcaaatcagttgcttgtgttaaaggttactcttcttcaatgttttaaacaataataat

SEQ ID NO: 22463 - DNA, 1137 bp, DROSOPHILA
gaaatgcggtcgttggtctcggttgctttgttatctttgttaactttgtgtgttacagaaaatgaacactttaagtttttagagactccttgtgggatatcaacccgtcccaaaattagcggtggtgacgatgcagccgagccaaattctatatggatggcagcgatattcaattcatccgattttcaatgcggtggcacaattatacatatgcgttttgtgttaagtgctgctcattgcttggtaagaggatatgatctatacgtgaggttgggggcacgcaacataaatgagcccgctgctgtccacacagtcattaatgtctttgtgcaccatgacttcattgcatcggaataccgaaatgatataggactgcttcaactgtcggagagtatcgtctacacagttcgagttcaaccaatttgcatctttttggatccggctctcaaagggagtgttgaaaaattgaaaacgttcagagcccttggctggggaaataggaacggaaaattgagcataatgttgcaaaccatctatcttctacacttgaaaagaaatgagtgcaaacgcaaattgaactttaatctcaattcaagacagatttgcgctggaaccaaaaatggagacacctgtagaggcgattctgggggtcccttgtccacgaatatattgtttccttccaataaaagttatgaggtgcagttaggaatcgtaagctttggggatccagaatgccgtggagtaggagtctataccgacgtgaccagctatgtggattggatctcatcgacaatagctagaaatgactacctaccaatcggcgtgtccgggggagacattgccatgggcaatcccattgctcctgacgctaatcggcactggactcctgcggcttcaccaccacttccttcgatgttgtacaatagctgcagtcaggatatcgcggcaccgatcgcgcagctaagaatttattggcctggttcttatgccgttggcgtattaataacagatcgtaagtatactctttcactcgagaattccacaattaaatgagtataaatttaacaagattgagtttcttttcttagaattgatcatcgctgctgccacagacctgcccacagttgccgcctattt

SEQ ID NO: 22464 - protein, 349 aa, DROSOPHILA
MRSLVSVALLSLLTLCVTENEHFKFLETPCGISTRPKISGGDDAAEPNSIWMAAIFNSSDFQCGGTIIHMRFVLSAAHCLVRGYDLYVRLGARNINEPAAVHTVINVFVHHDFIASEYRNDIGLLQLSESIVYTVRVQPICIFLDPALKGSVEKLKTFRALGWGNRNGKLSIMLQTIYLLHLKRNECKRKLNFNLNSRQICAGTKNGDTCRGDSGGPLSTNILFPSNKSYEVQLGIVSFGDPECRGVGVYTDVTSYVDWISSTIARNDYLPIGVSGGDIAMGNPIAPDANRHWTPAASPPLPSMLYNSCSQDIAAPIAQLRIYWPGSYAVGVLITDRKYTLSLENSTIK

SEQ ID NO: 22465 - DNA, 4416 bp, DROSOPHILA
gcgccaaactaattttactcctcacaaactcacagcaataataatattgggtgcatttccctgggtggcgaatacggatagtcttgctacggtatcctcattgcccactatctccttgaacttcacggggcggtacttctcaatccacggcaagtgactgcgcttgtcgtccgccgttttctctggttcttccggcattttatgtgcaatttcacaaattcgcacaaacaaattgaagcgtggggctgtagtgtggccgtttcttgggcgccaaaacacaacggttaggcctggtattttttacatttatcgatttcttagcaacaccgataggtccataaaggtaattatttgaaattcaaatataaaaaaaaaacgttcagatcataaaatattctgtaaatgaggaaaagaacacacgctcaacaatatataaaaagaatatgttttaagcaaacattagttaaaaattcttgtttacaatgtaaacgttagatagatgaggatttcaaatcaggttaaaaaaaactaaaaaagttaaatttaatttaagaccaaatagtttttttttttcgttaagctttattgggtattgaagaaattacaatacatttagatgcatcaggtgccaaaaatttgaacttgcatttgaatatagttcgaattatatcatacgatcagtgaccaattgcaaagtatatcataagtttttgaaaagtactcggattgtaagacaacttggttcaatagtttatctttagtgttaacatttcaataatttaatttatgtcattttgccgaatatgtgtattcttgcacaggctcaaccataattctttcaatttgactaattcggaaatacattaaacattgttgcaatccgcggtgaatattttatggtgctgtgtgagttgcgtgtcccgtgatttcttctacatttcgtactacagtatatgagccagtataggggcttaattgaaataatactacgcgtattattgtagttaatatttatttatattcggctaagaataaaatactatatatttgtaatatatatattatgtaatgcgtatataatttatgtattgtatttttaatatatattgcaatatgtaattagtataataatttcttaaggaatcattttgaacctccggtaaggaataacaaactatttttaaacacgacaaatgtgacaaaaccattaacaagattatgacccaataagttccttagtcctccttcgagagactgcccaaatcgctgaggaagatttcgggcgacaggatgtgcgaagagccaacaaggacctcccaattgcgaaccgcattggtcacctcgtaggcgcaccgcatctcggacatactcacgccgcccacgatgaagacaataagcctgggcacgttctttacctgcgcctgtcccttgtccttgtgccagtgaccgtagcgggcactggttggggcatgataattggtattttgggccctgccctcgaggaaggggaagtggcggagatcgagcttatcctctatgcaatcctccatgatgtccttgatcaccggtgtccagcgggacatctggtaggtgctttctgtggtgcgctccttgcgcggcaccgagtactgcttcttgcgcgaatctgcaatgacattgatgcccaagcaactaaggttacgcaccatatcctgatccttcggcgacagctgggcatgcgtaaacagcttggtcaggttctcctcggaaattccgttcttgatcatgacgtacagggcaatgatgcgaaccttgtcgtagttcgagacattggcgtccagcaagatgggcacaatgttgcgcatatgatccttgatcttttcgccctcggcgtccgtgcccatggccagatcctgttccacgcggcacagcttgtccacgtagttctggtacgacttcatgcagtcctcggccaaatgcaagtgggtggagtacttggacagctccttctggtactgcggcatcttcttgatcatctgcgagagatcgcgcatcgacgacttgtcagccgagcccatgcgcttagagtcggtgaatttcttaaggttctgagtcacctgggtggagaccacagcgatatgctcgtgacgcagctccacccacaagtcgtcgttctcgtcgagcagcacctccttatccggctggttggggccgggcgtgtagcgatacacgtcattgacgatgggtagcaaatcgtaggccatggcctgcagggtgagctcgtgcagcagcggcgacacgcagtcgaagccgcgatccaggatcagcagctgggatcgtgccttctcggggccctcgcccatggtggcatcgtcggccttgtaggcgtccagcttctgctgcaccgacgcggccaaatcgatgttcctgtcccagtcgctgcggtagcgcacatttgggtactccccaagggtagcgcacagtgtggctatttgctcggcaattcgctcgatgtgcttgctccgaatggaggcaaaggccggcgagtagaggcattggaatgtgtccggcgagtccagcgagaacacctggcattcgtatggcaaaaatgcaatgttgatctccttcagcgtcttgatctttccggccgcgcacgacttgcacagatcgttgaatagctcctcgggacaaacttcggtgaagaagacatgggcatagcgatacatgggccgcgctgggttctcgaagtctcgtatcagaccgcgcactgactcatccgacggcgtaatcagatagatcgcgtccatcgtgggcagcggctcgcgcttcttgttgatgtcctcaaccagggtgatgccctcggcgctgatttcgtgcatcttggtgcaggcggacaccatgcgcatacccagcttgtccaccaccagcacccgccattccatgccgcccgcccccgcagcggacgtaacgccctgctttttgggtggtggaggcttgtacttcaccacctcgttcatcagcttttggcccaccagcactttcaaggccattttcactgcgttttattggtcacgggcgcaaaggcaactcgattatgaacacactgcgtgtaaatatgtctttttagcttattccgttcgctttttcgcgtgggctaacttgacttaaagaattttatctattccttggccaatttttctgtatttttttcgtttgatgacttagccttagtgatgggcgaaagtcgattgctggctagcgatagttgatatcgatattactgtctagcagagacgcgcacccgtctcagtgcgagtgtggatttctcagttaaccgagaacggtcacgctgctgctgtcgaggaaggaaaataaaataattttgctggccaactggtcgatttaaacggggaaatgcagatgcaaacgtacaaactggtggtcgtcggcggcggcggcgtgggcaagtcagcgataacgatacagttcatccaggtaagccgcccagcatcggcccaatccctggtgacgtcgctttccacaggggcgtttgaatgtgggagtggggggcgatggcgcacaggggcggtggcagggggacggcccttgttttggccagagcaacaaacaagcaacaagcgactgtgatgtgcgtctgtgtttggacatgcgtgtgcatagtttcgggccgagatcatcaccaacacaatcatcatcatcatcatcattggcagcatcatcatcgcggtggccacacccccgtgtgtatctccaattggggatcaagtggtcagagcccagaaccagggagttgcgttagacgcagcccccagttttctgggtgtgccgatcgattccccgagagtttgtgccatggtcacgaccacaatgaccgcccgcttccatttatttttagtcatttgcgtcatctgcacatctttcgtgtatatgctgtagcttttccccaagatatatagagcatagtggatagtgaatgataaaagtgacgtgtgtaaacaaatcaaaggcggaatgataaacgcaccccgcccacataaaaaacccagtcttataatgtttatatatgtagttttgtggcctcggcagctggcggtacaataattttaatcctaatcttgcagagctacttcgtcacggactacgatcccaccattgaagactcgtacacgaagcagtgcaacatcgacgatgtgccagccaaattggacagtaagcttcctttctttacccttaccagattcataataacctgatattttacctagttttggacacggctggccaggaggagttcagtgccatgcgggagcagtacatgcgctccggcgagggattcctgctcgtcttcgcgctcaacgatcattccagcttcgatgagatccccaagttccagcgccagatactgcgcgtcaagga

SEQ ID NO: 22466 - DNA, 2416 bp, DROSOPHILA
agtttgtacgtttgcatctgcatttccccgtttaaatcgaccagttggccagcaaaattattttattttccttcctcgacagcagcagcgtgaccgttctcggttaactgagaaatccacactcgcactgagacgggtgcgcgtctctgctagacagtaatatcgatatcaactatcgctagccagcaatcgactttcgcccatcactaaggctaagtcatcaaacgaaaaaaatacagaaaaattggccaaggaatagataaaattctttaagtcaagttagcccacgcgaaaaagcgaacggaataagctaaaaagacatatttacacgcagtgtgttcataatcgagttgcctttgcgcccgtgaccaataaaacgcagtgaaaatggccttgaaagtgctggtgggccaaaagctgatgaacgaggtggtgaagtacaagcctccaccacccaaaaagcagggcgttacgtccgctgcgggggcgggcggcatggaatggcgggtgctggtggtggacaagctgggtatgcgcatggtgtccgcctgcaccaagatgcacgaaatcagcgccgagggcatcaccctggttgaggacatcaacaagaagcgcgagccgctgcccacgatggacgcgatctatctgattacgccgtcggatgagtcagtgcgcggtctgatacgagacttcgagaacccagcgcggcccatgtatcgctatgcccatgtcttcttcaccgaagtttgtcccgaggagctattcaacgatctgtgcaagtcgtgcgcggccggaaagatcaagacgctgaaggagatcaacattgcatttttgccatacgaatgccaggtgttctcgctggactcgccggacacattccaatgcctctactcgccggcctttgcctccattcggagcaagcacatcgagcgaattgccgagcaaatagccacactgtgcgctacccttggggagtacccaaatgtgcgctaccgcagcgactgggacaggaacatcgatttggccgcgtcggtgcagcagaagctggacgcctacaaggccgacgatgccaccatgggcgagggccccgagaaggcacgatcccagctgctgatcctggatcgcggcttcgactgcgtgtcgccgctgctgcacgagctcaccctgcaggccatggcctacgatttgctacccatcgtcaatgacgtgtatcgctacacgcccggccccaaccagccggataaggaggtgctgctcgacgagaacgacgacttgtgggtggagctgcgtcacgagcatatcgctgtggtctccacccaggtgactcagaaccttaagaaattcaccgactctaagcgcatgggctcggctgacaagtcgtcgatgcgcgatctctcgcagatgatcaagaagatgccgcagtaccagaaggagctgtccaagtactccacccacttgcatttggccgaggactgcatgaagtcgtaccagaactacgtggacaagctgtgccgcgtggaacaggatctggccatgggcacggacgccgagggcgaaaagatcaaggatcatatgcgcaacattgtgcccatcttgctggacgccaatgtctcgaactacgacaaggttcgcatcattgccctgtacgtcatgatcaagaacggaatttccgaggagaacctgaccaagctgtttacgcatgcccagctgtcgccgaaggatcaggatatggtgcgtaaccttagttgcttgggcatcaatgtcattgcagattcgcgcaagaagcagtactcggtgccgcgcaaggagcgcaccacagaaagcacctaccagatgtcccgctggacaccggtgatcaaggacatcatggaggattgcatagaggataagctcgatctccgccacttccccttcctcgagggcagggcccaaaataccaattatcatgccccaaccagtgcccgctacggtcactggcacaaggacaagggacaggcgcaggtaaagaacgtgcccaggcttattgtcttcatcgtgggcggcgtgagtatgtccgagatgcggtgcgcctacgaggtgaccaatgcggttcgcaattgggaggtccttgttggctcttcgcacatcctgtcgcccgaaatcttcctcagcgatttgggcagtctctcgaaggaggactaaggaacttattgggtcataatcttgttaatggttttgtcacatttgtcgtgtttaaaaatagtttgttattccttaccggaggttcaaaatgattccttaagaaattattatactaattacatattgcaatatatattaaaaatacaatacataaattatatacgcattacataatatatatattacaaatatatagtattttattcttagccgaatataaataaatattaactac

SEQ ID NO: 22467 - protein, 597 aa, DROSOPHILA
MALKVLVGQKLMNEVVKYKPPPPKKQGVTSAAGAGGMEWRVLVVDKLGMRMVSACTKMHEISAEGITLVEDINKKREPLPTMDAIYLITPSDESVRGLIRDFENPARPMYRYAHVFFTEVCPEELFNDLCKSCAAGKIKTLKEINIAFLPYECQVFSLDSPDTFQCLYSPAFASIRSKHIERIAEQIATLCATLGEYPNVRYRSDWDRNIDLAASVQQKLDAYKADDATMGEGPEKARSQLLILDRGFDCVSPLLHELTLQAMAYDLLPIVNDVYRYTPGPNQPDKEVLLDENDDLWVELRHEHIAVVSTQVTQNLKKFTDSKRMGSADKSSMRDLSQMIKKMPQYQKELSKYSTHLHLAEDCMKSYQNYVDKLCRVEQDLAMGTDAEGEKIKDHMRNIVPILLDANVSNYDKVRIIALYVMIKNGISEENLTKLFTHAQLSPKDQDMVRNLSCLGINVIADSRKKQYSVPRKERTTESTYQMSRWTPVIKDIMEDCIEDKLDLRHFPFLEGRAQNTNYHAPTSARYGHWHKDKGQAQVKNVPRLIVFIVGGVSMSEMRCAYEVTNAVRNWEVLVGSSHILSPEIFLSDLGSLSKED

SEQ ID NO: 22468 - DNA, 3370 bp, DROSOPHILA
atggaagttcttgtagtagtgcggtcgcaccacagtgtcgccgttgatgtagatcccgtactgctccaggaagaagttcacgttggtattgaactccggctccccgccttcccccaggagcaccaccagactgcctccttgcacctccacgtagtgcttcagcacatcgaattcatcctctgtgaatcggtcctgtggcccggcgagaacaaatatcttaacccgagcaagtcgctccattctgagttccgcatcatttctgtaaatccattttaaaacataatttaataatagttcattctggatttttgattcattcctaagtctaaaatgtattacatttaaaaaagttttgttttaaggaaaacatcctttatgaaagtgggatatgcaaatattaaagatcaatcatttatttgaaaacctgtatgagctgattattttgatagttgaaaaatatttgttttgtttttatagtaatgtttgcttattggccaaaataatttctgggatactgactgttccacattccaattgaccttcaatttgcgatgcatcattttgtagttgtccgatatttgaaatcgttcattttttgatgtatcaaagcagattaccggcttgcttgacatttttcatgcagattcaataaactttttaataaaattttttgtttttacatttggttgcccggcaacgcagtggcgccctcttgtggtttcgataccagtgttccgccggtgttttccaacacttaagttcggttgattgttgcacactgtagggtgaccgttgtacattaattttttaaatgtggtatatcggttgctaacaaaaatatatgtttattattattttaagaactttattgtttaagctagagtttatttcccaattattacgacgaataacaataggacactttgtttgtttttatttggtctactcaagcatttgaaagtatcaatatcatattttctgcagcgtgtggtattttttcttactttaccgcggtcacactgatccatagctgtgtgaaaaattacgaaagaatttttggtgttcaccacttaagaccgaccgaaattttcgcaaaacgaacaatggcatcgatctgtggacgcatggcgctccgtgccgccgcacgccagaatgttgcctacacgcccgtgcgcttctgcaaaagtaagtggtgcaaatgcggagggaagtcccacggccagctgcttttcggtcacgttcgccgatttggcggagtttctgccctggaattgcataatattggagtgcaggtggaagaccagcatggcactgtgctccactaacctggagagcatcagatttggacccacagaaaagtgtctattgaaagtgcgaggttatgtaataactatgcgctgggaaatgtgcgacttatggtcggagagggggagcggtgacaccacagtgcggagttaacacctcgacagaagctggccgggattacccctccgaagagctgtacttgtgacggagcgtctgggtttggggcgtctgctgtttatgtaaccagtgacccattcgcttatcaatttatgagctaattcctaattgcgtttcccacttctccgccttgcagtgatgaacgatcctttggagcacgccactggtatcgagaagcgcgagctgctgcttaaggccgccggcaatgataaccccttcgacatgaaggtcttcaagcggggcgccggcaccaaggagaaccccaaccttattccatcggccttcgatgctcgcattgtgggctgcatctgtaagtagtccaacaacaccagctgcggtcaggataatggcagagattggagtattctatcagccgtaaaatttgcattctattctgtttaggtgcatttcaatgacgtttctgtgcgaagcaaaatttaattcctttcattgtaatatttatccaattgagtcgctttaatttaattaagttttgagctctgattagctacacaccgcgtttaaacgttttcatatattattttgaataattgcacacactccaactaaggaaaccttaatgcctttatcctgaccaaaaataaagcccatcattccagtagagtactttctaacaaacctttcattccaaaccaggcgaagaggatcagacctacgtgcaatggatgtggctgcagaagggcaaccagaaacgttgtgagtgcggccattggttcaagctggtggagaaggcagctgtttaaagttattattaattaattcaataaaccaattaataacaaaaacacaacaactactaagctaaaagtcaacccacttagctgtccaaataaacaaacatcaacccaaaaaaaaaaaaaaaaacgaaactgtgaacagagaggagtgaaagggcggcacagcttccattttcagatctgcaaacgtgttttcgaacgcagccgaggaaaattgcttaattaacacaaaaagcgaacaataaagtctaaagaagagattttgagtgaaaatcaaaggatttattttaaaaaagcttgtctaaagacagaagaaagttgaatttcgtttaaaaatgtttaaaatcgcagaactaatttaattttaataaggcagtaggcgtcttaataagaaatcaaacattttcaaaaccctttgatcagattcaactcactcaaagtgggaaattctcgtgtgataaccataattttctagataaactcctttaaaaatgtcgtcctacatttcgcgtctacttaaggctcagtccgcctccaaacgtctgatctccaatttaacccagcgcgacggaaagctaagctctttgcttcgacgactaggtttacagtggcaaggatcagccgctgctcctcaacagcgtcccatatccacaactcaggtgcaaaagtcaggtaagtagtggttgcagcttgcaaagatctccagttcaggtctcatgcccgattagcgctaattgcggacgatcaactggtcaccgggattcagaagcgcgaaatgctgctggccaagcagggctgcgaggacccttggggtttcagcaaggtgatcaggcgcggatcgggaagggagaacgaccccaccgtcgtgccatcggcgttcgatgcacgcctcgtaggctgtctgtgcctggatgaccgcttgcccaagtggatgtggattgagaaggacgagggaccgaagcggtgcgagtgcggccactacttcatcctcaagaatgtcccacccgtttagatcgatcacacagagcgctgtacttaacacgaacacacttggcatgatcctcagctggcattaaacattgcatgatattatcaaaacaaaggcttacatgtatttgttagacgcacaa

SEQ ID NO: 22469 - DNA, 590 bp, DROSOPHILA
ttactttaccgcggtcacactgatccatagctgtgtgaaaaattacgaaagaatttttggtgttcaccacttaagaccgaccgaaattttcgcaaaacgaacaatggcatcgatctgtggacgcatggcgctccgtgccgccgcacgccagaatgttgcctacacgcccgtgcgcttctgcaaaatgatgaacgatcctttggagcacgccactggtatcgagaagcgcgagctgctgcttaaggccgccggcaatgataaccccttcgacatgaaggtcttcaagcggggcgccggcaccaaggagaaccccaaccttattccatcggccttcgatgctcgcattgtgggctgcatctgcgaagaggatcagacctacgtgcaatggatgtggctgcagaagggcaaccagaaacgttgtgagtgcggccattggttcaagctggtggagaaggcagctgtttaaagttattattaattaattcaataaaccaattaataacaaaaacacaacaactactaagctaaaagtcaacccacttagctgtccaaataaacaaacatcaacccaaaaaaaaaaaaaaaaacga

SEQ ID NO: 22470 - protein, 120 aa, DROSOPHILA
MASICGRMALRAAARQNVAYTPVRFCKMMNDPLEHATGIEKRELLLKAAGNDNPFDMKVFKRGAGTKENPNLIPSAFDARIVGCICEEDQTYVQWMWLQKGNQKRCECGHWFKLVEKAAV

SEQ ID NO: 22471 - DNA, 2521 bp, DROSOPHILA
accaaggagaaccccaaccttattccatcggccttcgatgctcgcattgtgggctgcatctgtaagtagtccaacaacaccagctgcggtcaggataatggcagagattggagtattctatcagccgtaaaatttgcattctattctgtttaggtgcatttcaatgacgtttctgtgcgaagcaaaatttaattcctttcattgtaatatttatccaattgagtcgctttaatttaattaagttttgagctctgattagctacacaccgcgtttaaacgttttcatatattattttgaataattgcacacactccaactaaggaaaccttaatgcctttatcctgaccaaaaataaagcccatcattccagtagagtactttctaacaaacctttcattccaaaccaggcgaagaggatcagacctacgtgcaatggatgtggctgcagaagggcaaccagaaacgttgtgagtgcggccattggttcaagctggtggagaaggcagctgtttaaagttattattaattaattcaataaaccaattaataacaaaaacacaacaactactaagctaaaagtcaacccacttagctgtccaaataaacaaacatcaacccaaaaaaaaaaaaaaaaacgaaactgtgaacagagaggagtgaaagggcggcacagcttccattttcagatctgcaaacgtgttttcgaacgcagccgaggaaaattgcttaattaacacaaaaagcgaacaataaagtctaaagaagagattttgagtgaaaatcaaaggatttattttaaaaaagcttgtctaaagacagaagaaagttgaatttcgtttaaaaatgtttaaaatcgcagaactaatttaattttaataaggcagtaggcgtcttaataagaaatcaaacattttcaaaaccctttgatcagattcaactcactcaaagtgggaaattctcgtgtgataaccataattttctagataaactcctttaaaaatgtcgtcctacatttcgcgtctacttaaggctcagtccgcctccaaacgtctgatctccaatttaacccagcgcgacggaaagctaagctctttgcttcgacgactaggtttacagtggcaaggatcagccgctgctcctcaacagcgtcccatatccacaactcaggtgcaaaagtcaggtaagtagtggttgcagcttgcaaagatctccagttcaggtctcatgcccgattagcgctaattgcggacgatcaactggtcaccgggattcagaagcgcgaaatgctgctggccaagcagggctgcgaggacccttggggtttcagcaaggtgatcaggcgcggatcgggaagggagaacgaccccaccgtcgtgccatcggcgttcgatgcacgcctcgtaggctgtctgtgcctggatgaccgcttgcccaagtggatgtggattgagaaggacgagggaccgaagcggtgcgagtgcggccactacttcatcctcaagaatgtcccacccgtttagatcgatcacacagagcgctgtacttaacacgaacacacttggcatgatcctcagctggcattaaacattgcatgatattatcaaaacaaaggcttacatgtatttgttagacgcacaacaactatctaagcgtatagcccgtcaaaaggtagccactatttccgctcatattcacttccggatgtgtgcgattgggcaggatctggtaggtgcgcagccagttcgaggtcaagtgcagacccgtcaccttgcctgttgttttcagctccatgaatgtctcttgtaacagctccttgcaggtgctgaataccaccacgggtcttgagggtttcacaagaggcagcagggcttgcagaatgttggatgggtgctccttggcggccaccaccagactgtcgaattcggcgtgcatcagggccgtggcccgcttgttttccaaatgccagcgcggaggtccctttgctcctataacaacagaaatagtatttgtacttgtcttgattagtttactattgtgaccaataccttctctaccactatttgactcatccagcttgggtttctttgtggtcggttctatcgcctcaggttgttcctccgttggcgtctccagctgggtttcctgaggttcgttttcactgggctccacaacgggaatatctgtggccttcgcgtcccctccttggtaaaactcccttaaaacggaatagagattaacggaaacacatcgctgttgctgctccaggggtagtttcagagctgagagcgcctgcttctggggcacattgcccgggtgcatgtgcaccagggtgccctccgtgcctgcgcctatagagttgagcatggcagccggcagtagaccattggtaccactctcgtacagcagatagctgccgaatccacaaacgcccgagtaagaaataatttgcgataaagtgtcaacgcgaatgcccatgaccttttccgagtcttggcggtagaagatgtccagcatcagacg

SEQ ID NO: 22472 - DNA, 465 bp, DROSOPHILA
atgtcgtcctacatttcgcgtctacttaaggctcagtccgcctccaaacgtctgatctccaatttaacccagcgcgacggaaagctaagctctttgcttcgacgactaggtttacagtggcaaggatcagccgctgctcctcaacagcgtcccatatccacaactcaggtgcaaaagtcagcgctaattgcggacgatcaactggtcaccgggattcagaagcgcgaaatgctgctggccaagcagggctgcgaggacccttggggtttcagcaaggtgatcaggcgcggatcgggaagggagaacgaccccaccgtcgtgccatcggcgttcgatgcacgcctcgtaggctgtctgtgcctggatgaccgcttgcccaagtggatgtggattgagaaggacgagggaccgaagcggtgcgagtgcggccactacttcatcctcaagaatgtcccacccgtttag

SEQ ID NO: 22473 - protein, 154 aa, DROSOPHILA
MSSYISRLLKAQSASKRLISNLTQRDGKLSSLLRRLGLQWQGSAAAPQQRPISTTQVQKSALIADDQLVTGIQKREMLLAKQGCEDPWGFSKVIRRGSGRENDPTVVPSAFDARLVGCLCLDDRLPKWMWIEKDEGPKRCECGHYFILKNVPPV

SEQ ID NO: 22474 - DNA, 4720 bp, DROSOPHILA; identical to SEQ ID NO: 13852

SEQ ID NO: 22475 - DNA, 2601 bp, DROSOPHILA
attgttagcttgcagcatttgcttggatttgtagcacaatgagtggatatcgaggcattggcggtgggggcttcccctaccgcaagccagcaagttccggcaacaacatgaacgccgtaccgccgcccccgatgctgaatgcccgtggctattctggttcccgcggaggatttggaggagcaagccgtggcggtgtcaccgggagcactacatcaacgtccaagcacggctactccaccttggactccatcagccagtacaccaatgccaccaatctggttggcaaaaggaagcaccacacggacgatgactatttcgatgatgacgatgagccccgggaaaaggagatagaacaagcctatataccggcaccaggatccccgggagctccgccaacgtcggccaaaaagcaagaggattccgattcggatgaggatcccctcgagcagttcatggcgggcatcaaccagcaggtggagaaggagaagcgtcaacaagcacctaagccgccaactcaggcggtgagaggtgacatcgatgacgaggacgatgaggagagctactatcgctacatgaaggagaatcccaatgctggacttcgcgacgagggatccgatcaggaaatcgaatacgatgaggatggcaatcccatagccccaccgaagaaaaaggacattgatcctctgccgcccatctaccattccgaaatcgagtacgaacccttcgagaagaacttctacacgcagcatgacgacatagccgccctggatgatgagcaagtccgggaattaaggcgcacacttggcgtaaaggtcactggtccatcaccacccaaaccagtcacgtccttcggccatttcggctttgatgagcaactcatcaaggccgtgaggaaagcggagtatacacagcccacacccatccaggcacaagcagtgcccaccgccctgtccggcagagacatcattggcatagccaaaactggttccgatctacaacgaggccaagaagtttggcaaggtctacaacctgaacgtggtctgctgctacggcggaggctccaaatgggagcaaagtaaagctctggaacagggagcggaaattattgtggccacgccaggacgtatgatagatatggtcaagatgaaggccaccaatctgaggagggtcactttcctagtgcttgacgaggccgaccgtatgttccacatgggctttgagccccaggttcgctccatctgcaaccacgtgcgtccagatcgtcaatgcctaatgttttcggccacctttaagaagcgaattgaacgtctggccagagatgtgctttccgatcccgtgagaatagtgcagggagacctgaacgaggccaatcaggacattacacagtctgtgtacgtcttccccaatcccctgcagaaatggaattggctgctgtgccatctggtgaagttcctttccgaaggaagtgtcctgatctttgtgactaaaaaagtagatgctgaaacggtgtctaacaatcttttaattaaggagtacaattgtcttttactccacggcgatatggaccaagcggacagaaacaaggtcatcactcagtttaagagaaaagagtgcgatattctagtggccaccgacgtggcagccagaggattggatataccccatattaggaatgtggtaaactacgacacagccagggacattgaaacccacacgcacagaattggaagaacgggcagagccggtgaaaagggtaatgcatacactctagtcaccgataaggacaaggagttcgccggacatctggtgcgtaacttggagggagccgatcagctggtgcccgacgatctgatggagctggccatgaagagttcctggttccgcagctcacgcttcaagcagggcaaaggcaagagaccaacaaatacccacacaggattgggctatcgggagaaaggaaatggaggtggtggctatggttcggctggtggctcggagtccactgcgagtgtgtctgcccacagtccttccgacggaccctctagcaaagccttttcgagctcgggaccagccacagatcgctatacagcaatgagggaggcattccgatcccagtataacaatcagttccgtgcgtccagcgatcgcacttgggagaaaactctgccggagtcgggagttttcgctgcgccaatggcaccgccctcatcatcaacacagggtgcttccgcctcatcggccaacaacagcagcaaccaggatgccaaaagagccaagaagagtcgctggaattgaacgacgagcccaataaactgatgctgctatttggtttatttctcttcatattatttaatgtgtatttgcttttgttccatcgtttaaaattacaacttatgaactaaatttaaacatattatatataatcagatatataccatgttcattcataaagattacgttagttaaatactcgtatgtacaactctcttccttcgcagccagttccagcgaacgatcccacagatccaaataaaaatattcattaattgtaatcatggttatgtgtattttattttgaataaaatcacatttgcgcatccc

SEQ ID NO: 22476 - protein, 346 aa, DROSOPHILA
MSGYRGIGGGGFPYRKPASSGNNMNAVPPPPMLNARGYSGSRGGFGGASRGGVTGSTTSTSKHGYSTLDSISQYTNATNLVGKRKHHTDDDYFDDDDEPREKEIEQAYIPAPGSPGAPPTSAKKQEDSDSDEDPLEQFMAGINQQVEKEKRQQAPKPPTQAVRGDIDDEDDEESYYRYMKENPNAGLRDEGSDQEIEYDEDGNPIAPPKKKDIDPLPPIYHSEIEYEPFEKNFYTQHDDIAALDDEQVRELRRTLGVKVTGPSPPKPVTSFGHFGFDEQLIKAVRKAEYTQPTPIQAQAVPTALSGRDIIGIAKTGSDLQRGQEVWQGLQPERGLLLRRRLQMGAK

SEQ ID NO: 22477 - DNA, 47670 bp, DROSOPHILA
gactaccacaaccaccacaacgacaactacttgtaccccaacaacgacgacaaccacaacaacgactaccacgaccaccacaactacaacaacttgtaccacaacaactacgacaaccacaacaacgactaccacaaccaccacaactactacaacttgtgccccaacaactactacaacttgtaccccaacaactacgacaaccacaacctgtgccccaacaacatcgagcacaacaacaacgagcacaacaacaacatgtacctcaaaaacgatctcgaccactacatgtccagaaaccgctccgacaaccaccgcttgctctgacgtgacaacaactgtttgccccactgaatcaaaggccgtggctgccacccaatcaaagcgtaatcccgtccgccgaaaccccgtcaaccgcctgctctgggaagtagccgaatgggccggtctgtcgtcctctagttctgaggctcagcttaaggtttcgtgcttgggcaaacctgacggattcctgatggcatctcctgaacggtgcaacgattactacatctgtcgtcaccagcgcgccctcaaggtcagctgtggtgataggtacttcaacggactgaagggaatctgcgatctccccgaaaataccagctgtgttcagtcttaagtataaactccgtcgttgagaccaacatcattttgaaaatgtgacaagaaattatggatcgaaaccttaattaattataacaacacaacttgaccatgcacttaagaaactgcaaaggcttataaaaggcaatagaaaaattatttaaatgttgttttcttgggcgtaaaacgacaattcgggacttttcgaaattgtcttatttcgaaaccttaacacaagtactatcgttgtggtagcttttccttgatataagtttgattaaaagcattttcataaattgtgattcctcaaaattaactaaaaataaataataaagaaacctatattgatattttttaattgcagcatctcagcctcacaaccaatatcccgagcaacgtgcacaaaaactattggaaatatcctaacccacaatgaaaaacgacgtcgtgcgatggagcaggcagccaactagcaacaccactaacagcagcagcagcagtagaagcgatagcaacagcactcataagcacagaagcaaaagcaacaaattaaatgctcgacaattagggtcaaatgctgccagaagttgtcagcaaagatcctctgtggcaacaacactagaagatgaacaacaaacaatcattgaatgtgatataggaaatttcaatttcgattgcaatttattcaaaactagttttttaacgcaacacaaacagaaacgtagtggcaagagcagcagcaaaagtaagagcaacagaagtagacccctagcgaaaacgaaagcggtgtttctattagctctgcaatttagtgccgtagtttttttatgtaatattaatgtcggtttcgtggccggaagtgtggcaactgcggcatcatcggcaggcggctcatcgccggcagctccatcatctgcgccctcatccccgcccacagttgctgtaccaccgccgccgccaccttcgtcggcactcaaagtggatccaaatggtcagtcaccagtgctgccgccctacgttctcgattatgagacggggggcaaggccaagctaacgccaaacaatggcaagttcggccaatcgggcagttccgggagcaataacaaccacatcgtcggacactatacccacacctgggcggtgcacataccaaacggcgataatggcatggccgatgcggttgccaaggatcacggattcgtcaatttgggcaaggtaagaatcgtttaaatatctaaaccaaaccacgtcacattttgttcaccggcttcatttgtccgaagagttctggccaaacacctagagcaatatccagcgagactcgttagccagtttagcatatgattagaacgctcaaatgtgagactattaaaagtttgtgccgccagagagaagtttttcgttatggaaagaagcacttggcatatcagttgatatgcaactgctggacaaagtttctactgctgaaatctgtgctttctccgttttgcattctctgcacccgtgctttccagcttagcttgcatccccgtcagtcactgggaaaacattgaggttggaatgtgatggtatggggggaaatgtgggtttgaaatgcgggcacaggtgttgccaccggacaagtttaatctgaaagcatttcgaccatgtactttcaactgctactttgatacacacacctccggcttctacgatttccacactccacaacttgccggcacagacgcgaacccgctaagtgactgtcaagtaatcctggcaatgggaatggccagcacaaatggagctcaaatcgccttgtaatggcatcgtttgcgataaaacaaggcagttggtggatagatgttggcgcgggagtataagtgcctctaagtatggatttacagttgcttgctataaactgcacaggcagaaatcattctccctattgtcggcgtctcataaatcactatggcacaatgaaaacacttctaaaggagtctaaaagtaggctatcaaatatttggttaatgcataatacccacacattccttccaaatgttcgcgttcttatttgattgcattcttttttttttaagtgggagaggtggttttaaagccatatggaattttctgaattaattgtattttaagtagttcatcgttctcttttttataagtgcagagcacaagccccattcgttggggtatttgaaagtaaaatacatgccaagggttaagtcctgctcccgctgtttgagccccaaatggatcccggcttttgtgttttcaattgaggaacagagaccgacacgcaggtggccgacgtaaaaagagcccgtgccacgaaaagctcaactgtggcgatttccattgtacgactcccatttggcggatcgaaggaaagacctggagaaatcggggatagggcggatggcggatggcgacttaagtagcatctgccatcgggtcagtggaaattagtatcactcacaatggcgcccgtactctttcgaccatcgacttaattggcagaaacaaaaagcggaaaattcaatttatgaaggcgggcacacaaaacttttgttagcactcccaactagttgaaactgacgatcccgaaagtctccgtaccggcgaaatgcggcagatggccggccagctggactgggggctccgcgaaagttaattgaaaattaattttaaatggcattgttaaaatgaatccaacttaaggccaacctgaatgcgaacagacaccgccgagtctctgcaaatgaaatgtgccgttttgcataattagatgacgcccgaaacggctgtaaaactgtaatgagatgagcgtcaagcggaagtggaaatgaattctagacgttctgccttacttaccattattaattgccaacttgattgctgggaaatgaaaaatgaacaagtagtttggtaaaggaattgctctttgggggggaaatggcaacatcaattaaaacgacgtctattgggcgtagtagagaaactttcaaatgtattataataatattcttatgttgctgggcaactgcacttatggcacaaacaatcttgtgctattacccattacattggcttatttgagaccctgaattgcttcatatatcaaacacataacgcgccaagtaaaattgttggtcttacttccaacctatacaattgaaatcaaatgccttggtaacccttcaacctgaaccttgttacgctttgcttcatccaacacgaactttcaaccccacgaactttcggtccacctccaaacatttgaaacataactcgtcgagagtgttgccaaacatttcgcacttgttcgtgttgctagctgcttttgctttctgtttctcatgttgtaattttttgtgggggcgtgccagctagcgttataaactaaaaactaaattcgcagcacaaacaagttacaagtgccaaacagcagtagtagcagcagcagcagcagcaacctagagcaaaaacaattaataaaaccataaagatgaagtagtgggacgcgagactttttgccatttgctgtaacaactctggctgttgcgatgcgatttcaaattgcagcttccagggtcgtgatgtttgtttccctgaaggaggagctaccgaatgcggggcacatcaacaaattcggtgtgtcagaagttttaatgaaaacgatgctctatatatatatatatgtacattcatatacctctcttgtttcagccagttccttggctttcgcccatcaagttttcagcggagaaaactttttggcaccgaaattatgatgataaaatagagaaataaagttttctggacaacgagagttggtcggagatattcggagacgagaatggtaggaaattgcaaaggaatgctcattaagtgcacttttaatttcgtttttctgttcgctaagcaggaaggaatttcatgtagataaatacggcaaagtacaaattaaaaaatttgcgtaaaaatctgcagtctcattttaacgctttgatatatttgaattcagtttcgcacttttttggatccataaatttgaatgtttctttttgaagagggaccgctctcaaaaacctttacctaaacgtttaggaaattcttggaatttatacaaaatgaaccctgataagaattccagaatgttggtcctttagctttctttcccagctgtttgtcatttgcttatctgactttagtcttccggtcccgccttttttctccatttctcctgccattgttcttcttttctatagcgtcatttacataacactcactctttgtccgtctgctgcagtcctttggaatccttggtccttcttaagctcctattgtctgtctttctggactgccgctgataaatgttatccctcggccactcatcaatttaattgaaaagcaagagccgccaaaagcttcagccaactcctctttaccaaaattatttgccttttcgggctgattttttcttttttaaaattaatttgcctctttcttgagccagccgggtcaattgaattattgatcgaccgtccgattgattgattctgtggctgcccctggcacaggattgcatcgcatgcttattgcattcgcgtaattaaaatcactgccagtcggttgtcctttgaggacattcgttttccacctggaagccatatacccttaatactccactgcgggccatccttgataaaggtcaacggctttttaataagggtccgccgggcatcagaatctgggttcaaagaaactgccaggggcgtacctttgcaaccttaagccaaactggaggttgcccttttcattatattcttttttgtctcaaggaaaacgtcatcatggaaaagtaaacttttcaataaggcttaattggttaacaatttgacaagttgtcaggcacaacggtgacacattcgggtctaagctctttttaagatgcaggcccaacacaaaagggcacactttattaattagttcttagaagtgtgtacaatttaacaatctttcttataatataagaagactgctttgtttttattttggcaacaacacattattatgaaggcaacaacacatttcatcttaactcgtaaaattcgtattctatgaaaaatattttacaatttaaaccatggagggttaagtagtttgagcagcactggatcaaccttaaccccagctgacaaatttttgtaatatatttttgcacttttgcatgtcgcaaagtttgccaacgaaagttaaatattgtaggtgttcatgtgactgtggattgtctgtgtacacatttgtacttatgtctgtgtgctggtgtgtcctttgttcggatttcgcgtggctgcaaggcggatatcgttgataaattttaagtcaaaaactcggaaaatatttatgacttaacttttgtttagtaacaaagcaacacgccagcactcgtatctaggattccgccctgtgtcccttggcaggatttcacaattgtcacagaacttggaaccctatgcaaatggaaaaaaagggggggtggcgggggatatgccttcagcttgtttttgagaacttgtacaactttaatcacatgacatgggaaataccagaagtttacataattttctgctttttcgccattgatccttgggacttgggaaaactttttagtacgatttgcctgcagcaaacagcgggagggatatcgaaacgcagtgctgttcctaattgaatatgtaaaaccgaaatgcgattgagtgtgaaatgagtaagccaaccgactgccaatcgaagtaactgcctttattgctcgtacatcctcgcaaagtttctgcaacgcaattgaacagacaagttttggggcaacatattttattccacttctcgcttttttttctcccccatgcgtcgagtaaaattaagtttactacttttgtgccgcaaatgaatcaatgattgaaatagtgtggtatgagcgtgtgtgggtgaaaactttttgtgcatttgccaatactgcagaataagttcaaatgaagctaataaatatttcgcaattcgttgcaaacttttacgccgaaaaatttgcatcggggccgattcaattggcctgaaaattgggccaaggaatttatatccagccattgctggttcttttttttctacactcttcttttcattggcggttcagtgtttcacttgtctaacagatcgacaacaacaaaagtggcgactttaaggacctcaatcaagttggccatgctccttttgatgacccatccgttattttccaatcttggaagagtaggaatacattttaacaaccacctgacctgccacaatgttcagtgtttggagaatgagcaactttatgcgtaatggtgatgaagctgatgtttatgcttctcggcaggcagttaaattaattaggttaatttatgggacaaacgcgtggcagcttttttagaaaccagatcttaaaacggagataatttttcacttttaactaattgaaaagtatgttcttacctagaccgtcttccacgaaaataatacacagatagcgtttttatcggtctccatcgatagcatttttcaacgaatttgcctatttttctttggcacttttttttggcacttttcagctctctcaagtaggggctttccatcaaaatattccttatcctttggctatgcacggactgcataaatattatagatatcctctccatcaaaagttcaatcatctgctccatcatcaagtttgaagggagcacttcacttgactgagctgaactgacccgcctcaaaggaaagtttactctttcgcattcattccccacccattgcaaatgattctcgcatattttaatgcatattttgggtcgtcctttgcgttattcccattctatgttggtattaacaagaaatcgctagcaaaacatgaataacgagacgaagacgttggaaaaccttgcgtaaaagttttcccaacctcgaccgctgctgttgttgttaacgcccaatcgcgtcgtgtttgcttagcttatctttttgggctgtcgacggttttttttttgttctcgcagctccttaggaaaagctggttgaaaatgtgaaaataaaaatatttgtaaataggcatccctcggagttgagacaggccaaaataaacgggcgtttttagcctcggctttgccacgcctctaactccgaaaatgctttcagcatggggtgtgtcattctttttggcatcttcagtatctgccatccattgtcgtttatatgcaggctaaaaaatcattagagagtcgcgttttccctttgtccggttgtgaatctcttttctttcgtttttttcgccgtctggacacgccctggcttttggcgatgatctcctcccttttgctgtacggcaattggcgtttgggcctcagtcgagtggaaaattgctaatggccaagcaagaccctaagcaatacaaaaaaaaaaaaaaaaaaacaaaaaattgaaaagaataaaaaaccaaactgtgactccttgcaaatggccgctgtgattttaattaaaagtgctgggggaagtcacagtcacaggggacaatcgacattggtcaaaagtcaaagttgacttgattttagggtccttttaattgccctcgaaaacgggcaatgaaaaatgcgaaaataaaacgagactcgtaaatttatacattgctcaatcaagtgtaacgattgtattgcaagtgcaaaagggagagtggaaccaaatggtgtgggtggaaaagttggtgaaaatcacggtaaatatttccgcagcataaatattgaaattttcccggtcggtatattgaatttttagccctcaacccacacagcgaacttggtcaaataaatcgttaacaattgcaggtcatggggtgatggtggattggaatcaaatcaacactttccgcttgattaggccaatatggaaatttgatatttgaccgatgtcagttcggggccaattagaaaatattgctcaaatatctggaaagcttttgttttaatttgttttatcgtgtttaagcccatcgggatttgcatagaacaatatacgttcgtattaacgccacactatgcgtataccttatgtgaaatcactcatacgcctagtggtcgcatggaaatgaactatgtgttttttcttttctaagattaaagcggtaattaataaagcggaaaatgccattagaaagcacagatgaattacgttttcctctgtgtgtttaattaatgtttacccccttcccatgtcgcaataaattattgatcgccttcttgacctgacccacctattctgttcactttcccccccttctctacacttggcccgcatcccaaatgacaatttgagttattagtgccacattcatatatcacgattgtgtctgtgggaatagattggcattttaattgccaccgacacattcaagtgccatttaacatagatcccggctaaatggtttcatgatttagatggattcttatggaagtctattgtaaaattgcaatagaaactagcacaaggtcatgtcactatgtttttggcttgcagtaaatcttgcttgtctgtagttcctttttttttggcaccgacaggacccaaaattaaatatgaaaattttgaatttacgtttcgttgtcattgatccggaatttatggcttccattctcatttttaattaacttgacgacgggactttcaagttggcaccctggctataaaactggcaacgattattcctttgtgccatccaaaaaattaccaagccattcccctcctctctcgtcgaccaacgaactgtgtcctcgttgtgatttggcatgcattcaaaaagttttacacgatacaaaagcactttgttctgcctgccaactgacattgaaaaaagacgcatataacgaatggcaatcaacgctgcaattatgtaagtgtatgtgtttgtgctgggacatgtgtgtgtgtgtgtagattgtgtgtttgttggctgtcgcctgtttattgaacttgcatgctgaccttagcctgcttttcagccacatttcagttgcttagtcattttggcactagaagtacaggacggacatactcaaaagtttgaaatactatataatatatatatatatatttcaaggaaaaacatttcatatatgctcctaatatgttctactaaaaagattaccaaactagtggtttatcattctacttgagttcaacttacaaaagttctactgtagctgggaaatactgtcgggcaaatgtgttgcatacttttaggcagccaccgcacatgcaatcccctccatgaatccccaccatctcaacgccaccacttccgtcgaacgatccagccctcgttcatggccacatcagcatgggcttgagccttagctttggccatagcttttgctatagcttcaccatcggcagcggcttcaaagtcgcgttcaacgtcaagtggcccactcggcattccacttgaagcgtaatgaaagcatttttgccactaacacatgtgaagaggctgttggccagagagggaaagggatacgtcgagtgaatgaggcagaaatgcagatatatagagagagagagagacagacagactccagcacttgcttagcattagtgtgtgcgacatcagattgacacttgtcagaatcatttctgtctacaccacagcaaattgtggcccaaaggcgacgaaaaaagcacagaaaattagccaaaggagcaaaataagagaaaattaccctgccctttcttttcttttcatgcttgcccaactcgattacaccaagttcgagatctgtaattccattaagatttctgtctcattgcacagcggtgtcaagttcatttgtttccacagactcggcaggttgtgtgccacctggctgcccaagaacaataaaacacattaacacctattagagcgttgtgtgggggtgagattggggcgaaaggggagttaaagggtggcttctggccattgtacaaatgggagcataaataatagcgactgtctgccaagttatgaataataatgacaacaacaatgaaagcgatggagagagaacaggaaagccaggctaaactgatttaactacgcacagatgtggtcatctgaataggtttcttaaagtttctataagcaattacatggcttttgagactttatataatgactaaaattttcttgagttaatatggtgggaactgctatatttgctagtattgcatatcaccccaatattttgacctgcactgtacatgtacatgagtgtgtggaatggtaattaaggatttggcctttgccaaggcagtccggttaaaatgccctgccgctttgggccatttttatggtcgttgtgcaatggaatggaaggactaaagaggaaaaagtagaatcgtgccgagacaaaaccacacctgcctgtatacctggctctaagtcgggggaatagcaaacaggacatggccacagataaggccaagtccagtatttgtgtatgtgtgtgtgcttacaaatctctgcgctaattaaaagtcattagagtgtggtataattgcatctaaatgaaatggccggggaaaagccgttttccctcacagtttaaccctcagataaatctgttggaacttttagttgatccaaggcgatagtacaaccatatctgattgcgttttctctcttgtttttcaggtaagcaaccagtgaaacatgaaagtgaattgccaaaaaaaaaaaaaggtgtaagtaataaactgtcggactgtagcaatttgaatgcaatgctgactaatgaacacggacgtaaagttcaaaaaggacattctgttggcacatgaatattttacgagccagtttcattagcacttaagccgctcgagttgtgacctgtgtctccgcgctgcggttaccataaaatattaatctgttcgagccgcattacagatgcaaatgcaaagcgaatgaataagtaatagtcgagtgtgcgaattattagagggcattcggcgcactaagtgttcgcccgaaagttgaaagttgccggcgtaagctcgatcgaatgcgctgttctgttcgcttcttcataaatttctggctcatgaaatatgcaagtgccaagctggcatgaaaatggcggagcttccggtgcagccgctcatcctgtcccgcccagagtcctgccttatcctattatctctggccaagttcttttttaaaatctactttcagcaggagccctctgttctgttctgttctgttcgtttctgttccgtcctatgctctctgttcactgtccgtccgtcctcctgctgttttgtttaaattgtcagtttgcacgcaaaacggcgcacttccggccagcgttcatttcgctgacttggcctgcaaattacagccaacttttgttgccggcatttccacgcatttcctttggctatttaggttcgctgaaaatatctatgaattcatcgcgaatattttgcagcaattttttaataaacttgcgttgttggcgcgcggatttaatggtgttggatgattgaaatacttgtttattttagtttttcccacgtccttttccgacaatggaatttaattgactgctctttgatcgcgtcaagtttatattagtttttacgaaagacgtatattgaaacacgatgattttatgcgtgttgtgtattgattcgacgataacaattggctgcaaaaaaatggcgtaatggctttcactcgctggcttttacttcctaaaaaaacagcaattatttttaaaagtcaaactattttaataagggtataaatataatttgctttgataggggaatacgatatttttttgtgcaattaagtaatttaactttatatttaaaaacttctggtatttttagtgttacatatcaaattaagcatacaccacgtgtattccgatttatgatccgcattaaagtcttatacatttgcttctgccagtgggacaggcaatggcccacaacactttattatttactgccataatcattttaatggcaaaaagccaagcaacggttataacgaacacagcatgataatcatatttattaacattttaacttaatcagcttggtgtcttttgatgtatgcgcaatggggaggaaaagatgacatcgggaaggcggcctaatcagtcaggtgctgtcaggatcccaagtagcaaacaaacattttaatttaaattttattcagcttccactcagttaagtgcaatatttccacccaaacgtgtgttggcaattttctttttcccttctcaaccgccacaatcttgtttgtcatgccgtcttgacattaacattgtctgggttttcctttgaaatttacagatcagaaagtatgtgaaacgttatgagaatttttcagggaacgaaaacgagtacgaaaatgaagctttctgtgaaggcatccatcattttgtggccccagtaaactgcagctgttgttagtgagacaaacactaaacgtataaaacattttcatttaattgaaacaaatgagtgcggcgtatcaattgaagcgaatgtgttggtttttaggatacgacaactagagagcaactttggctaaaactgttagccaaatgaattgaactagtgtgggttgtgggtgggtgttccaggcataatttgccaaatgagcaaaaaggatggcaatcgctccaggaggcgacacgtcgatggggccacaaaaaagcgaaatacaaatagaagaaaacaagcgggacgagcgtataaaaaatattccacccctaggttttggtgccaagtgatattaaaatccatgtaaattacacacaatcatcatcgtgcttacgtctgcatgtgtgctagcgtgccataaactgacaccaaacacgagcattccgccagaccttttatggtctgaccgcaacaccaacgtttgacacactcgttacaatagatacgtagatattttatatatatgtcatatactgcagataatgccagcgacgtgctctccgaagtacaagtgtaccggccacatggatactacacactttaatcagagataagaggatgtcgtaatggagcataaagtaaaaccgaatggcattcatgcgattagacgacacgcaccaccacagatacatataattgcagactacatcctgtgaaactcgtagtattgcttatatcgcctgaaatataaatacttttaatggaaaattgcttctaattgaaaatcgtttgtacttttcacaatttagtttcatttatttctgatacttttcagctttgataaccaccggaaaagggctggttgtactggggcttgctattaaagttattattgttgctactcgcttgggtgtaccaaatgctctgaggtttttgcgatgaaataacgccagactcaccggcaggacctcgtggaccccgtggacctgggggtcctgcaggtccccgctgtcctggtggacctggtgggcccggcggacctggaggtccagacacaggaatgggaatgtaggcagtgggtggatgaggctcctccttctcagcagcggcagattcaccggccagattcgatggcagcagatttagaccaggccaattgaaacccgattgtccttgaacattgaaacccacttggacgcggggcaccacgacataggaaaggccatttccttgatttgagctaatggcattcttgttggagattaattgagggccataggccacgggaaaggcggccacttgcggaaccacatacttcagattctgatcatttaccatgggaatggcattcgagtagaggtaatctggaactttgcgactgtccttatccgattcggtgtctggatcttcctccctgatttgtggttcatggaaggtggtgtcctggtcatcggatcgtgctatggcatcgccgggggaataaatgagaatttgtggaccactgggttcctcgacatctatatccaagctactacggccagttccaacaactcgtcgcaagttttgaatacgcgcgtgactgccaaaaaccaggcccaagatcactgaaaaatataggaaaaagtataggattttcttagtctggaaaaaaatttgagaacttcgtcttttcttacccaatatttgcactctgcgattcattttgatgaactgttgattcttcgattttcgctggcctcttttatacccgagtctttgactaagataagatctgcagaaaggttctcagtaatgggcaagttcagtcaacttgtcggcatctcggtggtaatcaattttaactgcccattttaactgggtcagcgtgctaaaccggttcgctttatctggggatcttcgccattgagtcattgggtgcggttttgcacagcgaactctaatagaagggcagaccagaaccctttgtggtgttgatatattacaattactctttaacatgctggttttttgggtgactttttataatgaaaaaaatgtatgcttatcgacttatatgcataatttagttggccagtttttattttatgaaatatattagacagagagaagaactattagaagacacataatcctagaacatttttggccaatagttatggaattcaagataataattcaacccttgatgcattcccactcgtttttgtttgttttccatttcctactttaaaaaacattcattttcatcagtcagatgtgggtagcccagatacagagacctgctttggaacccaaataatggaatgcaataaaacaagagtgcagaaaaacgtacgagtaatacgtgtatatatagatatatatatatatatatttgtagtgaaatggaatgtcgcccgagaacgaaattgaaagttcagcatgaaacatttttggaatagaaacctggcaggggtttaattgaattaaatcaaaaacaactgctatgcgaccccttcggcgttgctatgtttctgcttagctggctgcgcagatcggattgaattgaagcacccgcatccgcatttggggtcgcttggaacatctgaattcggatttcagattttagatctgtggatagttggatcgaatggtcaaagtagttgagccagttgcgccgtggcaagcgcttcgttggcggctcccgagcgaaaggatcgccactagggggtcctgaaaaatcggtttcgcgtaatccgtataccatggcggtactctggtggttgctctcgttgcaggtggtgctgatcttaccgcccagttaccacctggccacgccctcctccgggagcggtcaattgcgtcgtctttggctgcaggatcattgcagtgcgggaatttgcacgaatgtcgtgattggtcgcagtgattatgtgatcctatcacaggcccccattgggggcaccaccatgctcacctttctgaactcgagcattgccaagataccgcatttgttgttcgacacctttccggatctacaggttctgcgcatggaaaactgttcgctggaaactttcgaaaaaccgcagtttgaaggtgccagcaatctgatgagcttgttcttgggatataatcgcctgaaggatatacctaagaatatattcttgggcgcagacaatctggccacattgcatctgcaaggaaatcagttgaagcagctgggaaatcatagtttccatgccttgaaagaagtgaaggaactttcgctggcggaaaatcaacttgagcaaatttctctaggagtttttagcggcatgaggaaactaatggacctaaatttggctggcaatcgattagatgctctaccaagaggcgtcttcgatcggaatttaaaccttaccaaactaaatctggccagaaaccggttcaccgccttcgaatcggaactgttgaagctgcagccagtatttacgcagttggatatttctggaaatatcttccaggagttaacactcaactttaccatgctggatgtggctatagctcatagttgcgatttgaggaggttgaccgtctacggagtgatccatgaactggatttgcacaacaactcgctgagggaaatgccacacattccactggccgccaatgtgagcagtctggatttgtcgcacaatccattgggaaaccttcagggtaatccgttgcgtagattcacatcgctattgcggttgaatctttctgccaccggtgcccacgagttgccagagggattgttcaagaaacagagccatctgcaaatgttggatatatcaggaaactctatatactcgttgaagatcaccatcttcgacagtttgaaggcgctgcagtatttctactttcagcagaacaactggaactgcgatttcctgcaacttctaatgagttcgtttgtgaaacgcaaggacatttccttcatggaggatataacagcacccgaattggtggacgattatgtggatggcattgcctgttggtatgagagcgacaagcagtcgaagaagtgtgagtctggtggctcggatgctgccatggaactctcggtggtgcgaaatgagatcaagacattcaccgagttggtggagaagaagttcgtcaaggtctatcgcatgttggaggagatgaagatgaagctatagccggaattggattaaattccttgcaatattattcaaatcatatttaatccccttatttaatcaactatttaatcaaacatcaagcaatgttaatcgtactttaaggaatttgacacacaaaagcaacatattgatattttaagacaaattactagaaccaataaagcactttttggaactctagggaaaaccaagtgtttgattacttatgagttttttttatcagtgtttgtgcaatggattcagaaagcctaactacaaatgcattaaatcacattatttaattaactttagtctcttcaaaagactattaaaatttattcccatctaactgttttataaatctatcttttcgttatcatatttcataatcagttcgccagaaacattttctgctgcacatatttaaaattcttttgtgcataaacgtgaaaacagtttatcaggcgataaatcccagacttcacagacagctcaaacctagaattaaaaaaatcgctaacgctcaatttaatgccataaatattttatgcaaaacacgagcgggccagaaaaaatatttatggcataaacacaatatttttttttttataaaatgaaacttatcggcgtaatcgcgcccagaggagacagacacacttaaaaaccgacaaaacttaattaaatgcaggcgcacagaaaaatatccacaaataaacacacgcgaatggaattttttcatgcggtccggcaacgtcaacggaacattgcaatgataaaaataaatgcatttcgtaaacgttttttcatttcggtatattcataagtgtgcgctgtggcactgtggcgaattaataaaaacaatcgcacgtggaaatatcattaaaatatggattacagttgattgggcttacaaatataaaacgatggttttcccaatgccaaatataaatagtttcgggtatatttttgtggatgcgactgttggtcgaacttttggctaacaatgctaacccgatagcgctcggtttatgatgatttatagacgacgtaaccttaacgttatcgaacctattccgattcgtgaccggaagagcgaaattccaataagcatcatttgcattttcaatgctttccgcttgccattttcttttttggctcattcggagatggaggctctatgcaaaaatgctgggaaagatgaaagacggaatatagtatgcatcacatcttaaagctagcgctattaagacactctcgcaacatcctatctctctctctattgtgcggcacttcttcttggcctctctgtcgctcttggactcttactacgcttgtaagcaacttccgtttccgttatccgaggcgccatttgttctgccattgttgccattgaagctgctgctgttgttgcctttcaccatgcccctggattcctgtactgtaactatgcactgaaagaaatgtccataggtttatacagtctataatgttacataatagaagatttagatatgtaatttttctctgtgtaacaacgttaacgcactaactatgtgcaacatatgcagtacattcttaatagtcctccacttcggttcgcctgactttgtcctgtcttgggctcaaatgctttttggccaagtttatgaaattgttgttggcagcttgttgctaatgttgttgctgttccgatgccgcaactcattaagaaaacaaaagcaaagtacgaaagttgctcgttacctaagcgcctccaccaccggcttaccactttgttgtaattaagttgactttattactcaacaatgttgtacaaatgcatttagcttcagtttttagtgctttcgaggttacccgctgtaaccttaatcgaacttttgagcccggaatattcattattttatggtgcaattttaatattaccttattacctttattgcaaggtggccagctgtcggagaaaagttttcgtccaaactttggttaatgggtcaaggtttctgggggcggcgaacaaatcaaatgggtgtaccgaatttcctgtccatcattcctgtgtatcattttgcactctgcccatatagtatgtgttcttttttcgcccacctcatttacttaatttcctggctatgctcacgtaccttcactcaaattccctttacgtgccacaagtgaaatgcgtgcttatttgatttgcgcaagtggctgcctcaaacaaaaaaaaatgagcagataaacatacgtgtcctctagggaccccggtatatttgcatgctccactctcaatttaatttccccagctttatttcgtattataagccagcaaatcattcaattgcttatttgtcattagccataaacaatgcacacgctccactgcaattatgtgcgcaattaggcgtttgaggctaatttttatcaaattttttgctgtccgctcgcgaaaaacatacatatttatttgctgcgagagatggccggcagcaggctcataaataaagcttaatggcaaaaacagttggtcagcctcctggcggcaagaagtggggtattgtgctgtgttgggggtggcattaaattaaaaattcggaagagcgaaaggagggagcgaaaaatatgttgcctacttttgtgggctgtgcataattgggcagcatgaataatatacgagcgagcggttgtatgtgtgtgtgggtgtgtgtgtgtgtgtttgtatgggtaagttgctagtttggcaaacgaggcgtatgcacaacatgcgtttgcataaattcacgcttaattagctctcgcttcctcacgcctagctctctctctctctcccgctctcaccaacgctctcactcatacgaccaacaaaacaggcggccaagcaagttgtaacgcttctaattagcggttgctaaacgggcttaaatttaatttaatagaatatgtttaagctttagctttagctgctaaatctgctggtgcagctgcaatcaatttgtggcaatcggattattgaaattgaaatagaacatgcacaacaaaaccgaaatggttttaatatttttttcatttaatcattgccaaaaacatttatttgccagctgagctatgctccttttcgaaatgaaagaaaaccaaatataatcccagccaaattcaatttcatttgccatccattgttcgtgcgttgtttgcgttttgctaccattattaactgcctttttggcgcaattaagctgccacgcccccttctccaacacacctggtcggcaaggcgtacgtgtctttggcgcagttacgtttaatttgcagcagttggtgcgggtggtgcggcatgtggcaggagttgcaggaaaagcggcaggaaggctggcgcaacaggaacagaagcggaaagttggcaagtatttgactgctaatgcactcacgttttatcctcgctggaacaccgagtggtttcctgtttgtgtgtgtgtacacccgttgtgttttacaacttttaaccaaattgtttaactaagtagtaaaagcgcataaaagcacgtaagacaaatgtacacaaaacggcgaaaagaaacataaattcaggaagaaagtagttaaaatgagttgatacaaagaggcaaagttttcgcaatgaattaaaatatgtttgcaaaggcaaacattttctctttaatttatattaagaatcatattggttacaagttctctggttcgttaattagttaatttaagtgcatccacttgattttaacgcgttatcagcatcagtaaatcttttttcaattgataaatcatgagcgtgttagggaaggaatattcgatgcttccgttgaggacaaagttccaattgaatgattcaaacaaacaaaccaagtaattgagtacttaacaaggtacgaagggacgccaagacaaatgacatgaattctggaatcccaaccagctatttgaatctccatttaccaatgcatttagtttcacccggtcgaactagtgcattttgccatggccatggctaacttccgaggagcatttgtcattgcaaattgaattcaggagaaaaggagacgaagctaacattacaaatcatttgcttattattcccaggtcgctacagccgtctaaagaggaaaatgttatgcatttgacagggaaataggtgggatagcccagggaaaacagaggaaaaatcaggagaagggaaagagattagataatggttcggttctgttcggtttggatttcagatttagcagcaactttgcttaaagccacgtaacatgatattggcagttgaccaagaggtggatttttaggtggctctgcggtgctgctcgccgctcgaatctcagttgccagtaaatgcattccacttcagtggacaatgtgccacctccaccagcacctcaaccaccgtctccatttccatctccgccgccacacccaccatccatccatccgtccattgcattgagcgttactcgcatggaaggcgcagctgcacaatttataggatatctgtaggaggccaacttaactgggtgttaagggggtgtaaaaggggtccggcccgataacaagcttactcgggctgcttccccgacactcttctctcccgttctccttcgattgcgtataaaatcttataaattgcaaattgaatttaacgataaacatcgttgggggcagccagaggcagcagaacagcagagagctgcattgggcatattggaaggacgactcggtaccggaatcggttcattgttggctcacttaccccacttgttcgactgctgggatggacatgcaattgatcctgattcggattgtcttgtgccgtttgtgtagatacacaaagcacttaggataatgcaggattggccatcgacttcatttcgattgatattaaccctttattggggcaacaatctacatatctatttagcttaagtattgattttgacatagtgcataatttaagcaatccctaaaatatccaataattcttttaaatcaaatcactaattcatagtctctttacctcttctcattttaggtaagctcgaaagctaatcgaaagaatttaagttcttaaacacgtaagaaacggacaactatatattttccattcaatcatcatctgtctgccagacttcatcatctgagcccgtgtctagactctcttaactcatttgccactcaaagtgttgtggtgcgtggattccccagctacgcattatgtgttcaacttttgcagctcccacatgaaacttcctctttttgctttctctgcccacactgtcgcttccactttgcaattatgtagtcggaaacacagctcacagcccaaaccccacaaaacttgcttcataatttataagtcagtcgaaaaaatacaagaacacaacacaaaggtccaaagaccagacagcgtggcgacgacaatgacgacggcaaacgttttccaacagctggaaaaaaggggtaaaagctacagtaaaacgaggaacacgagagggaaaaactaagctaagaacttgttgataccttagggcacacattttgataataaaattaatatatgtttcagctatttaacaggcaacgcgtggtatacgtactatttgtgaagacatgtagttgtatatattgcctgcagtttgtatttgaaatattgcaaagtaccttaggctaggtacgaaattatataattaaattatattaaaaattttttcaattttttttttaaaacattgccgaaaatactttattttaccctttagctacatgtttaagggaaaaacactttctggctgcgaaaagccaaaaactaactgccttttgtttgactccaatgcgccatgtgtcctttacggttaggagtttgttgctctgtgcccgcgtgagtgtgtgtgtgtgtaacgatctgtcggtgtgtgcgtgactcctgctttcgtcctcttggtttttgtctcagtgcacgctctacgatttaaccttttttctcccctttggccatattgttgctggccattttcttgttcccgctgcgttagcttttgttattgttacgacgattgttgttgtcgtgcggacataaataattcagcacacagacagacgcacatagccacacagacagagaaagttttggacaccgatacagttggcctttcattgttgcttctggcttttttcatgcctacttttatggcgcttttgttaaacaaaagaaagggcaattgttgacagagaaggaagtcagttaagtgatttgtagactgcttcgattttgcttcttattcagattcatgtttttaatcactgcaatcaacattaaacttcaaccagcattttaaaactttgtagaacattttaaatctgctctaaaacaaacaacagagcaactttcaatctcttcttaactaggtatcttaaatttgttaaatacatgaaagcacgttttttgattcttggaaactctttaagctgcgtgtgcattttttctaagatatgcaaaaaaaaaaaaaagaaagaaatttcattttcacatttttgaaatacttggcgaaattcatccgaagttgctcaaccaacttggctgccacataaattttcgccatatgatttatacactctaacatgggagcaccttccccttcaacaaacctcttgttctacacagcaattatttggaagccagtttttggcactcgcacacattcagactaccacccacacatgcttgcctaagcgatttctcaatttgcatatgtttcacacacacgccagaacgctgaaggactctctcgctctctcgtgggatccttgagttggccaggctgtggcagtcaatttgttaaataaattgaattatgttacagtttcgccatatttttttttttgtgcttttgggttttgggtctcgtcgtgtttctgccctcgagttgacctttttttgggagctctaatagaattacatatgcgacaagtttgatgaccaaactcgaaacgatatctcctgggcatcatggggctgctgtaagtttataactaattaaagagctaccaaaggctactttgtactttcatttcaaacccgtcaaccggaaacaaataaataaaagagcagaggcaacagaatgcggaaattcttatcgttcaaatatttcattttgcaagaaaaaataattttggaaaaacataaaaacggaaactgcgggccgacccaaaataaataaccagagatattaaaattcgggcaaaccatttttgtgtgaatgcctcccccccccctctcacatggctttttcttcgtaagccaacacatgcagagcataattaataatgagagcgtagtagcaacgcgaagcagaaagcggaaatccaattaacattttttcggttacttccgtttcctgtccaaatttaattctgggaatttcaccaaacacaacagagtaacaaaattaattaaattgtattttttcctgcggcacaacgtgtggtatacttaatgggccttcgtgcaacacatttccctaggattttagtgccataggtagatcgtaaaaatctatcccattcccttgctcagcgacaaagccaattgacaaagttggtcctttgtgtcgtcttctattttttattaccacttcaggacgattaacgcttcatgggccgcttacagtaaggtttgactaattagatttgtgagcgagtatatagtatatatattttcttatatgtgcgtagtcaagtgtccttccattttctgggtacccagttgtgttcataaaatgtaagcgtaataaacccttattttatttttgcgtcccttcagtttggctgactttggggaaagtgaaggcatcgctaatggaaatttatgtagtaaaaaggaagagtctgtgaaagttctagctagtcgcatagttagaagttggctaggcaaggcggtaaatgttggacagttgagttacttaattagcatcaggtggaaattcagaaaaatcacaagtgtacctgcctaattagtatttttatggaaaatattatactgacagttcaattaaaagcatgttcgcagataaaactgtcagaataaaaattgaactgaactcaaaaatatttttttatctttgttatcttcgaacaatgcaaagattcgacttgatacaacattgacgcagaaacaaaacaatatttgttcttttgagagcggtcttcatccacttataataccagccaaagctagccacacaattccgcttgatatgtttgcctttcatcgaatacaccatgaattcaaccagacccccctcccccaaaaaatatccgctgaaaaaataccccacagaccggaacagaaaagaggcagcaggattgttaaaaccgctgctgaaaagcgactttcaattaatatacagtccagggggagggaaaaattcgcagacattttcccgctctcacattccgccgcttttggcggctcaattcggtgaaccttaacgggcaataacgagcaaaagccgcagggccaacacgcacttggatatggtcgtcgtacactacaagaaaagtctcgaaaaatatgtaaaaaaaatacttcatttgtgtaaaggaaaaatcatgttaggatatttaataatgttagaattgtcaattttttcaagtgcatagttcccattctaaagtctttgctcctctttgtttaatacccagcagacatttttaaaaacgcaatccacaaagaatgttaaaatactttgtctcgccctcacacgcactcttgacccgtgggactcgtaaattgtgcaatttcttcattgttgctaatttatatgacacgtccgagagccggcgagcattaaatagagagagggggcagttgggggaggcgattgagccaggacgagaagagagttcggcaggacgagtgctaattcaaggcaaataatgcgttgcaggcgtcaggcgtcgggccaaaatggtttcatggccaaaagtcagtcggagcaggacgagcgaaacagcaaaaatacaagtgtgagtggttgggggaaaaaagtaaaaaagcccaacaggaaaaaaaagaaagccgagcaaacaaaaggaaataaaccgaagcacgtaacttttggttaaccaaatggaatatgacggctttggtagctctgacccactcagagcatatcctgcgtgggacgaggagtgtgggggcagtgaggatacatccttatccccagacacagagacagaccctcgaccggcccccaccccccatccaccaccaccatcactgcaccagcaaaccccactggcctgttgtgttagttcaaattacctgaaagtccttttgggcttttgagttgctacacccagctgcatggccaaatggaatgcgcaagatgagccaagtagaccactgcaatttgctgatttttgccaggaatatgagattcatacatatacacggtcttaaatggaattagagatatctaggtggtgctagaattggctttgtttctgttacatttaataccgcactcggaattaagaactaccgtagttaaaggaaatgtttgtgcacttaacactttgttttcagttaatggcaaaatattgtagaatttcgttgcatggccaatgacatgtttgatgtcacattaaattacagcttttaattgggatttgtagttttgtaattccgcaatttcgtcgccacataaaaatgtgcaaaaaggtattcaagtttcataagtcaacttaattttccaacagctggtgtcagtcgcttaaccgcaattatcctgaccactgaaacgcagccacgtatgagaaactaattactaagtaggagcatctaataactttatggcattcgctggctactcactttttccaagtcagttggtcggacaatccgcttaggtccagtgaaattttgtgcgaattaagacattttttatgctgcttgtgtgtctgataagaggcagctaaaaaaaaaaaacaaaaacctaaaactcatttggccattacatccggtgggtgcattgctcctgctaatcctggcccaactttgttgcattatttcaagccaagtttggaaacaaaacgttgtggaaatatccaagttttttgcagccagctagatgaatttagggggatgtgttgagaaggctgctggcacattgtatgcgaaatatattttgcatggagcccatttctgctctttcacaaccgaaagttgaaagaatatttagtgcctggctataaactgaacaatttgctgtcaaattatgcctttgaaaggcgcaagttgggcatgcgttggcaggaggtacaaagtgtcgtaaaaagcgcatgaaactgtggcaaacacttgaggcagcacacaggagctccccagaaagtatgcaacattttcgggcgtttttatggctgacaaaggaagctgctgagagagaagggggacaggggagtggtagaggacaggcggaaatgagatgaaaactggacaccatgttgcaagctagttattgaacaacagaggggctggtacggggcagggcacagatgcatccacagaggggcggagatgcacttaacatgtgtgaaaaatgcgttcaaggcgaaagcaaccagagaagctagctcgaccaggtattagtgtgtgtgctccttattcagcctttgcactgaaagaaatttaatgttttatgactatgaacctaacatcgaaacagcctgtttaatgaatttcagtaacaacacattttttttacttgtgcttttttctctgtgtactttcttgccgccttgttttaccgcaacaatgcgtttatgtgtacgttgagggtatttcggttctgttgtgtttcctcgggcttcgttcgcctggcaaattgccataaaaaaatgttttcaagcgccacaaaatatgcaacactcactctacacatgcacatgcacttgagaatgtgtgtgttgccattccatgtgtgtgtgtgtgtgtgccccataaactatgttaaaatgttgcgcattgcattttcttcgcgaatggaacttttcggttttgaattaaacaacgcacgtatttcacacctgccaagcagcagcgtcattcgctcaggtgaggcgatatgatggaaatgtggaaggctgaatcaaaagcatttgccttgggggctggcaaaacgcgtttatccatatgagtgactgacaatcgtgaatgccagagtgataaaatgagcgataatttggtgttgcgagaaatgcgggcaatgaatttaaaatgaaaaactttaatcttaactgaaaatgaacccaattatgcaattggctatttaatgatttaagattttaactgtttaacacttgcgtgccgtgtttaccaaacacttcaaactggaagttttcaagcgcgcgtcttcaggctattaactgccatctagcaaattgaaatccttgttaacacacacatacacacacatgttgaattcacctaactgcaacactgcttgtggggatttatttacagtttttgttgcctccgatggaatggagtgaagtgaagtgctatgaaattgaagcaacgaacacaagtccgtgcacccaacgcctgcatttttcctcctgttttcacccccatctggtttttccacttttcacccaacacacgcacaactttcactgattgtttagactgccaacgcatcgcctctaactatgcaacaaattgttgatgcagttggtagaaaggggtcggaatcccatccgagcttactcacttttttggcacttgacttgacagttcacccctgcactttcctgttcaccttatgcagctttacttgtgttttagttttccaactagggctgctggatcgagggcaaaacactggggagctgggcccatgaagtgggcggttggctgaggagtttgtatagagagtaaccgccgaaaccgaaagccgttaactcgaagagactgcgatgttttaagtgcttgtgtggcagcttcgctcgatttttgcttcattaaattcgcccctcttcgcacagacttaccatactcacttggtctatctattttccagccatttgaagccctctctttcctaagttttccacattgctgcgccgcgtctgtgcttatttacgcaaacataaatttacggcttgataccggaaaactttgctcatctttcatattcgcctattttttccgcattctcagctattcaaaaagtttgcttttagctcagtttaatttccgtttatttgaactgtgttattttcgaggcagattttcgtctagacgatagaagagataagaatgtaaaatactttcaatgaagggtattatttgcacttaaaagaaatatttactatatttattccaaatatttagaaagtacttttgtgctttattcccgtattaaatcctctcttcatattgtacttggtatgtggtaaaatgtatttttaagtttttgtacacctttatgattttgtttcagtgtaatgctcacctataccgtatgcaatgtgtctataaagccttaatttctgttatcggctctggacagagtgtgacttacccacttacataaacctaaacctttcttttgttgcatcagtatctgatttttactcttgttttaaagaacgaggaacaaatgacatcctgcaggattacgatagtgggggtagtctttgtttagccaaaatttaattagtgtctaataagtaacgtatctggataagccgtgcattgtattttacctataaattgtgatgtctcactccataagtactctcatattcccttaaaagcataaaatagacaaaattatggttccccaatgggttcataagggaaaagtaaacattttcactggctcgcatttcaccattagaagaaggccacccctgcagagaaaactgatatccatacctcaccaccgcggtacaaaaaagaagaaaatagaaaacaaaaacaattttcaacattttgccttggcgttgcattattggcaacagttccaccacggaagaaactaccccgaaatataaaaactgaaacaaagatgcgaagcacctcaacaaattttgattaatgcatttcaataataatagtaccccccagcctccgtccattcattttcatctcccagctgccaatttgcaatttgtttcgcatttgcactttgatggtttcattttatggtacccggggtgtgccaccgatgattttgcaatatgccacagactcggtggcgaataaaaggggagtgcaattgctgaaatttgttacgcagttacttgcgatttctggcagaaaaaagtttttcaatcatgacacgagattgaatcaagcattttcattttctacgactacaaaactctttaacgctgtgcagcatattttctttcgatctgcatccgcatccgcatccccatttcgcccatcattaattgttcctttgttggcaaagtttttggcttttccttcactaacaattacattctttgccatgcataagtttaaagtaatttaacttctgacgagctctaccctttcactgaaacaagctgaaaaaagaaaagaacgcgaacttggcgaactcttttctttgttcttttggctcttaagcgttttaaaattacgggccaacaaaaaaaaaaaaaaattggaaagttcggtgaagtgtgaattgattttcaagaaatagttttttaagcaaaaggagatataaagatagtgttatatttgcaaagtaggctaaaaactttccgctcagaaaatttgttaaaaaattaattaagttcttgtacttatgactaaaacaaattgctttgtactctcgttttggaccacttggcgggctctcaagagcaaaacttatcatccctcttggcccccgaaaaaccccttaaaaccccaatagccatcgtagaaacgcgcagaaagcacaaaattcccatgggctggcaattgaagttgagaaaacatcagagccaaaagcccactcagaccaaagtgccgagtgggggagtcgagtggatacctcagatctgaacatgcgttatgccatataaatatgggggacctatgacctgcattgacacgtgctggcatcccagccaacccactccgcattgtgtatttatgattattgttattgcgccggtgtgtgtgggcaatacatatacgtacgtatattcgccacccggaatttctgccccaccacccacttttttcccctattttgcgcacctgatgttgtttttcctgctgtcgaagtcaatttgtgtcacggccccatcgaaggcggctacggaaatagtttaagtcggaagcggggaaaatccaagaaaaaccaaaaaaaaaaaggaatgggaaatataataggcgagtacaagtgagtagaacattaaaataataataacttatcccacaatgcattcttagttcataagaactttcttataactccgtacaaagttcgacgcatctcaatgcaagtaagagataccatttttcttgtgggaattatatggtaaatttctcaactggcattcgagttatttattctgcactcctgtttttttttcatttgaacacttttggtgtgcctcgttcattgtcaggcatttctggcttcaaggcgcaataatagctcacatctacatcgattcctcctgtaaatttaccaccaaagagcccagaagtcatgtgaacgagcttttgaggtattttgagcatttctcgaatatgtttcccatattgcatagctccgttttgtggtgcagtcaggggtatagattgcgttccttttgagcgcctttaatgagagcaaactgcaggagaaagcgatgcgaaaccaattaccaggctacgaattcacgacaaaaaccccatggaatcggcatccaggaggaggagccgaaacctaatttcaatcaatttggcctaacaagcgacagattgccaacctaacgaatcaatttgatttaccaaagagacaaaagaactcgatgtcgccgtacggcaaacggcaacaaatttcgcatttcattacaaaactaaaaggctgcgcaaggatacgggcaccaaaggattaagggggcagcttcctaaatgctcggcattggagttcctccgattcgggactcgaaaataaagcagcagtggcaagtggcatcattacttaagcaaatgggaccatcatcagtcgatggccggcgaagttccgcccagacaacaagtgcaatcaattttcaacaaagggcgatgcgatgcgatgcaatgcaactacatccattttccccctttattttcccaaccaactacccttaatccattcgctcatctgcatacaactgccttgtgccacaaatgctgatgctgccacttgaaatgcaaaaatatttggaaattccccgattgcatttggggcgcactgcctcgactccattcgaacaacagaagcagatatcttgatggagctgtgaatggaatccgagtgcggttaatgagccactgctgagtctcaaaaatgaaatctctaaactgaaagaagccggtggtgcactataccctttcaatgggctttagtctggttccctaatccaagtgctggaattatgatttgtggttttttggttcgaacgactcgacaatttcacaatttacgtgcacagctcagcagcctgagcatacacattcattaagtggatttcaatcgctgaatctttcaaaaaaatgttgtaattggtgccttttctgtagaccaagtaataaagtaacagattgtaattataatatattctttttttaccatttttggtcagaagcacgacccaaaaagaggcgcaaaagaaacgtgtccctctttactctcctccgaaagccaataaatttcgtttgctgtgcgccgactgtttgccaaaggacatgcaggtttatccaagactgcgaatgaccaaaggcccccccccctcttttttttattaaacagccagctcacgtcgctcccccttccgccaatgcaaatggggaggcattttatttgtccttgcttcttcgccaaacaaggaatccgctttaaaactgaaactctttttcggatcagtgcagcggccttggaagtgattcgtcaaattccgcactgccatatataacgaaaaaacatttttgggataaaaaaaaaatcaccgaaaggatgtcgtttgtttacaggactgccagctgagctggccctcgtgttttgttcaacaacttttcaagcgaagtggcccctcggtggccatccatctggagagatgcgtcttttattggacatcggttgggaaatcgaatttaagggctgcgatgaacgatttaatccacctttcagcatttaacagctgcaatgaatagtaatgcctggttgttgtcaattcaatttgaatattatttttcacctgcgcaagcggtaaatagcaaagtgattcgatcccattggagactactgaatgggcatcaattaaaataaaacacacttttcaccactgggtgctgttctggcaatgtcattaatattccgcagccaggctatgccgcataatttaaaaccaaaatgatttttatattttcaattaatttcgaaacaataaatcgaggtacgaggcttacctatgaaaatgcatacaattaaatcgccgcattaatttgagaaaggtttcgtacgcaactgaatcgttaatcatggatatgattaatcaaataaattgcattttgtatgcaatgctaacacttaaagtgcacaatgcacataattcaacaataaatgttatattacctaattactataaattacacgaaacaaattatatacaaattataaatacacgaaatatatttgatatgaagggtattttacattgccattgacacttgagtacgattttgaaacccaaaactgtctcatcatttgcaatcgaatattctgccatttccattaagacatctgtagtttgaggctatgctcgaagattctacaaagggtaagtctcctggatcaacccccgtaagatacagatttgcgaaaagatatgtattgctcccccaattgccataaaaaccgagaaattgtgagggcaattcatgccaggaatttacaacagctgatctcctgatttattcaattttttccttttctaccctgacggccattttcggttttgtatcttacatttagctacccacaggggacagtttcggcaatccgaagggttggctggcccacctgattggaagtgcaaaaataagagaaaaaaccagtgagggaaaccatgtcatagtatatagtagtaacaatctctcccatggaaacaattatgtattttcggggaccaagagattgccgaactggggtagattttccttggccagcccttggggtattaccttgtggaaagctggcatatgcgaggcgtgggagtagattcgactttttgtttatccacccataagtatagcccgtagctactgcccatttcagtcttaatgcatggaagatcataatgaggtttgacctatggataaaatggtttcgcaaatacgccgagaggcaaaaaaaaaaaaaataaaacccataaacatggcttgtaaagtgcgtgaagcctgacccgcaattgtttgttgcaaattgtcgccattttctataaatattttaacaaaaggctggcctggcaaggaaaacttacagccgccacccggaaaaacatatacgtttttatggcatcgttgtgctgatgaggaaaacaaaagccagccaggtatccaatgtacatatgcaaatgggaacgttggtgcccaaatgattggcaaacaactcgacatggttgtgggatttcagacgatagtgttttgtgccgaaaaccaggtatacactcaagaacataaaagggctaaaaaacgattctatttgttataaccacttttctgggccaaatattgctgttaaaatctattgttgaattgttaaacagttcaaacttcaaacaaactttaacaagttcaatcacaaaaggtgccccactttgattacctgtatttttccaactccactttttttaatattacttattaaattttccttttaataacacatgctgaggacgtgcaaggagattcacgtaatggacaatgagtgcacatactatatgcatcgtgttgaaaaaaaaagcccacaacaaaatggttaagtcgccattttttctgggaatgatgtttaaccttttcggaagaggatcccctgcagggagctcttctgtccccaccaacaccccacacccatcaacacccaaccaccgacaacagcctactctcgctgcttttgacatctttcacagctcctgtgtgacagtttacagctctcgtagtttggagctcagcccatgagcttggggctccgtaccctgcacctgtcatcgcttttaacactgtgtaatattttccagcttgcaagcggtgaaatcgcacatccccagcttgcacacttccgacttccttggcccgcccacttaattgaaaatccaaactgcatttccttcttgacgcgatggggcgttggattggtgggctgggtggtttgttggcggtgagtgcttgtgtgcgagctaaattaattagtagctaatgaaacggggcacatatttatacagggctgcttcctgtctggctgtcactaggtgcaggtcctgtttcacttcctgctcgcgattctggcattccatcgatgaccccaggccttcactggcgacgccggaaaattaaccatttgaacacattgcggttattgtgctctttaagttcagtgaggaaaaaaccgtggtcgaatctttatataatattatttattgatttccaccttaccgtaaactttttctcagtgtatgtattaatttaaaaccacactcaactcacattgctgccaatggctaagccaatatccttggtcctcctaagctcgcttttttcctcgctcgaaacagccatttatcagggagttccccgaggtggcctgcactagcgagcgagttgattaattaaattgttgacatttttaaaagctgccatggagtgggcattattcacagcttaacatatccctctttgcctctaaacgatttgttgctggccatgtttgtcatggttttattgccttttctgtgtcatcgtctgctgtgttgttgcagacaatccactagaaaattagtttcttgcggttcagatcgcttaacttggccaatgtgatttactaaaataaatgtatttgtgtttacttctttattcaaatccattttatcattcgcaaactcacgaacgtatccagtatcctcatttgcttaatatgatttttatttatggctaatgaaagtaatatcctgcccagagaccatgattgaagcgtaggcagcttgacttccataagtcacttttaattgaaaccgcatcaaaacaattaaaactaagcaaattgccattctagccctcggagcactcaaaaaactgatcctatatataagtatatcctttttttgtgcaaaaaattagatacccagtagactgcgtgtttgtgagcgtgtgcgaggtattaacttaacttttccacccaactcaattaaaatgttagacaaaattgcatatgcacaagagcaggcagcaagtaaacaaatccaagtgtacatatgtgtgcgaatgtgtgtgtgctgcataaattaataaacttgatagtgggcgcgcgagctgggggcgtggcaccactcgtcggacataaaaactaaacgagctttgagcgctgggcgacacgtacgcagagagtagcagcaattaaaattttagtagtcgcccagccgtgccaaaagggggttaagggtgggaagtagttgggggttaagggtgggcactagttggggcttggggtttccgtctgctgctgtcggctcatatgtatgcctcgcctatcatcctgtgccattcaacagctccaatttttcaacaaacacagtggaaaacatggggaaattctggcaaacatccttcctgctgtttctatgtagtttaaagcttggcaatttcaaagtaaactggccaaatttatcgatatgacttttactcctattttattaagtacatcaattttatatctggcattaaatataaaaaggtttttaatacatgttttaagtcgtacaacttgttcagaccttatatcccaacgaaaatgaaatgtcgaacgtgtttgcaaggtggtgaaggatgagaaagtggcaaccggaaggagaatgccacttccgctgtttgccaaatcgacagcgacatcctgctgtgggcctaaataaattgtgttgcatacttttaagcgcttacccgaggtaccaaactttgtgctggttttggcatggcccttaatgatgcaagagtaagttttgggtggatgtaggttcctaggagttcgctttcaattagtaccaatacttcttcacacagctatgtcatatgtgcctgcccaaagctcagttaggcgacaagaatggcttcgggaatgtatcacattcacctcccaaattggtcgagttcctttggctggtcaaaacaatgtggccgaactttatggcccagtagttgccataactaattctgtcaacgcttctgcacaactaattgtaattgtaattgcaaaatagtttgactcacagtcagcttcgtgtgcagcctttgaattgcaatttgccaaagaatttagcacaatgaaattcaattaacaacgaagcacacacatacacacacagctcttaaaactgcggcaaaatccctgctactattttatctcacttacacaggagccgagagagagagaggtggcagatagcgtgggaaagggacgcaacagcttatgtcatgcgtcactaaatcagaacaattttgaacaaatttcaaaaataataaaagcccattttaattacactcatgctctggacagaaattgtgtgtgtgctctaaaattgtacactttccgaaaataaattgttttctctaaagataaatcagtgggaatttttcaataattaattaatgatttatattttatgtgtaattatatttattagaataaaggtttcaaatttattggccaaaaaaatttgtctataaattcgatactttctccgagtgctatttaaattacatgctgcataaataggcttccgttttatttaggttttgggcatttgacgttcatacacaaaatggggtttataataaatgtaattgaaattaccaaaccctgactaacggtcgatttcaccaaaaacgatgtccagcgatccaataatggccacaacatcggccagcaggtgtgcgggtgccattttggccatgagggctagatgagcataggaagctggacgaatcttgcagcgatagggacgcgatgaaccatcggagatgaggaatgctccgaattcacccttgggcgattcaacggcacagtacgtctgtcccggaggcacccggaatccttgcgagaagtgcttgaaatgatggatcagatcctccatgccctccttcatcttgcttcgttgcggagggcagatcttcagatcatccaccttgatctcacccggtggcatggcgtcgatgcattgcttgatgatattcaccgactcgcgcatttctcgcatgcgcaccaagtagcgatcgtagcagtctccattcgatcccacaaccacgtcaaaatccatctcgtcataggcatcgtatggctgttgcttacgcaaatcccactttacgccggtggccctcagaacgggtccagtgcatccatagtttaaggcatcgtgtgcggatatgactccaatgccaatattacgcatacgccagatgcgattatcggtcactacgtcctccacttcgtccaatcgttcgttgaattgattgataaactgatacaaatcgtggagaaaccctagaggtatatcactggccacgccccccggtcgaatgtaggcggcatggagacgagctcccgaagcgcgttccgaaaactcatacaacttctcacgttcctcgaacagccaaaagagtggagttatagctccacagtccagtaccgacgaaccaatggccatcgtgtgattcgtcagcctcattatctccgaaaacatggtgcgtatgtacttggcccggcgtggaacctccacattcagcaacttctccaccgccaagcagtaggccaactcattggccatgcaggacacatagtccagacgatcgaaatagggcagtgcttgagtgtacgtcttgtactcgatcagtttctcggttccgcgatgcagtagcccaatgtgcggatcggcattcagcaccgtttcattatccagctcgaggatcatgcggagtactccgtgtgccgccggatgcgcgggtccaaagtttatgagcttggtgcgaaatgtacgatcaacgggtggaatctgttttcccttaaaattgggacgctttttccactcgtcaccttcgggataccaaactatatactgttgtttattcatgaactcgggatctggataccagtagtgtgtgtcatagggctcgtatggcgggcctggaggatacagctcatcccagctggggtcacattccttaacttttggctcttcggggcaatcttaaaaaaagctccttacaataaatttaccagtgtttgagggatcttaccttctttgtttgatgaaaacacgcgacggttgaatagttttcccaaatccggtctcttgaaggtggactttaagccctccacggtcaaatacttttcactgaggcggttcttgtatgcctggaaacgtctaatttcgttgggtgtgaatagcttatccgccagcttgcgaatcccttgcgttccgccagacatgattaccggagtattaaaaaaaatattagttctatactaacttctttggaaaattaaaaatgtaaacaaatgtttctacccttagcttactaagatgttaagagcaacgactactatctccagtttatttttagatttatatgttattttgtaaactgcctattaatccattgaaccatcattccttgcagatcttcgatgatcactaccacttcgcacatcacaaggtctcgaagcggtcgctctcccccgccacgcatcaccagactcgcctggatgacgacgatcgcgtccactgggcgaagcagcagcgggccaagtcgcgatccaaacgggactttatccgcatgcgaccctcaaggacctcctcgcgagccatgtcgatggtggacgccatgtcctttaacgactccaagtggccgcagatgtggtatctggtaagttatcgaaaatgcaaagcattccattccatttaccattcttagaaagcaaaatgattatttcaatgttttgatgtttcaagaacacaaccataggtattgggatataatatttaaacaaatattttttatacctacaaattgttataacgtaaccttattctcagaatcgtggtggtggcctggacatgaatgtgatacccgcctggaagatgggcataaccggcaagggcgtggtggtgacaattctggatgatggcctggaatccgatcatccggacatacaggataactacgtaagtagtgacattcgtttatcataaaacccatactaaattagcatatgataacctaaacaggatcccaaagcctcgtacgatgtgaatagccacgacgacgatccgatgccgcattacgatatgacggactcgaaccgccatggaactcgctgtgccggcgaggtggcagccaccgccaacaattcgttctgcgcggtgggtattgcctacggcgccagtgtgggcggagtcaggatgctggacggagacgtcacggatgcggttgaggcacggtcgctgtcgctgaatccgcagcacattgacatatacagtgcctcctggggacccgatgacgatggcaagacggtggacggacccggcgaactggcatcgcgcgcctttatcgagggcacaactaagggtcgcggcggcaagggcagcatcttcatatgggcatcgggcaatggtgggcgggagcaggataactgcaactgcgacggctacacgaactccatctggacgctgtccatctccagtgccacggaggagggccatgtgccctggtactcggagaagtgcagctccacgctggccaccacctacagcagcggcgggcagggcgagaagcaggtggtcaccacggacctgcaccactcgtgcactgtctcccacacgggcacctcggcgtcggccccgctcgccgctggcatagccgccctggtgctgcagtccaaccagaatctcacctggcgcgatctgcagcacattgttgtgcgcaccgccaagccggcgaaccttaaggaccccagctggtcacgcaatggggtggggcggcgggtgagccactcctttggctacggattgatggacgccgccgagatggtgcgcgtggcccgcaactggaaggcggtgccggagcagcagcggtgcgagattaacgctccccatgtcgacaagtaggagaagcaaatagatttaccccttcgttgtggtactcacttaaattctctactttccagggtcattccacctcgtacccatatcaccctgcaactgacggttaatcactgtcgatcggtcaattacctggagcacgtccaggccaagattacgctaacgtcgcagagacgaggagacattcagctctttttgaggtctcccgcaaacaccagtgtcacgctcctaacgcctaggtaagtggggcagatggtaaccaccgaactcctgctaattccctccatcaacaggatacatgacaactctcgttccggattcaatcaatggcccttcatgtctgtgcacacctggggagagtcgccgcaaggaaactggcagctggagatccacaacgagggtcgctatatgggtaagtctaagaactttttccaagataccaaacattgtgccgtcagatcgatgctttaaacctgtaccgtttaacatgctgcgcttttgtggatctcacccactaaacaccccatgaacccacccatttacccaccggcttgtaggccatgctctgctcagggaatggtcgctgatcttttatggcaccactcagagcatcggtcccaacgatccgatctcggtgcccaagccaagtggttcggaggcaaccaccccgaatagcagcagcaccaccagcaatctgcatcaagcctattcaccccagtatccccgcattccacccaataactttggtagctcaccctctggcggttccaagttgcccctgggcaaagtgcctccacccaataaatccagctatgtgacaaacaatccgctgctgaattccgcaccacccaaacagggttaccaacagatttcggccacctacggtgtgattttgggcaaagccaatggaaagtctaacaataacagcaaggagaagaccaacaacaagggaaacaagagcaataatggtaacaagggaaaatcaggcggatcgagtggtaaccgcaaggagcaaaccactcagagcaccatcattcagacaagcaccagcaagaataagtactaccgcatctcgcagcaacagcagcaaaagaacaataagcaggacaggaatggagtgcagacacagagacccaaggccaactccggcgagaaatcctatgacgagaagagtcgcaaagtggtgggtgagatcacgacgaattccggcaacggatccatcaaagcagccaagcaggtgaaggagagtaccaccacctcgtcgaattcacggatacccaagctattcgagcgctacgagaagatccaggcaatttttcccgaactagaaccctatgaaaacagttctcccaaaggaaaacccaagcaggccaagcagggaaaacaattcgaggtggatctgtttaagcccaccaatgggggaaatagtcgccagggcaatacgaagaagtcaccatcggtgccgccgccctcgcaaacgatggctaccctctccattttgcccattttacccgccggcggtagtagcttcctgcccgatcagaagattctaaagaaacagcaactgctgatggccgcggccggagtgatggcccccgctcaggtggaggtggaaatggaggaggtacacgcgactccggattacgaggcacggaaagaccaacgaaaggaggtcaacggaccaaatggtagccaaccaatttttggaaccacatattttgctttttagtttcgtacaaaagcattatttgtagtattttcactgagccaccttatcatttattagtatcaatttgtacttgtttagtagatttcgtcatgatcgttttctgtgtcgaaagtatccatattttgctttctattttatgattttcgacccgtggccgtcaatgaaagtttgacagccactgagtggcactttcttgttactttcatcaatccaagtgcaactttaaaatgttttttttttcggtttgttggccattgagctgacgttgccatggctgctgtcagtggagcaatttttcatttttatcctttttgtcgaattgtgatgaaagttgcgattagctttcggcacttgatctgcgccatgtacatgtacatatagtacgtatttcgttcatatggtagatttattggcccttcacttgacttgtttgcccgcctgcaatctgcaatatatcatacattttataacattttgcgtttgtcgttcgctgttgattttgtatagatgtttcgattttatttggattattgagccctcggctagtcagcaataactaaaagcatttgatttctctactctgcgttgcagcacaaatcacacaatgggatatgatattctacggcaccgaaacgcccgcccaacccgatgacgtggccaatcccagccagtcgaaccagttcaatctgtacggcaacgatatggcccacaatgacgtcgagtacgattccaccggccagtggaggaatatgcagcaggtaagtttcgcatttattgtttacctgtgaaaatcccccacgtgcatgaatagctacatagattttgaatacagtgaatgcttgcgtactagaagatatattgtagaaaggcaagagattgccgataaatctaggcttgttttctattttaatatattgcttattaatacatttaactaaaagtatagaatgcatataggctttagtccagccttgcgaacctttactgtattcatacgccacgttgcccttcgtgttctgtttatttcttggtcttgcagtgccttgtagatgctttgtctgggagcgaggagataggtagtgagcacaacccgtatcagaatcgcggcataatgctgcgtgcttgcatgtggctagcttgattaaaccccttagtcagtcattcaggcgggacaattggacagtcgcagtggcttgcaaactgtgctgccgtgcagaactctgttcctttggcaggtagcctatttctctcgagtttgctcaagttgcagcttgtttattttgatttttttttacccccagcccagcatgccttttgttgttaatgtaccaagttccccagcacgcgccaatgcacagaagccaaagtatgcaaagtactcgcccaatagcgctcataaatttgcaaatacttaggcatacactgtcagcagctatctttgggcctgtttgctgcactcctgcctccagccacgttcacctccctaaccaagtcaccatccgccagcatcttaattccacttttggcagccgtttttaagcctcgtttttggcgatgggccaagaggcagtgcctctgtcagggacaccaggacatcggtgggcacagcgaaaaactatcaccagcaattattagaaaataaaatacctttaactacagctgaacaagttgtatttgactaagaacgcacgacattcatttcgatggtagtgcaaaatatgtatattctgtaggtatcattggtctgccatttttctccgtgtgcgaaatcagcatttttctaaactttgcctacgtttggccagcccatggcagcccgggctttattcaagtgcacttttgccccgggcaggcagcaatttttaaccttttggcacctattgtgctttaaaagcgttgctgctttccgctgccactggtcgggcagcaagggatgtgcggtaataaaggcgagtgcagtgaccttagttttttgctgttcaccgctcgggctggctggcaaaaaactttttgcataacaaacacttttccaggcagatgaaggggctccctcccccctttgaaagtccttcgtccctaccgttttcctgcgccgaactagcacgcgacgtcattgcatgtgaacttagatagacttggacagacctttttcggatggggcagctataaataaggccagacggagccacatacataagtgcttaaaatgccagacagagcggcaacatgcaatgaactacaacaactggaattggaatcggagggggccaaactttcagccacttctgactggccaaataaaaccaaaggcaccgactttcgactttaaactttaagcacaggaggaatggccataaatgtacttcaatcctcgacttgaacgtatttagtgctcttgtattcacttttgatggcattaattttgtgaaattcttactgcttttcaaactaatctgctgtttaataataaatcatattagatttatacttgctttaaattagatttcagccagatataaccacaactgtctgtgattagttggattactcttatccttgcaatgctatttgttatttatagcaataaccattctgaaagtaatcctaagataacctaaccgcttgtaccattaagccccgtctttcgattatctatgctatctgtaagaatgtaattgcctatcttaatccagcaatatccttttcctttccaggtgggcgaggtgggcatgacccgagatcacagcaacaccgccgcgtgccttaagtggagcgatcgcaagtgcttaggtttgtccttactcttttttatgatcatgcaagtcttctttctaaactttaaacatgccaacgacaacaacaacaagaacaaaaacaacattatcaaatgcattagataatttagtaacaaatgacggtaaaaaaaaagaaaagaaaatcggcaacagcaaagaaacaaaattgaactgtgtaaagaacgaaaaaccgaaatgagatgaaaagcgaacaaagaatttccatttaaaaaatttgatggcaacattgcgagaaaaaatacaagtaaaaataaacaaaaatacaagtaacttagattaggcgagctgatgagaaggaatcactacaagtccaaaaaaatatacatactaaaaattttgtagttaaatttaaatgtaagcctagttgtacacaacgacacaagcaacacacacacacactcacacaaacaaacacacgcacacgtattagggggcgtggcagggcaaaaaaacaaaggttgttctccattggatatcctttactttttgtttgtcgagaaatgggacgcacaaagcaaacttttgtattattttagtcgaaatgcaatttaacgcagctatatacaaacgcatcctaaatatattatacacattatatttaagagtttagttgaaatttatttgtacgattcgtttttattgttttcgtttagtctgtttgtgtttgttttaagcctgtttagtttgatttgtttttcccatgttttttccaaatgcctgcttcccgtgtacacaggaaaaaaagtaagatcacttttgatcaatcaaacttcttaatgtcaaatcaaattgttcatgtcattctaatccttttacttatacaaatttacattgttttgttataattattaatagcaggttttaatcttaatctatcgaattgatcttgaaaatttgcatacattttcctgtgtaacattctgtatgtatatgtgtgtacatgtaaactaaatgcattatttcagatattgccaagccagccaagtagtcgcgccacagtttgaaaggcactgtacgcaagcttaagctttttaattgtattttttgcctataatttgagttcccttcttgacttttgatttgattttgtataagaaatattgtttaatgccatgcagccaaacgaaaggaatgttcaacagacacaaaaaccactgcagtttagagttcatagtaaaagactgtttcttaaaat

SEQ ID NO: 22478 - DNA, 2888 bp, DROSOPHILA
cagcatctcagcctcacaaccaatatcccgagcaacgtgcacaaaaactattggaaatatcctaacccacaatgaaaaacgacgtcgtgcgatggagcaggcagccaactagcaacaccactaacagcagcagcagcagtagaagcgatagcaacagcactcataagcacagaagcaaaagcaacaaattaaatgctcgacaattagggtcaaatgctgccagaagttgtcagcaaagatcctctgtggcaacaacactagaagatgaacaacaaacaatcattgaatgtgatataggaaatttcaatttcgattgcaatttattcaaaactagttttttaacgcaacacaaacagaaacgtagtggcaagagcagcagcaaaagtaagagcaacagaagtagacccctagcgaaaacgaaagcggtgtttctattagctctgcaatttagtgccgtagtttttttatgtaatattaatgtcggtttcgtggccggaagtgtggcaactgcggcatcatcggcaggcggctcatcgccggcagctccatcatctgcgccctcatccccgcccacagttgctgtaccaccgccgccgccaccttcgtcggcactcaaagtggatccaaatggtcagtcaccagtgctgccgccctacgttctcgattatgagacggggggcaaggccaagctaacgccaaacaatggcaagttcggccaatcgggcagttccgggagcaataacaaccacatcgtcggacactatacccacacctgggcggtgcacataccaaacggcgataatggcatggccgatgcggttgccaaggatcacggattcgtcaatttgggcaagttgcagatcttcgatgatcactaccacttcgcacatcacaaggtctcgaagcggtcgctctcccccgccacgcatcaccagactcgcctggatgacgacgatcgcgtccactgggcgaagcagcagcgggccaagtcgcgatccaaacgggactttatccgcatgcgaccctcaaggacctcctcgcgagccatgtcgatggtggacgccatgtcctttaacgactccaagtggccgcagatgtggtatctgaatcgtggtggtggcctggacatgaatgtgatacccgcctggaagatgggcataaccggcaagggcgtggtggtgacaattctggatgatggcctggaatccgatcatccggacatacaggataactacgatcccaaagcctcgtacgatgtgaatagccacgacgacgatccgatgccgcattacgatatgacggactcgaaccgccatggaactcgctgtgccggcgaggtggcagccaccgccaacaattcgttctgcgcggtgggtattgcctacggcgccagtgtgggcggagtcaggatgctggacggagacgtcacggatgcggttgaggcacggtcgctgtcgctgaatccgcagcacattgacatatacagtgcctcctggggacccgatgacgatggcaagacggtggacggacccggcgaactggcatcgcgcgcctttatcgagggcacaactaagggtcgcggcggcaagggcagcatcttcatatgggcatcgggcaatggtgggcgggagcaggataactgcaactgcgacggctacacgaactccatctggacgctgtccatctccagtgccacggaggagggccatgtgccctggtactcggagaagtgcagctccacgctggccaccacctacagcagcggcgggcagggcgagaagcaggtggtcaccacggacctgcaccactcgtgcactgtctcccacacgggcacctcggcgtcggccccgctcgccgctggcatagccgccctggtgctgcagtccaaccagaatctcacctggcgcgatctgcagcacattgttgtgcgcaccgccaagccggcgaaccttaaggaccccagctggtcacgcaatggggtggggcggcgggtgagccactcctttggctacggattgatggacgccgccgagatggtgcgcgtggcccgcaactggaaggcggtgccggagcagcagcggtgcgagattaacgctccccatgtcgacaaggtcattccacctcgtacccatatcaccctgcaactgacggttaatcactgtcgatcggtcaattacctggagcacgtccaggccaagattacgctaacgtcgcagagacgaggagacattcagctctttttgaggtctcccgcaaacaccagtgtcacgctcctaacgcctaggatacatgacaactctcgttccggattcaatcaatggcccttcatgtctgtgcacacctggggagagtcgccgcaaggaaactggcagctggagatccacaacgagggtcgctatatggcacaaatcacacaatgggatatgatattctacggcaccgaaacgcccgcccaacccgatgacgtggccaatcccagccagtcgaaccagttcaatctgtacggcaacgatatggcccacaatgacgtcgagtacgattccaccggccagtggaggaatatgcagcagcaatatccttttcctttccaggtgggcgaggtgggcatgacccgagatcacagcaacaccgccgcgtgccttaagtggagcgatcgcaagtgcttaggtttgtccttactcttttttatgatcatgcaagtcttctttctaaactttaaacatgccaacgacaacaacaacaagaacaaaaacaacattatcaaatgcattagataatttagtaacaaatgacggtaaaaaaaaagaaaagaaaatcggcaacagcaaagaaacaaaattgaactgtgtaaagaacgaaaaaccgaaatgagatgaaaagcgaacaaa

SEQ ID NO: 22479 - protein, 901 aa, DROSOPHILA
MKNDVVRWSRQPTSNTTNSSSSSRSDSNSTHKHRSKSNKLNARQLGSNAARSCQQRSSVATTLEDEQQTIIECDIGNFNFDCNLFKTSFLTQHKQKRSGKSSSKSKSNRSRPLAKTKAVFLLALQFSAVVFLCNINVGFVAGSVATAASSAGGSSPAAPSSAPSSPPTVAVPPPPPPSSALKVDPNGQSPVLPPYVLDYETGGKAKLTPNNGKFGQSGSSGSNNNHIVGHYTHTWAVHIPNGDNGMADAVAKDHGFVNLGKLQIFDDHYHFAHHKVSKRSLSPATHHQTRLDDDDRVHWAKQQRAKSRSKRDFIRMRPSRTSSRAMSMVDAMSFNDSKWPQMWYLNRGGGLDMNVIPAWKMGITGKGVVVTILDDGLESDHPDIQDNYDPKASYDVNSHDDDPMPHYDMTDSNRHGTRCAGEVAATANNSFCAVGIAYGASVGGVRMLDGDVTDAVEARSLSLNPQHIDIYSASWGPDDDGKTVDGPGELASRAFIEGTTKGRGGKGSIFIWASGNGGREQDNCNCDGYTNSIWTLSISSATEEGHVPWYSEKCSSTLATTYSSGGQGEKQVVTTDLHHSCTVSHTGTSASAPLAAGIAALVLQSNQNLTWRDLQHIVVRTAKPANLKDPSWSRNGVGRRVSHSFGYGLMDAAEMVRVARNWKAVPEQQRCEINAPHVDKVIPPRTHITLQLTVNHCRSVNYLEHVQAKITLTSQRRGDIQLFLRSPANTSVTLLTPRIHDNSRSGFNQWPFMSVHTWGESPQGNWQLEIHNEGRYMAQITQWDMIFYGTETPAQPDDVANPSQSNQFNLYGNDMAHNDVEYDSTGQWRNMQQQYPFPFQVGEVGMTRDHSNTAACLKWSDRKCLGLSLLFFMIMQVFFLNFKHANDNNNKNKNNIIKCIR

SEQ ID NO: 22480 - DNA, 8259 bp, DROSOPHILA
gtgtctttgaaacgtaagttgccgcctgttaaagatttgttacgttaattcacaaaatttccccttctcagccgccgatcaaaacgaagcgcttatttcaaagtcgaacttcaaacacctttattggactccactgcagcaaatcgctcatcacacagtcaccggttgtaatctgcgtcctggtgatctgatggcctccggaacgatctccggtgagactccagactcgtacggatcacttttagagctctgctggaagggcaccaaaacattggagcttccgggtggtaagaccagaaaattcctccaggactttgacgaggtcatcatccgtggccactgcgaaaagaacggactgcgaatcggattcggggagtgtgtgggtcaggtgctgcctgcccaccccgttccgcagtaggaccacttattaacataagtaaatgaaataaattctattcagtcttcctggatacgtcaatacattatgatgttcggaaaacttcaacttttcgttcaaaagcatactttttgggataaatggccatccatagtagcgtatacgtaatattttttctcggtgcacagtaataagctcaacaagtgctcaactctttcgctctctcgctacgatgccttgctctctttcgtttacacaactctcgctccaatcggagcctctgccattccacgcagcttcgtaaatacgcgcacgccgcttcttctttggctgcagagaagagcggagagcgccaatgggagcatagctgagcggagcagcaaaccgcattcattcctcgaaagtcggcgggcgaaggtgggcgcgctgcgaaaagtcaaacggcaaaacggcagaaaggcaaaacggcccgcctatcgggcaaacttgtttaaagtgccataaaaaagcctctaaaaagcgtagaaataaaaaaagctgccgtgcagcgcaaagcagacgcgactggcgccggtgccccaataataaattttccgacgagtgtgcaacttctttcggttatttaaaacaaaagaaataaataagtaatacaacttaaagtgcaagtgcagtggttgaatagcgccctgaattaagtgtaagtgctgctcgcaaattgaaattaaaattagtgcagaatagtgcaaatgttttccgcaaacaacgctgaatgtcttggaaaaatcaattttttactccactctgcgcaagtacacacacacaaatacgctgactagcgaagggcagacggcgggttggggtgggccacccaccctggcagaaaacactctgtctgctcacagtacacatgcactgttagaaatgttaatatcttttgcacattatcacatagtatgcatatggatgttctttaaagatatgtatgtagaacaattgcgttcgagtagtaggatcaaggggccattgaaattattcgtattttggatacattataaaataatatacaacccatttgtttactgtgtggaatgaagtcaacaagagacctccgaatccatacccattcaaattcccttcgccattgttgttcttgctgtcctccgccgactgcatgcacttttgtgtttttgcattgattttccacatcgttttttacaccgactgtcgcagtttggccaaatgcatctgcagcacgaagatgtatcccccgaatggcgcggatgtgtctgaggatggggacatggacaaatgcacacgcagcacgcaaaaagttaatcaggccccaaagaacaacaaaacggtggggcccaaaacacactaacagcgaaggagaatgtgagcctaaagacagttttataccctgtgataaaacgaactataaactaacataggttcctgtgttacaatgtgatttttcttaattcataagtattaggaaaatttattggtgcaagattttaatgcaagatagttttagagcgtgttgggtacaccctgacaagtgtagggtatcgagcagtatttgcaattaactggcgccgtcggctatcgtgcgagagcagccggcgggttccgcctcctcgcccgcgggtcctccttcggcccactccacggagcacttgggacagcgccagttgaacctgttttggcgcgccagagacaccgctctctagcttcttgagttctcttcatgtgcgcatttgctgaaagtggagaaaggagaggaaaccagaagcgaaatgggagaaaagaaaggccagaaatagcgtcccttcgaaattataattgctctataaattgaacattattataatcatgatacaagaaatattgtacgaaaatggaaaaggaacagaaaatattctattcggagcttttcttcaactgggctttatcgcgttgacgcatcttccaaagttttttctggcggacgaggtcgacaagatcaagtggtgattgcgggacgactttcgacatgatagcatccagtttggagttaatcatgttaaccaaaagtccgactgcattgacaaccgactgctgatcatttggatccacttccaacaaggcttctggtattggtatttcttgagctggagagtgctctgaagaacccgatgaagagtcagagtcctcgcttagattggcctctaatatggctttcgctaatttttcagttatcgaatcctgtgaggaacctgatgatgggtcggactcctcgttctcatctgaaccatcacagtaatctttcgacacgtctgatgaatcggaatccatttgcaaactcttcttcgcgttggaatcctcagtggtgtccgaatccttattgctacgatttgggttctgcatgaaatgtggtaaatggaatatgaatgcactcaggacacaattaaccaacaacataccatcttattcatctttctgaagagttgcaaaatagttaagcacaatgacgaagccaataaaattcactgcaatccagaaaatgaagtaaacgaacacaagttctccactcatgacattcgagttcagaatgaaatagttagttggatattctatgatatcgatttgacaagtaacttacagcgtgctggataataaaattagcaatcccacaaaatcgaatcgaatcgttctctgcaaaaattgctgaataattctattagctgttggtcagctgtttcaggcaaaaggaactgtcaaacattttgacagttcatcaacccctaccagagttgtcaccatctatggcgaaataatctagtatttatttaatgctagattttttgtaaatcaacatatcgcgcttttgctttcattcttgattcacttgcatgaatttcttgaatggaaaatgccataaacaatagccgtaatcgcatgataagtctatcctgaactgtctgataaattgcttatcttggcttaaatttcatgcctcgtcacccacaattaacccaaatgccgccgatgcaaatttgttaccagctaggtataaacacatttttatttgccagtgtgtacatacatatgtatttatatgtataagacaagctaacgtatcctataattggagcgtaataactttaaccagccacataattaatgacggcaaaatttctaatcagcattcaggggggaaacgagtgtgaggtggagtgttttcaagaatgcgtgcttatatacatatgtacatatgtacctttcgttaatggatgataagggggataaattaaaggtagttcattcataggggtacacaattgtgtaaatatattctcgcagttccatctagatgctccacactgcaatcgagcctcaagtgaaatgattcctattctggcggcgcctggttccaaatcggttccaaagtgcaaccgttccctcgagacttggagtgggtgggtgcttgtggttccctcatttgatccccccagcccccgcaacgtagacagactttgatggagacgcttggcgatcggtagtgttcgattgtggagctgtgcgagtatttgggtctggccattatcatcggcgggtcgacttgatatagacggagagctcgcgaattgtcatcgtctattgatacgccaaccgaatgtgagatttttgtggtggggaccagaggttggaaagggtgcgagtgtggcccgtctattgataattcctgtgtacatgtttcttattcagaaaagacagaacaatatttataagctgatgcgttctttcagctccttttggttgttcaaaatgccgtaacattatcgaggaacccgacagtcatacgcatccaaagtaaattatactgaaggtggttttgaaaaggattccagacatgaattgggctatctatcttttgttggccctgatctcgctgggcagagcaagtgagtacctcaaagtcttcttatctatgaaatatttatgaatggaatttttcttttttttcttgattagcacctgttcccaatcgccagtatagctgtatgagctaccaggaggacgacaactcatttcacgatgatgatggcgatcaggactctagtggcgagctgcaggagcagcaggtggagtccactccgattccgagcgagccacatagacgcacctgcccagatggctacactttctgtttcaccatctggaaccagacggccaatggagcgcgggttgttaaacagggtgagttcatgaacaggattttttgtttaattgtgaatttatgaactcaaatttacctaggttgctggaaggacaacacggatcgcacttccatttgcagccagtcggaatgtaccagctcggctcccacctcgaagaccagttctttgtactactgttgctgttcgggaggagtgtgcaatgcccaatattccgtggtcgaaccggcacctctggaactgggctccaatgagggacggacttcgatcacaaatcgggcgacagaaaaacagcaccagtcctttttggccagtacaatgctgggccttgccggtggactcacagccctcacaatcggcatctttctggctgttcaatattgccgcacggccaaggagaagccggaaccggaggagtcgcctctggcaccatcgggccctggctacagttctaatctcaggaatgtcgacaacatgaatttgatcggcatgctggggagcggcaagtatggaactgtgatgaagggactgctccacgatcaggaggtggcggttaagatatatcccgaagagcatcatcagtactatgtgaacgagaggaacatctatgccttgcctttgatggagtgtcctgcgctgttgagctatttcggtaagtgttcctgggtaatttcctaagttatatgctcaacacagactttattccattttaaaggctacgatgaacgctgtaccatggacgggcgaatggagtatcaactggtactatcactggctcccctcggatgcctccaggattggttgatagccaataccctaactttcagcgaatgctgtggaatgctgcggtccatcacgcgtggaatctcgcacctgcacacggaactccgactgggagatcagcataagccctgtgtggctcatcgggatatcaacacaaggaatgtgttggtccaagctgatctcagctgttgcattgcggactttggtttcgctctcaaggtgtttggctccaagtacgagtacaagggcgaggtggccatggcggaaacgaagagcatcaatgaggtgggcacccttcgctacatggccccagaattactggaaggagctgtaaatctgcgggattgcgaaacctcgctgaagcaaatggatgtctatgccctgggcctggtgctgtgggaagtggctacccgctgctcggatttctatgcccctggtcaagcaacacctccctacaaagcaccctatgagcaggaggtgggctcccatcccagctttgatcaaatgcaggcgttggtggtgcggcacaaggcgcgtcccttatttcccaccggctggggtggaggagcagcggctaaagtggtgcgggatacttgcgaggactgttgggatcatgatgcggatgctaggctgacctccctgtgtgccgaggagcgcatgcaggagatgtcgactttaaggccacgagcacaggctcaaccttccagtccactgctgaataccaacaatctggtggccagtccaactgcggaacaggtgagaccattactcgctagtatttcaatagttactgtatgtatgaatatgaaattttgcagggaataaatatcatagccacaacgacaacggcggctgcagtccatcaccagatgagctccgacactacgggacttatacagccacctcccaatcagcagatacctctagctgccttggaacgggagaagaatcatctgagctacccgcaacagcaattgcagccgtatcagggcaggaatccctgccaggagcgcaatctggcacctctgacaatgcgaactccaccggttcttgtggagcggagcaagaagcacagtttccagacacagcctcaggagaactcactgtcttgcttggagcatgatgtgagtgtggaggagctgatagccagccatcagcaccagcagcaaaagaacacgattgtaagcacaggtggaaatggcaattcctgcttgggtcagggatttcccaagcagcagaacacggatcaaaaactccggggatggcatggagtaagagccctgatccacaagaaactttttcgcaaagagcatgccgaggagctgtgtcgtcagttgcagttgggcgaagagaagtccaatctggtgacggctctgcgtcgaccgaacaacctggatcttaatcctcgcctcgataaacctccgccggatcagctgaggagtgcagagcaacggatgggaactcccgctcacattgtaccccgatcgctgtccagcagcctgatcaagcacatcaacgggaccaccaacaataactccatccagagtcatggtagcgaattgcagaccctcacccgtccggcttcgaagcgaagaccaggtcacctgcgcaccaactccctgatggccaccacgggtcagggtccgccgacggagcagcaaatgcgtcgtcagcacagtctggaggtattccgtgaggtattcagcggtcgggggagcagcgagcgtttgagggaccccagcgagcgggtcaagacgccgggagatgtgccaccatccgtacggaaagccagggccagcaagacactgagcttgtacgacgatcggatgatggactcctccctgctcaacattctctagcatgaggaggttctgctgctggagctataaactaatcgaatgcagcagaacatcgatccacacccatatctcatccttcatcgaacacatattcaacgatagccatagagcagaagacttgaatcgcttcctggaaaagtcttctcacaaatcagaaggataaaggagtattttgttttctactcaaaattctcttcgatttcaaatcaaagaaagaaaaaaatcgttattatttatcaggaaacatagatactgtcacagaaatcacacatcattatttcttaactcgcctggattgatgatttgaaatcgaaagaactttgagaaactgaaaacacataacaggtcctagatacaattatttttcgaacatagtagaaagacagtatgtgtatatctgaatgtattttttcaccaatcatcctagcgtgtagtgcggcaaacaaccaaagtccttataggttagatcagactagtatcgtacgagtatcagtatatagcagtatatagcctcacacacacacactcacatatatttttgacttgatcttggacaagagcgaaacaggtagtagtctatatagtttgtatatgtgcggttttcactcgagtcgagcttaaggcaggaagggagtagggaatgaaggggattggtcggaccacttttatagagccatatatagaaacgaactgcattacgagtatatatttaactaaacattgtactggaatatttagtcaagcataattacacactaaagacccagaattgggttgttatgctgaagccatgtatacaaaaagaaagcacaaaatactcgaagaaaatatctggttaacaatataagcaatcttctgtggaatgacaacccacatgcccgttgttcgagtatttggcaaccctatctagtatacccccctttggatgaattttcggtgaatgccttttagtcgttctctttagtacttagaccaaaacacccacagcctttcaatcaca

SEQ ID NO: 22481 - DNA, 2910 bp, DROSOPHILA
tgcaacttctttcggttatttaaaacaaaagaaataaataagtaatacaacttaaagtgcaagtgcagtggttgaatagcgccctgaattaagtctccttttggttgttcaaaatgccgtaacattatcgaggaacccgacagtcatacgcatccaaagtaaattatactgaaggtggttttgaaaaggattccagacatgaattgggctatctatcttttgttggccctgatctcgctgggcagagcaacacctgttcccaatcgccagtatagctgtatgagctaccaggaggacgacaactcatttcacgatgatgatggcgatcaggactctagtggcgagctgcaggagcagcaggtggagtccactccgattccgagcgagccacatagacgcacctgcccagatggctacactttctgtttcaccatctggaaccagacggccaatggagcgcgggttgttaaacagggttgctggaaggacaacacggatcgcacttccatttgcagccagtcggaatgtaccagctcggctcccacctcgaagaccagttctttgtactactgttgctgttcgggaggagtgtgcaatgcccaatattccgtggtcgaaccggcacctctggaactgggctccaatgagggacggacttcgatcacaaatcgggcgacagaaaaacagcaccagtcctttttggccagtacaatgctgggccttgccggtggactcacagccctcacaatcggcatctttctggctgttcaatattgccgcacggccaaggagaagccggaaccggaggagtcgcctctggcaccatcgggccctggctacagttctaatctcaggaatgtcgacaacatgaatttgatcggcatgctggggagcggcaagtatggaactgtgatgaagggactgctccacgatcaggaggtggcggttaagatatatcccgaagagcatcatcagtactatgtgaacgagaggaacatctatgccttgcctttgatggagtgtcctgcgctgttgagctatttcggctacgatgaacgctgtaccatggacgggcgaatggagtatcaactggtactatcactggctcccctcggatgcctccaggattggttgatagccaataccctaactttcagcgaatgctgtggaatgctgcggtccatcacgcgtggaatctcgcacctgcacacggaactccgactgggagatcagcataagccctgtgtggctcatcgggatatcaacacaaggaatgtgttggtccaagctgatctcagctgttgcattgcggactttggtttcgctctcaaggtgtttggctccaagtacgagtacaagggcgaggtggccatggcggaaacgaagagcatcaatgaggtgggcacccttcgctacatggccccagaattactggaaggagctgtaaatctgcgggattgcgaaacctcgctgaagcaaatggatgtctatgccctgggcctggtgctgtgggaagtggctacccgctgctcggatttctatgcccctggtcaagcaacacctccctacaaagcaccctatgagcaggaggtgggctcccatcccagctttgatcaaatgcaggcgttggtggtgcggcacaaggcgcgtcccttatttcccaccggctggggtggaggagcagcggctaaagtggtgcgggatacttgcgaggactgttgggatcatgatgcggatgctaggctgacctccctgtgtgccgaggagcgcatgcaggagatgtcgactttaaggccacgagcacaggctcaaccttccagtccactgctgaataccaacaatctggtggccagtccaactgcggaacagggaataaatatcatagccacaacgacaacggcggctgcagtccatcaccagatgagctccgacactacgggacttatacagccacctcccaatcagcagatacctctagctgccttggaacgggagaagaatcatctgagctacccgcaacagcaattgcagccgtatcagggcaggaatccctgccaggagcgcaatctggcacctctgacaatgcgaactccaccggttcttgtggagcggagcaagaagcacagtttccagacacagcctcaggagaactcactgtcttgcttggagcatgatgtgagtgtggaggagctgatagccagccatcagcaccagcagcaaaagaacacgattgtaagcacaggtggaaatggcaattcctgcttgggtcagggatttcccaagcagcagaacacggatcaaaaactccggggatggcatggagtaagagccctgatccacaagaaactttttcgcaaagagcatgccgaggagctgtgtcgtcagttgcagttgggcgaagagaagtccaatctggtgacggctctgcgtcgaccgaacaacctggatcttaatcctcgcctcgataaacctccgccggatcagctgaggagtgcagagcaacggatgggaactcccgctcacattgtaccccgatcgctgtccagcagcctgatcaagcacatcaacgggaccaccaacaataactccatccagagtcatggtagcgaattgcagaccctcacccgtccggcttcgaagcgaagaccaggtcacctgcgcaccaactccctgatggccaccacgggtcagggtccgccgacggagcagcaaatgcgtcgtcagcacagtctggaggtattccgtgaggtattcagcggtcgggggagcagcgagcgtttgagggaccccagcgagcgggtcaagacgccgggagatgtgccaccatccgtacggaaagccagggccagcaagacactgagcttgtacgacgatcggatgatggactcctccctgctcaacattctctag

SEQ ID NO: 22482 - protein, 903 aa, DROSOPHILA
MNWAIYLLLALISLGRATPVPNRQYSCMSYQEDDNSFHDDDGDQDSSGELQEQQVESTPIPSEPHRRTCPDGYTFCFTIWNQTANGARVVKQGCWKDNTDRTSICSQSECTSSAPTSKTSSLYYCCCSGGVCNAQYSVVEPAPLELGSNEGRTSITNRATEKQHQSFLASTMLGLAGGLTALTIGIFLAVQYCRTAKEKPEPEESPLAPSGPGYSSNLRNVDNMNLIGMLGSGKYGTVMKGLLHDQEVAVKIYPEEHHQYYVNERNIYALPLMECPALLSYFGYDERCTMDGRMEYQLVLSLAPLGCLQDWLIANTLTFSECCGMLRSITRGISHLHTELRLGDQHKPCVAHRDINTRNVLVQADLSCCIADFGFALKVFGSKYEYKGEVAMAETKSINEVGTLRYMAPELLEGAVNLRDCETSLKQMDVYALGLVLWEVATRCSDFYAPGQATPPYKAPYEQEVGSHPSFDQMQALVVRHKARPLFPTGWGGGAAAKVVRDTCEDCWDHDADARLTSLCAEERMQEMSTLRPRAQAQPSSPLLNTNNLVASPTAEQGINIIATTTTAAAVHHQMSSDTTGLIQPPPNQQIPLAALEREKNHLSYPQQQLQPYQGRNPCQERNLAPLTMRTPPVLVERSKKHSFQTQPQENSLSCLEHDVSVEELIASHQHQQQKNTIVSTGGNGNSCLGQGFPKQQNTDQKLRGWHGVRALIHKKLFRKEHAEELCRQLQLGEEKSNLVTALRRPNNLDLNPRLDKPPPDQLRSAEQRMGTPAHIVPRSLSSSLIKHINGTTNNNSIQSHGSELQTLTRPASKRRPGHLRTNSLMATTGQGPPTEQQMRRQHSLEVFREVFSGRGSSERLRDPSERVKTPGDVPPSVRKARASKTLSLYDDRMMDSSLLNIL

SEQ ID NO: 22483 - DNA, 5912 bp, DROSOPHILA
tttttttcttagtataacatataccaaatggctatactaagaaaaaatataacataacattggtaacataatctacccaattctttttaaacattcgaagaacatgcaactgtcggggtgtgtgtgtgtgtgatttgtgtgtgaaagagcttaaaaactacaaaaatcgttccctttttggattttcttgagttttgattcggtttaccttgtgtttggaaaacataaaagggtttcgaaggcgatgttcgtgcgttggctgttgtagggcgaaaagatccattaactactagttactttgtatgtaaattaacacaaacttaccccttgttattgatggttaacggcagtttgtccagagaacattaacgaatttaaggttagttgtcaatatcgcaaacaaaaaattgcgaatgcttaaataagcgaaagagaacacaaatgttctactaatattagtagtgaggtgtgaataaatatagaaacaaaaaggcaacgattttggtcaaaagttaaagagctgctatgctctgttatgttggcaaaattatatccattcgttcatttatcatcatatgcatttggattttatatgtgttatgtggataactgttgattcatttgtccatgtcgttggtgttgttatagttgtttgagttgttgttgcttgcaatgtggttgattttattaaagctgctgctgctgttcttgttgtttttgttgttgtagctttccacgatccacttccatttcgtcccatgagcgcgttagcgtattgttgtcccgcctactcgatggcctggccgggtgctggtccgggtcctgccacggcttgggcgaactggtgatgttgggcggcatagtaggtggccggcatgctgaactggttggcatatggattggtgcccggcgcagcggcggtagtgagaacaccggccgcatcgtacatataggcggcaccgggagccggagccacagctgcagctgcagctcgtccggcggctgctgcagcggcagcagctacggccgcaatcgttggcgaattggctggcgtgtattggaccagcgagctggtcaccgcagccgacggaacatacttgttgctttcgtccttgggcggcttggtctgttggccagcctgctgctgttgttgctgatgctgcaaagcctgctgaccgtagtgggttactccttgttgctggtactcccgcttgggatactgctggaatcgtggcggcatgccaccggcaccagctccctgcggcacaaactggctacgtccgcggtatgcttgtggcatatactgtccgccctgctggggtgccatgagctgctgtgggccaccgcctacgccggctgctccaccagctccgacgccgccaccctgatggcccataatggcgcgtggtccgccattgttgaacggagccctcgggcgataggtgttgccgtttcgctgctgttgtccggctcctccatcctgtcccatctggttcatgcgattccaattaacgccaccaccagcaccattctgcagataggtattgccgccagcggcatactgctggtagctactgccagttggggggccgctgcgattgttgttatagttgttaccggcctggtaattcagcggattgttgttgcgctgctgatagatgccgttgttaccgccagtgttgcgatccccgccgctgttgttgttccagcgcttgttgccgcgatagccgcccgagctgggcatcgaacgagcaagatccaaaagagcctgcgacggcgtctggccagcctcctcgagcacagagatcagttcacgggcctgcttggcattgtcaggcgtgaaaaatgtgtaggcagttcccagctgctggcagcgaccagtgcgcccgatacggtgcacgtagttctccgaggagttcgggtaatcatagttaattacgtactgcagatcctcgacatcgaggccgcgcgaagccacatcggtggcaatcagaatgttggacttgccgttacggaaatcctttagcactgaatcacgctcattctgggtcttgtcgccgtgaattgaggtggcgttgtaaccctcggctcgaatgatctgcaagatgtcctccacctggataagggcaagaaaacggttgataattagtggggtgcttctaattaatatcacataaacaatatattcttgacgggtcatttcggatttttgcaagtaaaatgcaactataaaaaacaaagaatatgttgataaaccttcgaagtaaaacgaaaagagaacaaatacaatttaaaatggtaaatcgaaagaatatttcgaattctttaagccatttatcgaattagaactcaccttgatcttggtctccacaaagacgataattttgttcccattgtttcccgaattcttgatgggagaaatctcattgagcaagcatactaagcgctgcggcttctctatttctgtacagatctcgacaatctggcgaatgttgtggttagccgataggttcatcgaaccaatgttgatttggatataatcgtttaaaaagtctccggctagggcctgcacctcctttggccaggttgcggaccacatgaccacctgacggtcgggacgaatctgttcaatgatcttacggatctgcggctcgaaacccatgtccagcatgcggtcggcttcgtccagcaccagataagtgcatctctgcaagttagtgttgcgattctcaaggaaatcaatcagacgtcctggtgtggcgatgatcacctcgacgccgcggtcaagatcgcgtgcctgcggcaccttcgatgagccgccaaagatgcaagtgtgacgaatctctggcttgcacagatgtccatagtctcgcacgacagattggatctgctgggccagctcccgggtgggggccaacactagagcaatgggtccttcgccgcgaattattggcggctgattgccaatgtgcacgatggcaggcagcatgtatgccagcgtcttgcctgaaccggtctgggcaatgcccaccaaatcgcggccacttaaggcaatgggccaaccctgcgattggatagcagtgggcttggtgaatccctggcgcttcatctcttcaatgacgtgagcgggcagcgagctctcctcgaaactgaccaccgggtgtggtagttcattgccagacacggtgatttccagttcgcgccggatctcggccacctgctgctctgatttggccagtgtattcggatgaatgttgtagaaatctttgaggaagggctcgaggttctcccacttgggtttcactaaatttcggccgggatttttggccttttcacgttggatctcggcgcgctcctctttggaaagcatgcctaaggcggcagcattgtagttattgctttggtagccaccagcaactccggcgccgttgttcggcttctgataacgctgtgcgtaggttggatttttgccacgctgtcctccatatccgccagatcctccggatccgccaccggcgcctcctccaagtccattaccggcgaatgcaacaccgttttgctggcgatacggattgccgccaccagaaccggcggctcccattcccagaccattctggatgccataggtcatcacgccatagggctgaccaaagtgcatgcttccagccgcagtggctgctccattgatgccagctcccccggcggcaccgccgaaattgccgcgcggatagtattgacgctcgtggcgtggggccccgttgccgctaccgccagcgcctgctgcggcaccattgccatagtaaccgccgccagtgtgctgctgaacgcccccagcgttgggtgcatatgctccagcgaacatcgtgtgctgaatcctgtcgagaaatgaacaaaagttcagcgaaatcgcatggagatacctcgcacacaccaccacaaagactttgcacttttgtaactgtcaagagcctctctctctctctcagagtaaaaataaaaagagaaacgaaacgcgtttgactttttgggcaggggctttatggcatgagggagggggtcggacgaagtgggggacttagtttcgaatggtgaagagcggggcagttctttaacccacccactagccaccaccgaaaaaaatcaatacagcatcgccaaatgcacacgagacgcaaagaggtaaaataatagcgggagagctaaaccaggcgcgagagagacaagtagagtgcgccgcaaagggaaagaagagcgagcatgctctcatttagttagaaaaacacttttaaaaagtgcaccgcgttttcacgccacacacacacaagtagagtgcgccgcataggtaaagaagcgcgagcacgctctcatttagttagaaaaacacttttaaaaagtgcaccgctttttcacgccacacacacacacgcactcaccttttttctgttgcgacaactgctgcctatgtgtgaaaatttggatgagccttgtgcggggagctttaaattaatgtaatttatgcgccgcaatttgacatttgcccctcaggcaaccggaattttgtgtcttgaatgtgggtttttcttcggttgtcaaagtctgcgatttttcgatccgtttccttcacgttctctttcgaggccctgttccgttcgattcgatattcttcactctctcgctcggctctcttcgtcacgctcacaggcgtcttcttctcgcgaacttctctttttgcttcgcacaacttttgtcgagagctaatggttttgcaattattccttcgccacgggaaagtaaccgtaatgctaactaaaggtgtacttggttaaacactaggagccagttcgctaaatctaattcttgtattttagatttttataacaaaaaaaaacgcgctcagcagaaagttgcatgtgaactgtaaagctggaacaaaagtcaatggtgatgggatacgttcgatgtattttggcatcgatagttacctgcaaaactatcgataaatattgtttaaccattattgcacttaatttaccgctaaaatttaaaaccaacaaatactaaaattaaaaaacatttagcgagttaccaaaataaattgatatataaaaaatacaagaatgatatctagataaaaataaattaagcacgtaaaaaaagttttgtgataccaattcttaaaaggctacacatatgtacatatatataaaatatacaaatataagtgggtgttatattgcaatttacataaatttggaattattcctttcccccctccacatttaaacaaattgttgctttttttttaattctttaatttacttatcaaatggaaggcaaacactttttacgaccgaaagtgaaaacaatctagctaagcccacaattcggctacaaattaattgaatgtcttaaacaagtgcatttaggtgatgaaatctccaacggcacatatattgaaaggcggatagccttattgcataggccggaaaacagtagcatctgtacgtacaggtatacgctatttacacgattttattccccactgatatcacaaacatcatcatcatgtggaaatcgaagggacttcaggcgggacttcagaagggacttagttggcggccagtcgcacaagcagcttccgccgatcctcatcgatggtggtcaggaaattctggacgcgttcgctgtagaagtcagtcgccttggccagctggcagctctgcatcctctccgctcgccgaaagtcgtccagctgccagcgatcacgctggtaggccagaatgctggccaggaaatgccagaaagtgatctgcggccacaggacgttgctgaagtacaacacggatgtgcttaactgaaatggtaaaaacagtcgtttaatatttaagcttttccactttatcaaagaccgc

SEQ ID NO: 22484 - DNA, 3330 bp, DROSOPHILA
acatgcaactttctgctgagcgcgtttttttttgttataaaaatctaaaatacaagaattagatttagcgaactggctcctagtgtttaaccaagtacacctttagttagcattacggttactttcccgtggcgaaggaataattgcaaaaccattagctctcgacaaaagttgtgcgaagcaaaaagagaagttcgcgagaagaagacgcctgtgagcgtgacgaagagagccgagcgagagagtgaagaatatcgaatcgaacggaacagggcctcgaaagagaacgtgaaggaaacggatcgaaaaatcgcagactttgacaaccgaagaaaaacccacattcaagacacaaaattccggttgcctgaggggcaaatgtcaaattgcggcgcataaattacattaatttaaagctccccgcacaaggctcatccaaattttcacacataggcagcagttgtcgcaacagaaaaaaggattcagcacacgatgttcgctggagcatatgcacccaacgctgggggcgttcagcagcacactggcggcggttactatggcaatggtgccgcagcaggcgctggcggtagcggcaacggggccccacgccacgagcgtcaatactatccgcgcggcaatttcggcggtgccgccgggggagctggcatcaatggagcagccactgcggctggaagcatgcactttggtcagccctatggcgtgatgacctatggcatccagaatggtctgggaatgggagccgccggttctggtggcggcaatccgtatcgccagcaaaacggtgttgcattcgccggtaatggacttggaggaggcgccggtggcggatccggaggatctggcggatatggaggacagcgtggcaaaaatccaacctacgcacagcgttatcagaagccgaacaacggcgccggagttgctggtggctaccaaagcaataactacaatgctgccgccttaggcatgctttccaaagaggagcgcgccgagatccaacgtgaaaaggccaaaaatcccggccgaaatttagtgaaacccaagtgggagaacctcgagcccttcctcaaagatttctacaacattcatccgaatacactggccaaatcagagcagcaggtggccgagatccggcgcgaactggaaatcaccgtgtctggcaatgaactaccacacccggtggtcagtttcgaggagagctcgctgcccgctcacgtcattgaagagatgaagcgccagggattcaccaagcccactgctatccaatcgcagggttggcccattgccttaagtggccgcgatttggtgggcattgcccagaccggttcaggcaagacgctggcatacatgctgcctgccatcgtgcacattggcaatcagccgccaataattcgcggcgaaggacccattgctctagtgttggcccccacccgggagctggcccagcagatccaatctgtcgtgcgagactatggacatctgtgcaagccagagattcgtcacacttgcatctttggcggctcatcgaaggtgccgcaggcacgcgatcttgaccgcggcgtcgaggtgatcatcgccacaccaggacgtctgattgatttccttgagaatcgcaacactaacttgcagagatgcacttatctggtgctggacgaagccgaccgcatgctggacatgggtttcgagccgcagatccgtaagatcattgaacagattcgtcccgaccgtcaggtggtcatgtggtccgcaacctggccaaaggaggtgcaggccctagccggagactttttaaacgattatatccaaatcaacattggttcgatgaacctatcggctaaccacaacattcgccagattgtcgagatctgtacagaaatagagaagccgcagcgcttagtatgcttgctcaatgagatttctcccatcaagaattcgggaaacaatgggaacaaaattatcgtctttgtggagaccaagatcaaggtggaggacatcttgcagatcattcgagccgagggttacaacgccacctcaattcacggcgacaagacccagaatgagcgtgattcagtgctaaaggatttccgtaacggcaagtccaacattctgattgccaccgatgtggcttcgcgcggcctcgatgtcgaggatctgcagtacgtaattaactatgattacccgaactcctcggagaactacgtgcaccgtatcgggcgcactggtcgctgccagcagctgggaactgcctacacatttttcacgcctgacaatgccaagcaggcccgtgaactgatctctgtgctcgaggaggctggccagacgccgtcgcaggctcttttggatcttgctcgttcgatgcccagctcgggcggctatcgcggcaacaagcgctggaacaacaacagcggcggggatcgcaacactggcggtaacaacggcatctatcagcagcgcaacaacaatccgctgaattaccaggccggtaacaactataacaacaatcgcagcggccccccaactggcagtagctaccagcagtatgccgctggcggcaatacctatctgcagaatggtgctggtggtggcgttaattggaatcgcatgaaccagatgggacaggatggaggagccggacaacagcagcgaaacggcaacacctatcgcccgagggctccgttcaacaatggcggaccacgcgccattatgggccatcagggtggcggcgtcggagctggtggagcagccggcgtaggcggtggcccacagcagctcatggcaccccagcagggcggacagtatatgccacaagcataccgcggacgtagccagtttgtgccgcagggagctggtgccggtggcatgccgccacgattccagcagtatcccaagcgggagtaccagcaacaaggagtaacccactacggtcagcaggctttgcagcatcagcaacaacagcagcaggctggccaacagaccaagccgcccaaggacgaaagcaacaagtatgttccgtcggctgcggtgaccagctcgctggtccaatacacgccagccaattcgccaacgattgcggccgtagctgctgccgctgcagcagccgccggacgagctgcagctgcagctgtggctccggctcccggtgccgcctatatgtacgatgcggccggtgttctcactaccgccgctgcgccgggcaccaatccatatgccaaccagttcagcatgccggccacctactatgccgcccaacatcaccagttcgcccaagccgtggcaggacccggaccagcacccggccaggccatcgagtag

SEQ ID NO: 22485 - protein, 945 aa, DROSOPHILA
MFAGAYAPNAGGVQQHTGGGYYGNGAAAGAGGSGNGAPRHERQYYPRGNFGGAAGGAGINGAATAAGSMHFGQPYGVMTYGIQNGLGMGAAGSGGGNPYRQQNGVAFAGNGLGGGAGGGSGGSGGYGGQRGKNPTYAQRYQKPNNGAGVAGGYQSNNYNAAALGMLSKEERAEIQREKAKNPGRNLVKPKWENLEPFLKDFYNIHPNTLAKSEQQVAEIRRELEITVSGNELPHPVVSFEESSLPAHVIEEMKRQGFTKPTAIQSQGWPIALSGRDLVGIAQTGSGKTLAYMLPAIVHIGNQPPIIRGEGPIALVLAPTRELAQQIQSVVRDYGHLCKPEIRHTCIFGGSSKVPQARDLDRGVEVIIATPGRLIDFLENRNTNLQRCTYLVLDEADRMLDMGFEPQIRKIIEQIRPDRQVVMWSATWPKEVQALAGDFLNDYIQINIGSMNLSANHNIRQIVEICTEIEKPQRLVCLLNEISPIKNSGNNGNKIIVFVETKIKVEDILQIIRAEGYNATSIHGDKTQNERDSVLKDFRNGKSNILIATDVASRGLDVEDLQYVINYDYPNSSENYVHRIGRTGRCQQLGTAYTFFTPDNAKQARELISVLEEAGQTPSQALLDLARSMPSSGGYRGNKRWNNNSGGDRNTGGNNGIYQQRNNNPLNYQAGNNYNNNRSGPPTGSSYQQYAAGGNTYLQNGAGGGVNWNRMNQMGQDGGAGQQQRNGNTYRPRAPFNNGGPRAIMGHQGGGVGAGGAAGVGGGPQQLMAPQQGGQYMPQAYRGRSQFVPQGAGAGGMPPRFQQYPKREYQQQGVTHYGQQALQHQQQQQQAGQQTKPPKDESNKYVPSAAVTSSLVQYTPANSPTIAAVAAAAAAAAGRAAAAAVAPAPGAAYMYDAAGVLTTAAAPGTNPYANQFSMPATYYAAQHHQFAQAVAGPGPAPGQAIE

SEQ ID NO: 22486 - DNA, 46954 bp, DROSOPHILA
atataagctgggtaatacaactaaaatgtacagactaaacgactaagacaatgcgattgcgagcagatcatggggaaatcaatattcccggggatttcgggggggcattgtgggaaatatctggctctgagcaaactaattactaaacaagagctgttcgattatggtttaattgcattcaatcaacagtttgcacaacatttaaattatgaggaggaaattcattgcgttaattaataaattcattttagctagctgtaagtgttgcataacattctctaaatgattgattatggttgttcgataatattgacttactattagttacatttgtcttttgctatcctgtttaaatacagtactcatttaatgcataagtatctcgtttgtagacacaactaagtttttgtggtttctaaagttcgttttgtgaatttttctgagcagcgttaatggcttttcgtttttttttttccaatttgaagatggttcgcaataattattaaattaaacataaaattaaaatcacaattttatagacttgatgtgtgtatgcatgtgtgtgtggtgtgtgtgtatgttggctttgtgtatgtgtttgtggtcgttttgtggtgtgagtagtgtgtgtgtgtgctggcagcctttcattttgtcgtggttccatccggtcgaaatattctcatcaaatactccattggaatctggttttaaagcataattctgggcgtagcagggaaaggcacaattcaatattaattaaaattgctgctgcaggctaaatggtgaaagctgcaaaatgaaatggagcggggggaagaagcattagttggccgtttgaattgtttgtttagtttttatttctgttgttggcttagtttgttgcacgaatttaataagcaaaaaacaatcaaaacgcagcacgatttgcatgggctatccaactcacctgcaggaacacacacagcgtgccaaaagttgtagttgctcttcttttattgtgttttatttctcagtgtttttctgtttctgtttctgtttctgttactgtttttgtttctgtattgtgggggtcgatggcagctagaaacgagttggcaacgaatcatcatcatcatcatcatcgtgctgctacttcctcatcgtcatcgtcatcctggagatacatccatgcaatcatcctacagatacagcgtcgcctgctgccgctgatcgaaatgatggatgtagagcttcttcttcgacttctccttcgagggccgcagatcccagaccaggttggacagacttcttggccgggacaggcggcgtgtcttcttctcgggcagcttgttcgagtcgcccgatgtccggcctccgctgcgggatgaatccagcgtaccctccctcggattgtgatggttattgctactggaactccggctgtggggcagcggcaatggcagaggatgcggactggacaggtaaccgtgcacgttcagtatgctgccgcacttgagccccacatccggtggagtgcccggcgtgcccggtgtgcccgacgcagttgctcccgatccaacgcctgctcctgatgacttgccgtgggctgagatcgtcggcggcgtcacagaggagcaattgttgttgtccggcgtcagctgcagactgctaagactcttgtacctgaaataagttaattaagtaatgcaagttaactataactatcaaaagtaaaaaagtaaataaagttggcaataggagtttaatgacatcgatccttacttctcattaaaaaagtattcgaatggaacttgatagattttgcatttgctaacttaatattccagctgattatgaagtttacttgccatgcagccacttaatttaagtcgacccaaaaggttgcttacctgatgtgaaacagaggcgactgcggctcgagagcctccttgctcggcagatgattgttgggcgtcagcaccttgccgtgatgaggatgcggatgtggatgcacactggcatgcggatgggggtgcagatgtgatccgtgcgatccgtgggaaccgtgatgagcagctgcgaccgctgaggcggccgcattggccaccgcattgcccgtattcccattgggtgtcggcggctgctgctgcgactgtgactgcccgtgactgtgactgtggacgtgactgtgactatggctgtgactgtgactggtgctgtgggtggtgcccgtggagttgccattgctgctgctcccagcactgtgggcattcttgatgtaaagctttggtagagtgggacgctggcgcttctccgccggcttcttgcccggaatcgtttcaatgggcggcggcaccggcttgatgtcctcctgaatatggccatgatggtagtgattaaccacgtgatgatggtggtgatggtggctaccgggatgatggccaccgccgctactgctgtgcttgttcgactccaagctgctgtagttgttgttgccggaggtggtggcctgctggtgaaccggagccctgatcaaactgcaatagttgccactgccgctgtccgtgtgatgggaccgcagagtgggtgattcgcagatgggctcgaagcgggccaatcccttcgagagcggcgtcaggcccctcacataatcatatatatgatcgatctcgttgtactcctccgcaatctcgctgctgctcagtgcctgctgctgttgcttcgaccacgaatcacaactggcactcttgcgcagcacataaccactttccgccagtccactggccattcccgctgcagatggcagcatgaccaccggcaacctgcccccattgcgactattgaacttggagtctttcttctccttctcgctcagcttgagatcgacgatctgcaggcgatcgcgtgcatcggccagcaatcgctgcgccttgtccaggaatcgcgagtactcgatgaagtgctccagttgctccatgttcttggctcgctgcagcttgatcttggcattcagcggcaccggcaccagatccgtgtccttttgcagtggcaacgcgaatatcctgtcgatctccacgcagcccagcagtcgcagttcgggcacaaatggctgtttcagacccttgggcgcactgccgtgaacgagtctgtggattggatattaggatgggtgttaaaaactagttcccaagttataattcaaactaaatttaagatactttgagaaaatattcgaatatttaagatatttaaagtcgttcattatattaaactcacctcacgatgactggcatccgcttgagcagcagattcttgacggtgtggacaccgctgatgctgtcctccctggcgatcggcgagaacttggctttggtatcgagtggcagattgatgatctcgtccttgatgttcctgcactgcaggtacttcccgttgtcgttcatggtggtcagcagttcgccggcgtggatggtccggttcatctgctggcatcgaaaggtctcccgcaccaggacgcgggcgtttcgccgtcgcgagagctccagcacggagtcaatgcatcgcgtggagcgaccatcctcgctgaggagctcgaagtagccgccgtaggtctccgggatgagcaccttggcgcccacattggtgggcttgcgaccctccttgatcttgatgggctgggccaggatctggtacttcttgccggcgctcagaaatagggcggtgctctgcagagatggggccgacaatgtgggcacccccagcgcctggtgctggcccttgatgatcttggccaccgccggcagcggctgcttggaaaagtcgcgcaggtaaacgggcgtggcatcgccgaatcgggaggcggccaatatgatttggccatcggtggcggccatgtcgcggttgaagaacgatagcagcttgctgcgcgccagttggacattaaatgagagtaagtttcattggactggctgcggatgcagttgctccccgccgacggctccctgctcgctgtccaactcctccggcagcggctcctgctgatcccgagagtcctcctccgtctcctcctgctcctcttgattggcgttaatctgatcctcgagagctcgtcgcttggccagctctcggtggcgcaatctcagcagctgagcgccgcgactgcagcaggcgtgcttgatttcctcctcgtgggcggaggctactcctgtctggtcaggatatagatcctggttcgggccctggtacgtcagcagtcgcgtggatgtctgcagagcgtagttgagatactgcattcggttcgatttcctcctcctccgctggccacagtgtgcgaatagtccttttcaatttgcctgcactcctttcgattccctttgacgccttcgcgttgccagttggtaagctgctttaccgaagccttttctcctgcaaagaatcaaattaaatgaagagacattaatcgatgtaatgccacactcaacgacaaggatataatgctatgcatgggaaatcagcttaaaaaatatgcaaaagttcgcaattttcccaaggaattatgagtatgcataaaaagagcgtgcgatttgataccctgcaaaggtgaaatattaacttaaatataaataaaacaaaaagcgtttcagatatttattataaaattaatgacacacaatgtaacactggaatttaaattgtagattttttttgttgagatatgggaaatgcttttttcccatgaagtccgttgaataatcatagaatgttaagtgtgttgtcacagagttgaataataaatgcccacacacctttggtacccagtagacattaggtaaatgaaatgttgcctacaaatttccccccttcagttcgacgaagctcaaatattcctgagtccgcagatcagctcttgaagttctcacacagggatatatccatatatatatatatatggacaccgatacaacgacagggtgttatttatgggggccataaagtagggaagaagactttaactgaagaaatggcaaagtgcacaaaatgaaaatgcaagcaacagaggaacgtgcatatacatccatatattccatggaatagacaagacgactgtgcgacaatgccaaacatgccattaacaaaagggaggaggtgatggcggaggaggactgtcggcggaggcggaggaggaggacatggccatgggccaacagccagcggtccaacaaatggcaagacattaaaagtacttaaaggatatttgcatattttatggccaaacataaatgcggctgattacgagacgtcgtattgcctgaatggctggcagtgttgccaaaattgcattacgggtaatactggctaagtttctactgcaaaaatgtagctaaatcttgaattagtatcttatggttataaacagtatgcacctacaaatatttttgattcttagaggatcatattagcttgtcatcactgattgcttgtcatattgcaacatttgcatgtttctcttggggcaatatgtagatgaaagtccagtgtgtggaatccacttcaccaaattagttggcaattagcaaagtgaccgcacctgctgcggtccttatgccagttctcccatccagttgactatgctctacgtccaccgggaagagcatccatctctaattgccgtcccttctccaactggagcatgaatagcagtcagcagctatagaaaccccagttggggccataaagagtccgtcataaagcatttaacgagccctggggaggttccttcaccttcccccaaatgcaacggccgcgattattgggtcataataccataaccctaactttagttggtccgcaaaggttattaaatcttttttggcccctggctgcagcatgcaaacgcttaattgatttttagtacgaccgacttttccgggattgtcaaacaaaagccttcagttaaagctagcaatctcactggaaaaaacatagatcaagagcatgtatttctatcaagttcttcttttgaaaaaaaaaaaccattataaaaaaactattaaaatcgatattaaatttctatgggtttttttttgagcaataaccaatatatacacacatattttgaataattaaataaaatcattttaaagtttttccctgtgtgtggacatgtgaggcgtacatatttgaacccgctttttcttaggggatctgctttccaattaattgccagacaaagagtgagactgcaacacggctggcaattaattttcaccatggaaagtaccttttcctggagcaggaaaacacacatacggacctgcgaaggagagcgactgccagttgccaattctcacgctcaatgtggccgaaagcctttgtaacttatgtggaaacgtgacattttctcggctactggacaaaaattgatgccgccgagccgtcttggctggagctggagctgaagctggagctgaagctggagaggattggtccagcatcagcaatctgtaaagctggtgctggagatggagctaaaaagctgcagcaactgtcttgtttcctggcccgtacgtgtctggatttttcgttagtttttattgcggcttctgttggctttttgttggttttgatgtcacacaatgacacagtttttcacgtgcggagcgctcgtaatttgtatttggccccgtctcgcatttaagttgatctcatcgaaaatgtcttaatgaatttgcactggaaagtggcacaaaaagcagctgctccaacatccgcagaatattcttcacaaaaaaaaaaaaacaaaaaaaaaatactgaaccaaaaaaaaacggaaaaaaactggaagaaactcacttaatttatgactgacacgacacgagatgacttggcatgaagccccacaaaaggtttatgattttttcctttatttttctcccccagcggaatccttttcaacatcctgtctgcctgttgctatttgttgttgctgtttcctgtgcaacgcaccaagagccaccgcccccgaggggcctcaaaaacaaaacaaaaaattgaagaaaaaaacacttgagcaaatgaagcccccaaagagtcaatatgtgctggcgcggggagggtggccattatgcacatacatatgcttatgaaaaatatgtaacccaagacggagctcgagcacataatgagatacccagaacacacaaaatatgttaaaaaaatcttaaaaaacgtgaacgaaacggaaagctttaagaaaaaggaaaaggaagtggaacgggataggattaaccgactaaacgatacactttgaactttcaactcacaatatagtaaaatactaaccaaatctttttaaaataagccaagtgaaggataaagtactcaaaccagcaatccaaagagaaataaaaatgtaaaccgatttttgggaatttgtctaaccatttgagtgccgctgaaatcgtataaagtaagtggacatataagttttagatgcggtaaaatagtttgtacaactcgaaaatccttttcgctaccctttcggcacaatctgcagacgaaaaagcaggcaagtgcgataaaagccacgtcaaaaggattagggcgttgcagctgtgggtgtgtgtgtgtgtgtgtgtgcaaacggaaaatgtctgtgcatgaaggtgtgtgtgggtggctgggcttttgtttgtccccaacaaaagcaagaactggcagaaaaaaaaaaaataaatgtgtataaaaaactcgcaggcagaaggagtccacagtccgcagaaaaaggaaaagtgtaaggagcacgacctgcttgtaaagcaaagagctcataaaaggaaactctcacacacacatgtatgtgtgtgtgtgtgtttgccagtgtgtggcacattaatcacactaaagagttctacaaaatgcaactcaactcgctggcggagccgaagccaaaagttgttgctgtaacttcatactattgctgttgtcaccactttaagccgcggcttaaaaatcgcgtacttctcgcacttctcggcaagcggcttacagctcagggctttggcggctaagaatccgcggcgtccgccaacaccaacacttcatgttcaccagcaccctacagtggctcctctgtagacgcaactccatcagggctaacaaaaacagttgaaagtccttaaaggaatatttcaaaactcactggctgttgcatactttcaggtgtgttttcaagagcctttaaatctctatagacttctgtgggattccctaataaatcattgcgaacataaaatatttagacatcctcttaagccgattccaaatgcaacttaagcaatccggactgtatttctcacatataaatgcaatatttctgccgcaaaatcgcctttttgtgcttcgtttttctttatttgatttcacttcctctttgtcaagtatttttctgtgcgaaagaaacaccttcagccaaaagccccctttttcaccactcatcactagccactcccccagcgcccccttttctcacttctgctcttcaagttctcagttgccttattatgtcgttctgagcacttttgattactttttatccgctttcggccgcgggtttcatagctcacagcattttgcttttgtttgctgttcctggtttatatatcccaagcccaacctccaccgatttccacccgaaaagccaccttatcgccacgccccccgccccctcgtctggtgtgactaatgacgttgtggaccacggacagcgattgcgttagcttagccccatccaaaagcccatctccacaacccaaacccgtgatgtaaataaatgaaataatattattttgctgttgtcccgccatgaaaaattaacgctgaccactcttgacttttttttttttgtttagtgtttgtttttggtttatctgtgtttttttttgtttatttttttttttttttgcacgcttttggtttctaactgcggacagtttggatttctgctttcatttgtcaagtggcgttgagtcgttcttcaaatactctgtgacaagggattaacacacattgcatcacactacagagttttataaagtatttataacatattatattcttaaaactgaaacagaaattgatatcaacgtaaataaacaacaaattaatttagagaagtgtgtgctcatcaaattacttgtaatattacaactgatttcacagtacaggaaacataaaaaaaattattctaaataattaaatatattcactaggagtattggaaagaatctttttccggttatatttctgcacttgaattaatttgctttatcacaataaaagaggaaataaaacaatgttcgccgaaggaagcggaaaagtttgctaagctcaagcttttattcgaaaagcattaatcacatccataaaattcctggtgcttaactggaaaaagaagataaatagcatacaaatagatttcccactgacgtagatgtagatcgaatcaatagcggaaatggaataagaacccataccaactggcacgacaaaaatagtaaaatgattaaccaaaatggaatttcccatggcattacagctgctattcatttgccctcgataaaggtaagtccaatgattcgaaattccacggtcatccccgatacatagtcataaaatcgaaactctgggagaatacctatgcgaaacttgaatgtgaactcagctttgtttccaattattcgcattgtgagttacaaatgaagctcaatgtaatatggagttttgtatgaaaagtgcgttgtataaaggttactatcagttgaaaataaacaacttgaaatagccgtattcagtgcagttcgttaacggaatttaaaaatggaattattgagcaatatgaaacattaagcttttgaatatacttttatatattttaatttccctatttgtttgcgtttgtgattttccttatttgtttatggattcaatggattaatcacttaaatttgaaaaggttcttcttggaaattcaaacctttagctgccttagagattagtagcacacatgcgtgtttctatatatatatttttgattttttgccaatttgaatagtccgttgagtcgcgcccaattccccgattcatcagcgggggcagccacatcgcagattcgaaatcaaaagcaattaaaatgcaaagccacagaacgtctcatagggtagaaatgtataaaaatgtgacgttgatgaggagttgcccccgccgatgattttgtacttttttttatgtcgttttggatattttttttttattgaaatgtcgacatgcttactaatcaacgaaacggtcaatgagtgggaaagaacgtcaagaacttctcttttattaatcatgcggtgaatgcacaaaaagatcgggaattccgatggatggggttttgggggatgggtgataccatgtctggggacaggaaatcgaaaccgaaatgcaacgacagttggcccaacgtatttggtacgattataccgcttttaatccaaaacgttgtcaaagaaccaaagaaccgttggccatggccttttgaagacgccatggatccaaaatgttcattggcttttatttatgccccgcgagtgtttattgtatgcatattcttttgccctgacacttttcttcgttcttttcctccgtttgatgccaatgaaagttttcgttgtaaaagggaaatcccttttttgggctgggccaggtttgtatttttttttcatttctgggttgggccaacatctatcccgaccatcctctctattgacccagaaaatgaaatacaataagaaaatgttgcgcccgcctttttcgtttgtaagtgaaattttgaaaaacgctatcagccaaaatgtctttgaaagatattttccacgcgttggcgttgagtgatgataaaagtggctaaaacggagataacgagggccaagaagggggctcacatctgcattgagttgtcagctacaagttgggttctccgctaatgaaaccgataatgaatgggttaatagattcccataaataagaattgttgaagaggcgaagatgcattgaagttgttcggagcgaaagcattaattatccaaggttctcagggttttaatggaggctttaataactgttaggtggtaaaacgatgaggcgtacatctttttataggttttcaaattccaaagaaatctataaagcctcgatcaaaaagtttcctatttcttaacagaaacataaaaaccaattacaaaatttaaatatgatataaatatatatctacttaagatctaattttattaaattcccgaaaattcatcaaatccacaataaccccatttcgacatccccaaatcgattacatctctcccaaagtcaaatctaatttaccgatcagtaaatatgtgtcattcattggcatctgattattctcgcagccagcttactccaaaaacatgaagaaaacactttatttatatccgatatttaacccaatttatagagcatgacgctaattgtattttaaatattatttgccaccgattgctcaccttctgctccacataaacacaaccgaaatccaaaatttgccgttacgtttaacaaatacaaatatacactgttttgttgatcaattaacacgcacacaatgatcgaaactctcttttctatttgctttcgtacacactcaaattttttttttgttagcaatcaacgtaagtatttcgtaatattcgctgaactgtgaaaatttctttttgcacaaagaattttttttcacttactttcacactgtgacgaaacacacgctgataccagtattttgttcgccgttgaaaatttgcataaaaacgaaacgaatttcagctggatgatcaaagccgctgagctaaagaaaaatctcgcgtgggttgctgcgcacgcgcacaatatcttaactcactctcgttgctgggtgttctattctgcgaactatttggttaaaaagcgttctgaactcgcgatcgcaatgggacacaccgaaccggtcggagcgacgagctccaagctaatgaaaagccgaagttctgggatcccgagagttgagttgagtggccagaacgcagataagttcgctgctgccgctgccggcgtcgcagtcgtcgtcgctgttaactggcccgcgttaacagggctatgttaaaccggtcctatacacacacatacgtatgtttgtagatgtgcaggcgtgtatgtatgggtggttttaccatccatctaccgctttgttttgggctctaatttctaagcaaactctggatggtgagagattcgagattcgggactgcagactcgaaactcaagagattccctcagataaacggcaaacagttgtttaatagttttctttgaattttgagcatttttatgttgctgctgctgctgccggccgtttgatttgtttgctgagaaatgcgactctcgcaggtatttaagtttcattaacatttcgagggatcgaggaaaggtctgttcggtgtcaacctttatttggtggcatcgtaatattcagcgtctttgtgtgcggtgcgtgtgaattttttatggttcattaaaattaaaagcagagctcgccagttcgtagtttatttatagcagaagattggcattttgggagggactgtgggagaatctctttctccgccgaaacttggtcgagccaatgaacttggtccataatgcatgcaaagacgggcgatttttccgcgggaaaggaggtagaagttggcaaaactgtcacagatatgatttacgacaagtaaactttagaatattcaatcgctctggcatacacaaaacctttcaaaatgccgcaaggccaaagccatcaaaagagccataaaaaaaggcaaagcatgaaatatgagcacaaattatgaacagacatcacgtcaaaggattaacaagaccgaaaactctgccggatttcaaggaagtccgtcagcgagggcacaaaaaaaccccgaagaaacggtcgataaaaatctaacaaagtttggattcttcgctgggcgcgttaaatggtcaacacccatatattgaagggccgtttgaagtctgtgtttaaaatgcagattatgtgcgttgattaaatattgttttttaatttctttttcgcccggcagctaaaattaaaaatgcacaggcacaggcgtgtgggaaatgcattggaaaagatttgattttctgttttcagcatgccgagcacgtagggctgcataataaaaagaaaaaacacatataaaagtgaaaaaagaatgcgatgggttgtgaggagcatcgcgagggacgaagaaaattctgagcggagagacagcgaagattgttcttatcagcgcaagttcgttgcctgagtctttcgttttgggccttatcaaatttgtggaaatcgcttataacggtagaagggatttatcaggaaaccgtcggaagatttgcataacacacaccgagcgagcagacagctaaaataaatctccagccttttgttcgcctttgtgcgtgcgccacttttgcgagcagcaacccacacactgcagatcatcgcgaacgactgtgctgcgccactccgcaccactttgcaccactcgactccctacccccgctcaccccactcactcatgcaaatgaagcgatggctgagactgcgatctaaaattagctgcaacgtttgttaggcttcagtgactctggcgaagcttgcacttttgtcgctgttttatttcatgtttcgggccttatttcagtttttcagcgttttttctcgccgctcgccgcctttctttggaaagcttgtccgcccgttgattgattgcccccgctgcagatgcgggctgggtcttccctgaatggccggagtcgccgtgcgggcctaacctttgtgcactccctcctcctgccatcgtgcctcgcacttctggtctgctcgtccgactccatcttaccctactctgccttatatttgactgctgactggcccggctctttgaattttacgcttaatttggctttgattgatgttttagcgtttgattcatacgaaaagttagttaatgcggcggttcactgaactcgctaactgcagtggtcaagcgagggctgcttaaagcgtattaggtataatttattttactggtgatggagttttgttttatttgcttttatgtattcttcatattcagttaattatggacttaactttaaatattttcccttctttcttttagtaagatattgaaatatatgattatttggcatcttctaaatattgacctttgtaatatccagttacaagtgtttgggaaacaaataacacattttttttaaaatttattgagaacgaatgtgtaatctttattccctcttatttatatttattttatctgcattatttgttcttgataaatgttgtacacttaaccctcgccaccagctttattttcataactcatacgttcctcggctgacaactcaacttgcattcttgagctgccactctccgcatctgccactacctgtggcaccacctgtaccgtccgaactccctggcaccaccatgcgtacacacattcatcaagtgaacagctgacccactttgccgctggaactgttgactgcccttttgtgatttggccacaggttggaaagcaattaattacattacaacgcaaacgtggacgtggatgggacgtggatggggactaccgccactatccaccaaaccaagccgccaataaccaccagcagcacctccgaaaacaacagcaatggaattgttaacagctgccaatggcagcgtcaatcaatcagcaagcattttgccagtcaatggcctctgttgaagtcaaagcaaatatatagaaatatagaaccagaagtagaagtagaaatattacgggtggaaggaatcggaatcgaacccgcgacttcacgctccgggtgccattatcattatttatttggtgcgacaaacgtttcgccaccaattagggcgagaaacgcggacatttttcattctttatggaagcgacaggaatggctgaaagttgccaatttggctttcgttttcggttcacttacggccatgggtaaaaagtttccaggcgactttcggttctatggaagttagatacagtagggactcgcatagtgaagaatgatctaagtatgacttagtaaataatttgaaaaaaataacaatatatagtatagaatagtatatatatctaaaatggaattgttcgttttaaaattagaatatttctcatgttacctgttttctgaaaaacataaacagcgatcgctgtggctcccttttctcaacatccgagccttaatagggctgcacgttcaactggcagcagcgactaaaaagtggctgaaacaatgccctgttatggatccgcttaacaaggatgactgctcccagccagaggcagtaaagccagccggcagagcggtggattccatattcaaatgcgagcaaacatgcacagcatccgcatcctacatacaaagggaaaacgaaacaacaaaaacaacagcataaccaagggcagctccaccaaaatcaacaagaaaaccaggggaaaaccccgaaaaaacaaggggagaaaagtggaaaaaaacactggcaaagaaacgactttcggcatcacgtttcacgaattcgcagcagaacacggctccgacttctggcacattaaaagaaaacaaaagcagcgaaacacccaaagcctaaagcccagagcccagaaaaacagcaccacacacaaaaagattgaaataaacacggcacagagccaaagcaataagtaaaagttgctgccaaatcgaagaaccagaagagttgcatccgcagtagaagcggccgtaatctttgtaatgtatgctcctcggtgcgactcattgttcgactccacctccagctgcactccctccacctccatcaccaacgtcgtctccacccgcactatatcccggctatatcatactactatatccccgactccgccatatgcccccttcatgatcggcggctctgcacgcgctcacgtttgggagcatcgagagcagcgaaatattgggggaaaattggcgatggaggaaaacaaatcttaaatttgcaaatgcctctaagcgacgagcaaatgctctgggaaatggaaaataatttactgtgattaaatgtcagaaatttatagaatatattagatttatatcaatatagaatatagcccctttactttctttctgttaagccttttaaacccgtctaaaatgattagaaacatatatttagtaatatttctttcagtgcacgtcatcccgagtaaatttggcatacaaaaaagagtgggaaaaatcaaagagaaagatacgaaaatgtaatcaattgaaattcgcatttaagtccccacgcagagcatttccacagcgacgtttgctactgcatttcccattttaatttctccgccgctgcggatgaagtgaaaattcgttgcctgttcttacggctttcccccgattttcgcgatggcattgctctgcagccgtgccatcactttttcttagcctccaattgacattttggcagtcatgcacttccttttcccttttgctaatttatcgctgccacatatgaatgtgtgtgcttaaacccttttttcttttcaagaagatatagctactgagtgcaactgcagttgcattcttatcgaaaccgcacaatcagcaaagggaaaaatggaaaaagccaatcactggcaatgaacatgataatgacgatggtgctgccgatgatgtggatgctctggatgatgctgctgctgctgcagatgcaattgctgccgctgctgctgctgctgctgctgctgctgcagttgcggatgcggatgagtgcaaaagttacaatttcaaaacaaataaattcatgctgctggctaaaaagggcagcccaaatggtcgaaggagtcgctgtccccagcttttcgccccaagcaaacaaatcaaggagcgaccctcgactcgactcgactccactcgactcaactctcttttcgccggcagttaaaatgcaatggggcttgacttcaattgttctgctcaagaaaaggaagaacagaacgatacgacacgcgtatatatatgtgcacacaaaaaaatgcagcaattatttcttgactcgctcgcactcgaacgctttttgtacttttacttgcctgcacttgaagaaatacttgttgtctaaagcaaagaaagtttgctagaagttaagaaagtgtcttttataaatgacattgccaaaaatatgtatttattttttgtaatgtttgcttaagcttgatggtccattcccctttgtcttatttagatacacacaggaagttctatttttctaacataatggttttaatttgtagtatctttttgtggttttctggacatcagctacaataataatccattccaaacagtctccactaccaactcatgaccccttgctcctgctatttgttggctcatttgcttatttgcatggaagcaatggcaatgtcgtgctcgcctctgcccctggaactcgtccggtttttgtgtggcttcctggcagtaactcctctcgatttgtggtcctcggcatccatatgcatgttttgatttcgttttcaatttcagtttcatttgtgggtcttcggcaggctgtctcagcatgcaattgttcttttttcgcctgacaacttctggtctatttatatttgttttctgctgatctcaaagtcagcacattgaacttatccaaatgccagcggggcaaaatacgagttctaacatgagtgcattcaataaatgttttgcagttgggtccttttgggtgcctttgtcccccagttgtgggcttcgtttgctgggacacttctgtttgcggccttttgccggctcaaaactctaacaaaatattttcgagctaaattcttgcctcttgggaattttgtcttactcatgtggagataattacaaattttttgaatataaaacaaacccaaacaaaaaaaaaggacctgaccaggcaatttttaagtttctttacccgaattaaattcctttagagaatttaaagagatcagatagataataaaattaaaaaaatgcataactcaaccccattccaggctctaacatttaaccttgaacttggagccatcagcgttggcatctgggcaaggtcagttaggcaaattcagcgaaataactaaaccaaaccagtcgggcaagccagtcggcccaagaccaagaccatgcccatttgccattacaatgcccatttcccccgaaccacccacccaattctgtgggcaggctgaacaaagcttagactaacgtaatttaataaaacgtttagccgattagatacgttcggtgtatgcactaaaatgtatccattagatacgctatctggtcgggagtgctgcagatacggcagtcggcaagtgcaacgaacgggccgagcagccaaagcgtctccggcagcaaaagtggcagccagcaaaagtggcagcagctgcacttgccaatgctaaagctaaagaagaagcaaacaaaaaaaaaaaaaacacggccgaatccaaagacagggtccaaaacgctaacgagactttggccacgctcgccgtcttggccaggtacttcggcttagaccaaaaacataggacgctcccttttaccgcgagacggttttacttttgtggctctttatttttgttcgcctgctttttcttcttggcttactcctagctcttggccatggtaaatctgcgctgccaatcgctaaaattattgcgctcaatctttgttattagattaacttctattttgttttcctatttgactttgccataaaagcgaatcgagcctggcccgcctgcagtaactaccaaaaagggtatttacgacttggtcataatgcttggccatcgaaaagggaaagggatgcgcggcatgcgcggggccctcaaattggctgcagttttggtattccaaactgattggactatgacggggcatgttcgagttgggtctaatgatgtttgcctttgaaatatgataacaaattttgtttgccttgagattctggctaagccaataagcagaatcttttttaaggtaaacgaaggatgttgagctcggcctgggttacctgccgaaattgattgatatctgcaggattccaggcctttttaaatatttatcagtaaacggaagaatttattttgtttggtatagcttcttgcatacttaaattctttaaattaaatttctatggccaactttttgttgagaacctcaaaatgatctgtctgaaagagcattccaagttcgatgctaaccagctggtaatggcaactttcttgttatctgctgctgccgttgtcttggctatttgaaaactgaaagtgcgcccggtcagcgtctaagttggcatcgaagcgagcgggttacggatcttagttagccagagtcagagccagatccatagccatagccatagccaaagccagatctatggtatggtcatagccattgcattagccatgcccagacctctgcattcggcttggcttcatttgtttttactgcctggcattttgtagtcatgtccattacaaaagctgctgcttggctcctctgacgctgcggtttgctgcctatttttccattttccccgatgctttttgccatcttttggccaggctttatcagtctggagtctgcctgttttggggcttttaaattggttttgtgttccctgcttctgccaagcttgtggcgcatcaattgcattggcaattccacttggcagcagcctctattctacataacatttgcggcatttagaaaggccaactttcctttgttactccaatctgcaactatgatgcaactttcattgcaacctgccagccatcttacgtcattagctgggttctggaacgattgccacataaaatatgattcacgtctttcagcggctaatgaataagagggaaacttttttcaagcgaattcggtgaaaaatgtagccactgagaaacagtaatccgcttttcttttacattaaaagatattttcatgtaattcgtgtaatttttagaacactcaagtgtatcaaaagtaatttgaagtttatgtattcaaaaaaatcgttgttactcaaagatgttacgaaatgttaccgaaatgacaagacttctagtaactttttccgctctgtgttcgtgtgacaagtgcggtgtaattgaaagaaattaaaagaggtaaaaaaagagccggtcgcaaaagcaaaggctgctgacaacaatggtaatgatgctcatgccgttcacgataatgtgccgcggaagtgggttaagcggcttaaatgttctgctcctccgacttcctcgggccaacttctcgaattcttcggtacgtgcaatgccgtcgacatgtctgacatggctgaaaatccggcaaaagagttgcaagagctggaggttggaagtgccagagcgatggaggatttctttcctgcatttaaattgcgcacgcatcaaaatgaagctggccgcaattaaaagcggagaaagtgaatcccgaccccgcctcgagatttatctcttaaccgctttttttttttttttgttcgttgttggccatttgggaataggtagcttttactcacgcgtgccacgattctatttgggtttatgaggtcacctgcccttcggtctcgcggctcagacttacctgcaaatagatagaaatcccagataagcattaacaacatttatgtgtaatttgttttaacaacagcagcaaagaaaaataaaaagaaactgatttataatggttggactaaatgttttatgtttttattaagtgaaaattactaaataaccattttttttcctccactttgatagctctaaaaatataattctggtttagtggcacaaagcgcacttggaagtggaattgtctgccgaaagttaataagtgaacttgacagtaagcattggaaagtgggcttggcatgacaaattgagtaatcacatttggcagtaataatgccaactgaaagttttaatttaacaaaagaagttacgaaatttggcttaagtgcatttaatgttgtttttctccgttgaagaataatagcaataataaaagcagcgagtagcttaggctgttaatatgctgtactatattcttctctgtttattattcatatcacggccttgacaacatcaaaatgggatcaacaaattaaaaacatctctgcaatttagctgagttcccacatttgagcaacaggtggcgcatatccgacactatacaaagctaacgaaaactagtttgccgcattaatatctagtctcagtctggtcaggttcgatctgatcatcttttgcaggtctagacgttgccgcagtgattccttaatgaaaatctggcgcctgttgaatcttctagtcccgccccttttcgaaaggcgtcaagtgccttcaaattggaaatttaataaagagaactttcctgcacctagcttcagttcatttaatatcactcaggctgttgcttttggcattttccccctgacgcactgcataaattagccaagacaaaagcgtattgaacccaagagaagcccccacttcatggtcacccaaatcaacggcaaatcgctgtcaataataatacatcgagccgccaaagcaaccgtcacaaaagcttaattatttagaccattccaagccgacaaaataaaataaagaaatcaaataatttggatttttgtattttgttttgattcacacgctctttgattccaaacaatcggcctgcgtcaacgtcaatgtcccccacaatccaacagtccggtttggtccgtcatctgtcgttcacgcttgtggccagcaaatgcacgaaaaatggcaagaaaattttagatggcaacaacataaggtcagcacgctgaaccagtggacgcgaaattagtttaacaaatataaatgagagaaagaaatgggtggggacggatagattagccaacagttactaggaagttgaatgcccctttggtgccattaagaattttgaaagaaagggttgaacttggatgaaaaatattaaactcaagccaaattaatgggaaaaaaccatgagaaacagatattgctgaccgtatctacagaacatcctaccatttgatttttgtaaaaaaggattggtaatagattaaataatacctccatatattctgatttcctgggacttagattaaatcatcataccctaaaatatttttatattatgatattaattaacaagctgtatttaaataaaactttttacaacttcaagacatgtataccaatctacgcctctccatttatctgcaatcaatgaccaatcatttgtagaaatattttttaatatcaaagcccataaaactttcagcagttgtcaggcgggaaacaaatttgagcctataattataatcgaacagatcgacagacagcgaagccagattgggaatcaaataatatgccattcccattaaactaaatgacataagcagaaagatttacgcactcgcgtagaagcaagaaatcaaatgttgtcaggcagagcgtcaaaattgtaatgagacaaaacttggcccacacacacttggccaaaagatggtggtggtggtggcggcggaggggggaggggaatggccacgccccggtctttgaaaacgattttgattaaagaagttgtcacagttgcttaaagcgaacaaaaagcgcttgtcgaacaaaagcggttttgataggtgcgcgtgggcgccttctgccagcccacccctgcccttgccacgccccctgccccctctatattatatataggtatatccccctgctcgcggacggttcatttattgggtttgccaggtctatttgcatagctctcctccgtttaagccttgaatcgaattgtgcgccctgacttcgtgccagggtattattgtaaagacttatacttatatatatgtatgtatatatctgtattcgaaagatacaaagagcatctgaggcgaccgttaagtttaaagctcacagcggtgaccttgccttggctcatagagaaatctctttgaatgcagcgaacaatggcgacgaattgccgaaaaccaaacgccaccgatattgcagcaataaataattaataaatttctctgttgccgattcgtcgaacaaaaaatggttaaacaaaaaaaaaagatgtatataaaaagcagcccacgtgcaacttgaattatttaaaccgggaagcaattaccgttatgtcgtcgaaaagccatcaagatattcattccattcacagtgcgttgcataaacataatgttagtttaatgaaagtctattggagcgtaaagatttacttttaaatgttgctattgtgatttattgcgctacatttgcgaggtatacaaagagcacacatatttccaaattataaataaattttagaaaaagttaaagcactttaaagagttaagattaagagttgaaccagattttctttaaaagtaagtctaatctgcagcaggagttccgattgtccatggatgaaaactgactacctgggacaatttatgaactccttttagacctcaaaagcaatcgatatattcacgttccgcactgttcctgcttatgcacttcccattaaaaagagcaagagcagggggtaagaaataaagcgtgggcgggcgaggataaaaaactttcattggccgccttcaatcagaataatgaacagctacaaaatctgcaatcagcgtaagagccgactcgttgttttttattttttttatttttttttttgagatgaataacctcggaaattgtgatcgctttatagtaagccagcaattgcagtttttatctgatgggagatccctgtggttgcataatttataggggtattaaaagcatagaaaaacttttcaaatgctgaatgtgcatatcagctaacattttatgggttttttgcagagttgtgaattaaacaaaaaatacgttgtaaaaaaataatatacgatttatcacagcaacacaattcgtttaattaggaaacgattcaggttttttctccctgtgcattttgtgcattttcatatattttttgtataatggaacgtgggcttttacggcggcaacttttgatgcatttgtcgtaggtgtcgcctgtctaaggtttaagtaaaggttttagggcttgcggagatcagagatcagatccaaggatcgagcccgcgaccgcgcccgcaaattggtggcaacggatttgcgctaattttcgccgccgattaagtgttggcaaatgaagaagaccaatgttaagtgcgagacatttttgtcgggcaattagtggagcatttgttgctcgaactctcggcgttgttgttactgtttagcgggtatgctgtgctgacagttaaataatagaaacgtgccaagttgcaactgcttgctgcaattgttgctgcatgttgctgctgctgctgcttgttgttgctgctgctgtgccgccaagcacgtaactcaataatgcgcacattctaacagccagaacaacaacaacaattaagctaacaatgtaccacacgctagcgtcgaatgagacggagatagcgtggaagtaaaagttgttgttagtgtcgactcgacataatgaaaatcttctgccgcccgttccgactccccccccccccccttttgccatcacccttgggaaattgtctaatgaaaagctgctgtcgacacaaacgaagcgtggaaaagaagtgcagaaaaaaaagagcactaagaattgcgattgcatcgagtttttggagccccggggaaggcgtttgttggggatgtcggggtggtaagtggtatcgattaagccttaaacttgatgcattgccgccatctcagtgtgtgtcgtcagcgttttagtggacagctgtgatggaaagcctttcatcaatttggcgttcgtctggaaaaacgacaacggctttaataagccatcagacgcattgttttccatttaggtaatcggaatccgaaaaaatattaaatgagaactgtgtcggatttggggcttcatgcataaatagaattcatttgcttgttttaacaaacactttggtcatttaacagagaaattctttaattttattaagttaacttaacgttccacgtattttccacttgactccactcctaacatttatatgcaccggattattcgaaccgtttggatggcttcgcccaaaaaaaaaaaaaaattgttggctgccaattgataatggcctagaaaaaagaaatccgcatagaaggccaaaagtattaagaggtcgtgctggaattgccgctgtgtcagctgccaagtgttaattacatggctggcacttcaattgccaattttccaggccgctccccaaaagttgcagcccgatcttttttgcattcagcaccagaacttgttaggccaaagctcttcttggccatcataatggagtagagaaattattatttgcgccaagcgaaattggcttttttattctgcacatatttaagccagatttcttgccatgtccccatcgctgacttatgtccatgtttttccatttcggctaaacttttccagcggcaatgaattatagaacattacgaggcaagttccatttaactgcagagacagcaaattacgcctggccaccagagaagtgaagtggtgagtgggggaaacgaacttggggggcaaggtggctggagatttgcttgggttatttgtggcaaagttgcaattttccaggtaacttctggggcgatgtcttcggcgtatgcaaacaagcttggttggcgggggagagccccgggcaatccacaacatggcttaaaggtgactgagcgcgttcgttgcactcactcgcttagaaatgtgggggatattcctgtgcaataacttgccggatgagtaggaagcggcagtattcttctctgactccggcgaacgataaattgattgatttatgcctgggattctccgctagaagatcgttcgttttaggttcatatacacttttttgaaggtattaacattttgataaggaatatggcatattgcatcataactgtagaattttttcatattttggcagaatattttaatttaataatgataaaagaacatccggttttgatagtgatataatataattccattaggtttcatgactgtataattgaaataaataacggaatttggcacccatgctgttttcctaacccataagagcattatactcttcggtttccccataacccaaacaccattcctgtttcccttgagctggtcatggttttattgtgcttttttggcgttgtacatcttgttgcttttaattatgggcgttgcagcgtagaagagagttctcttctctggccgccagccattagcaattttaatttatttatgtatgcgaccaactaactccgactgcgagtcgaacttaagcccacagtgcaagttgagtcagagtctgggcctcagacttccgagactccagagttcccagttgcgaggagtcgaagttctggcggcaccgactgctcgtcatgtctcgcaacgaatgctggcataaattaatttcaaatgcacacaaaacatggtctagaacacaagttggctaacaaccgagacatacatctacatctacatctacaccgacgtctgcactgccgctcaactgttgattttaattacgatttacattgcattatcatcgtgattatcgacacagtttggtggctacgatcgcgtaacatgtcgaatttcatgcacttgaccctcaagcggctacttttttggcaaatcatcatcatcgaacataaatgtggaaagaaagaaactgtgcaaatattacgcattcgcttaattatagcgtcaagcgtgatgaaagtgaaaaatccacagcaacgctttatttagctttgactaatatcgtcagtttgcagcttcttcggtttacggcaaacaaagattcggtttgtttgccccgctagaccacaacaaaaatctaaaaaaaaaaatatcgaaaaatatttggaaaaaatcttttaaccttggcttaaagctctttatgtttatgttctgaccagacgtgggataagctgataattatcgcggagatcattatcatgatcattgtagatatatggccaagccgcaattccgtccatgggcttttattagccaatttacatactgattgcattgcctcaaacactcagtcacgacgaatagtaaatatgtttatttgcccaatcaatttgttatttatgctcagacacatttgtcagttgatttggacacgtgctgcattcttttccactcgattatacaactattcgaactttccccagtttctcaatttcccagttgcccagcgaagtgcttatcttttgttttcccacacctttcgaatcatttgagccgcaatcaattataatattgaatgctcaatctcgactgcacttccttgacagagccccggccacgcccccactcacgccccgaacgtgcaattgaaatgtccattaactggctgcgataaaaatcaacgggaaagagaaacctacatacatgtatatggggatattggtaggaatgctatgcgaaccattaagcccgctagaagtcgggctcccacttcgcagaatcgagccgcgcagatgactccactgaccttggcgctcttctacaccataatgatgatgatcgccttcaacttgatccgacatcagcttaatatatctccgaatggttgatggtatttatggatttcggattaatggcgcattttgagcagctgtcctaaaatattggcacatattcacccaacccactgacgagtttaaatgattggattttatgtggcatactgacgtggaaaggtattataaaatttatgtgagaagatgagatgttcttgagattgtgaaaaccttaaatatttatagattttccttgaagaaaatatcctagttattacatcttaagaatgattaaagatcttatcggttttgattaacatcgctgaataccaataagcttgccacaatggaatttgcgatgacttcattgaccttgccggccttccgataatctgatgatcatctcgccttgacattggcccatgttagccccaacctctcgccccgacaagtagattctccaactccaaagttattttattgtctaatagttacatcaatccagcaaagtaactcgccaattgaggctctgtgctggcaattaagcaccaagtgctcgccagacaattaccgattaagattggctgaaaaacatgtttgccttttgttcttgatgctgctttttagattcctctccgcaatgtttatatctatttatttttagacatgcgctagacaaccacaagatgagacatcaaagtcccacctgagttggctgcatgattaactatttgcacgccagcaaaagattgaaaatcgcttgcttaaaaggtaattaatttatttaacaaacattgaggaagactgggtagctactatggacttgtgctaggaagtaccagttctttggataaataatcttgtcagttttaagaataatattgttggacaaaataggtgtacttcccaaaagtatgatgtatgtctgtattaattaacttttctttgttttctttggtgcctgatgaattttgtttaattaacgccttaagcataaacaagtgcaatatttattaattcccaaatgatttctttattatctagttcaaataaacaatttaagactaattgcataattattactaaaaccgttggggcaataagtgtgtttgtttcacctcaaaccaaacagtcggtaccaaattaattggtattttatttagttagtgggtcaggcacctaatgaaattatggcttttgcattgtcgcccgacgcaagagttatttgtgcccactctcatttgctctctgacccgtaagccataattgaacgtaataaccaaaagttaagccggaatgccagccgctctttatctcgctggttattattgtgtatttgtgtggtttggccccatctttgacattaacccgcaagccgcagcaccagcaccccacttcctacccacatttttaactccccaacgcaattccccccccattttccaaaccatcccgatccgcatagctctctcacgtcgcgggccgcaaataaaacgtacgaaaaatttaattcaatttaataagcgaatatgttgcgtgccatggctgcaaagacatatccacggtcctccatgtgagtatatgtgtgagtatctgtgcgagtgagtatctgtgtgtaatgcgacgcattcgtgcatggcccacctcaaccttctcaacaatctatctgtttcttatgtggtacacaggggaaaaaaaggtagtaaataaataaaaaagatttttctacactaactgtcttttccactaaaaattttacaattcttaaagtaatttaatccatataattgtgaaatgaataaaagttttaaatggatttccgattctgattttttatatattaaagatatctaaaataacatttatttatatcttgctttaaatgtcttgtgcaatttggcatgctgacctagtacccaatataatttgccaccatatattcatgcgtgcttgtaagtgttttagtgtttttggcctgcaggaagagcgacgagaatttgggccaaaaagtatggcttaatgggaccacgagtgcttcgcacaggggaggggtcacgtggggttacttggaggagtccaagttggctttgtgtgctggccaaatgtgaaaataatcgtaaaaggcaattagcgcaaaatagctttgacactcattcagtcagttggtcatgtgggttaccccgattggccgccttcaaatcgctcgctcttgttttgtgcttcttttcggaaaattgcctcaataaagtatttcgttttattattcagatgtgggtcaggcaaatatagatgtacaaagttgtgtcagtaatttatataataaattgtttcatttttgatgtaaaatgttgaaaacaaaatcaaagacttaaaactccattgtatgcagtccctttggatatctgcaacattaaattcagtgaactaaccatgcttatatattgattccgctctttttggccagtcctttggggtgcttccatcgcaggaaaatccattttcctctccatggactttggaccccccccccccgcaatttcctctccggcggatcttttgcatatttcaggtgagcccaatatgcggcatattacatggcccaaatgaacgagctgctggctggttggttggctgatttgagttggctgacagacacccgggcgattttgattgtgcggcaacttgaacctgagtcatgcgctatgtggcagcaacaacaacaacaacaacagtgttgttgtgctgctgtgcctttgttgttggtggcttggggcggctgctggggcacgggcaccttcagcagtgtcatagtcatgcaacaaaattgggtctgttccgttttcgtgggctcgtgtgttgcagccgcacacctgggcaggccatacaacacacaacaaacagcacatggtaaactgaactcaaatcggtaaactgaaacaaaaactggctggcaatgacatggtagatggcagtgcctggataaccgattactcaatcccccaatctgccccaaaacaacagcaacgacaacaacaatggcttataaaaattgatagcgtccggtggtgaatgatttcgaattttgttgtatttcactcgatcttttttttggctctattgattttgattttgatttttattgaaatgttttcgttgttctccgttattgctgcggctgttgtcgggtcgcttatattgacatatttatggctgctgccagtcggatcggccaagcatattgcatatagcacatactcgtagccccaaaaaaaaattgcatttgaatgcatagcataaatcacgaggtgcggtgcgccaacttgaacacaccttttaacacattcgagcactttttcggtgtttcggttttgtttcggtaatgaatggatgtcaagaaccttagtcctggccacgttcaaatgaatttaaaacaaaaacgcttagggttgtggccagcgccaattaattaaacgtaagcaggaagaaaataaaaaccattttcggcaatacgacaatttcttgaacccgttttcgtataaatcaatggcaatgtcaacgcgtcgagtgcttggaaaaaatttaaaatataaccaggcagcttgacaatccacgcgaaaaactggcaaacaaaatatgtttcagccaagcgtaccaacgaatttatgttttcagccataaattgccaaacataaacgcccacctgggcgccgcttgtttatggccagcttggccaggttggcaaataatgaaaatgttttccatttcgatagccaatttccgcaattcctaaacgcctttgcagtcgttactgccccccaaaaatgttcctccgaattattgaaattgactgctcaaatgtgtcgcacaggtcgcggcttttctcgttccgagccatttccattgcgctttattcccatttgtggcctaaagtggcagacttcggagtctcgcagcgttcgaatgggcttaaactttaaatggttttagtttttggggaaagttcaggtggcggtaataggctttcccaatgggcaattgaattttgtactctttgaattttaatgcatacccaaagtgtctttaaaattttcgaaaatatctaactcttgattaagcacataaaacccttcgcgattttgttgccagccaataatcactacatatgtaactagtccataaaaattcaaaaatcccgtccagccaagactagaaagcctgaaaaccgcagagatgcaagaatggggattgggtttggtatgggggttacctacgaaggcctctgatattgaggagaaaaatggccgccaggcttgtgaaatttcttagttgtctgccgttgtcttggtattgttattgccatcgttgctgatgttgttgttgttgttgctgttgctgtctgcagttaaattgaacaatgccactcaaaaagttaaagttctgtgggtcagtagaattttctcaggccgcaatcagcgcagagcatggcaatcgggccagagacgtggacacaggccaacggagtcgactacgcatgcgcagatgccaggccgcggatctggagaagaagctcttcttggcgggaagagccatggatacgtagatagccgtcgacgaagaggtgaagagcaaagagtgtgtgtgccactaatgaaaccataaaaatcaaccgcagactgagaagagcagggatgagcagaaatcttcagcttacgacccgtacgactcttacactcagggaaattcgaaacgaaaataattgttgatcttgtttgaaaatcaacataaaataaattaatgtatttttaatatgaattggaaatattggactatttagagggcaactgcatgttagaagctgtattgatttgaataaatattaaaagatatttaaaacacatacacactagacttgtgttttcttaggtcagttttctcagtgtatatgtgttattaacgtgtttcagcagtgcctacggttcggatcgggtcagaacgtagtatgtatatatgggtaatttgagtgcgggactagttcagggcttaatgctgaccacagaacggtctgcacgagttggagttgcatgcaaataattacggaaaggaaacagagacagaaaccgaaacagatgagggcaagacatcttcacatgatgtctgctatccactggcttgctgggagtggagcatgtggcatggtccagaccagagagattgaatatttcctgcgtgcccatcaagtgaaatccgtcaaaatcatcttgccctatgctgttgacacaggtaattaagcttaattacagcatgagaactacatgcatgctccgttgacagcgagacaaaagtacacaaatacacagggaaaaaatgtgtgtgagcgacctcctacactgatgtgtattttgggggtgttggggcatggggcggacggaagcattaagcgtcccccacataaaacgaggctaatatgcgtatttatgatacacacacactccacactttcacacaacagccacggccataacgtgtcatcattttcacttttttttcacatatttatttggcttttattgtgtgctccatgggtgctgtcaccgttctttgggttaacttttcctttcctctgctggagtttatgtttttatttggtctcggccctcgtgacataatttcgctgcagttgccgccagaaatttatcttacttacagcagttccctttcttttggcttcctgtgtcacttgaaagttatctgcccgtgggcgagttttttccattttagcatactctgtgagacagggtagttctattcatcagatacatcaacaaaaagtatgaatataagcatattacaaaactaatacaaatatattttatagcgaatattattgtacatttcgtaacttaagtttgttgccatttaaaaatttgttttatttatattattatttgactgatctgctttccaagcactttcaagggcactctggtgtacgtttttctttgtcgccagcaggaattatcgttggtgccaagaggatctggcaaatctgtagtctgtgtctgttgccttgcctcccgatgcgaaattcctcatgccattatgtgttgggtgctgttgtttttttttctgttttattttccctttgccacatcaatggataatttacaagtcacgtgtgtgtatgaaattgaaacaaaatgcgcataaattttgtaacgaagcgaacgtcaaggcgagtccagggacagggatctccagctcgagctccaactccagccacagcttcacatccaactccaactccagctccatctcctcgggcatctgtcttgccacatactatactatactatatgtattttcctttctggctgaggggcttgtctcggcacaggcatttaatattaatgagttatagcacatatagcctggtctatatgtttgacgatgcgttcattgctgttgcctgctttatttttctttacttcatttttgcccattctgcagatgttgtgctgtttctgttgctgttgctgtcgtgtctagtcctttcggcccgttgagagttgcatttagtccagggcaccgcgctgcatgttcaagtggcaagaagagcaacaacaacggcccaactgagtgactaacttggccattaaaggatgtcttggatgtctgggatgtcttggcctcttgttgttcgctgcaggcctccgaccaattcgttccgtttcgatttctatttggtttattaatgcagatacatttatggatgccgggccatccacaccctggagcagagtgctctcgcacgcattttaaccaagtcatttccgtgacatacttcgtgccacttcaacttttactctttcggctgctcggttgctcttgttctcgtttattgttgctggcgtcgttctacttgatcgcaggcccctggctacggatgacattagccccagccgcacgtttataacacgatatcaagctgcagaatctataaactcaattaggccaaaaaggagcccgcagggtaatcgaacaacaaacacatccgtttgaacaaacagcgggtagttaatcgagttttaagataatctaagctagaataatttttgaagaaatgaatctttgatgtatacctatttgactatatccaataaaatgaatccctatctactccccatagccaaaaagataaagtttattcactgattgctatggaatttcgacaatcttaagcactcgagcaaccctctggcaaaccggccacaataaatccgcccaatgccaaaccactccccactcccccactcgaccaccatcgccacctctgacaacttgcagacatgtcagcaggcactgtcgcagttgcagtttcagcctcatggctaaaagttgcctggctagccgcaggtttgtcaaacttggcccgactgcagtgcagcaggccgttgcaagtccaactgcagctcagcagtttgtcagccagtcagtgcgactatccaactcaccgacaatctgacagtcggacaaacggacagagtggcggacttacaaagtccccgctgccatgtggcaacgataagcgacagacagcgaacgcggcagagacgtaattgacacaatttgaatttatatattttcaatgcgacaaaatgccggcaaggtgactaagccacgaacgatccgaatcgaaacgaacgatcctgcagcggccgagcctctttctacactagcaaaagttatggatactcattttgaaaatttccttaagtttaatgtctctggaagttaacactacatttaacacaaacaacataaaatttaaatatattgtaagaaatagttttttaacattatttcaaaatgctaacattttgtttaaggttcgtgttcaagtttcagtggttggcctgtccttgggggctgtcgcgacccattaatcatacattgaccaaaaagggtgtgtatgtgtgtgtcgtgctgcttttgttttaggccaattgctgttgccaaacatacacacacacacacacactcatatatcgcttaagtaattagcccggcaaagcaaattgaaattgctaagcctttctcttcgcagcatcggcaaacaatgaggaagtaaatgaaccgaaactaaaagccaaaaatccaaagatgagccaaagggcagtgtgtcagaatgaatacaccaatagagttatagatacggatcggatatcgatgcggcgtgaaacattagtgttgtaagttaatttttcgcctcaactttttcccttggcctcttcgcttttttgggttaaacaattgaaatgtaacgctgggacgcgtgagccaagtaaaaggcagccacgcagaatagaaaggtgttaaattggcaactctgggagtgggcgtgtgcctgcagatgctgatggagttggaggttggaaatggaaatgcggcggatggggatggggataggtaggtagggcgagatggggttaaagtgaaagactctgggcagggagttgtggggcgtggggcatttgccgacggagaaaacattttccaaagggtcattcacttgtggtcaagttctttcgcctggtcaaatccaagcaaagatatcgatttactgcgctcgtgttttccacttcccccttccgtttaattgcatttcggatctatctgcccgtcaatctatatgtctatcggaatttattttcatttcatatttttactgaccatcaaaatatgcgtctgagtccatatgacagttgacttttgtttgtttatatggcatttcatttgtctttttgctgacaaccttttttttttttttgaaattctttgactgtcacaggcaatgtgtttgttttttcaccgaagtgccgtatacttaacctttctgtaaatacatatataattgatttaattctttttcaaaggctttttaattcatcatcaatttgtttaattgcaaattaaacacttgaatcgcttatttgtcactgattgcttaaattgatacttttcatatcgcttaactttcattcgactttttaatgtaatcaatgtagaacaaaatttctgcacctttttgtcaggattaaacaaaaaaacttgctcattttgcaatttaataaaagcatagctttatatgttttttgttttatataaatgtatgaaaaagttctttattttatttgatatttttttgttcacgtagcaaaaagttattcccaaatctatttgattttcttttattttaagaggataagaataaaggatttgtttataattatattcgaatattaagaaaacacaattttaattattattttctgtgccactggatggtcttacttccacttccctctgaaccacttttaccttttattgtgctatatttcaatggattttttctttaatctttgattgttatttatgcgcatttaaagcttgttattttttaatcacacgcccacgtttatgctgccgtacctgttgttgttgttactcctataggattgttgcatttccaattcccccattatagacatctcttaacactgcccgtcgttttggccattgttgtgcgaatttaaattgaatatctcttcagcacagtgcactgtttattgtccgtctatcattgttgttttgggtttgccggctgccaatggaactcgtatattaatcaatgttggttcgatctccgctcgacccagttaacaattaaaattatgacaggtatgtttgatgtttccgctgttgcagacataattaaaaattaatatttaatatcggaacgagctgcggcttggggcgttgcccctgtgactatttcgcttagctaagccctggcctaattatacccaccgcttgattaatgaaacgcaattgaattaggccctgtgattattattttatatcggtattagtgggtcagcgcgaattgagtcaagttcgctgggcctgtcaattcgattccccacaactgagctctttagcatataaatcgagaaactccttaggcaaccgacggctgattgtaataaagacatggcaatcgagcagtaacgcccgcgccatgtcagcgatgtcaacgtttttgacgtctctaaaaaccaatcaactctcaaactaaatcaaaaatcataaaatattcggcgggggcgggtagtgaagttgggatgcacacacacatgaggcgtaggaagccaactgcagctgacaacatgaggaggagtttcggtggagtatcgatgggagacgacaacgacaacgacgacgacggagtccacagcaattcctgccaaacctggtcctccttcagtgccttttataaataaaatttgcataaatttaataaaccttcgcctcgtctacgtttcggccacaaaaggctggcaactcaactcaacttaactcaactcaacttatctcctccggctctgcgcacttgttatgggccaaaggagattttgtgatttaccgatataagccaaaccgttgaagcggtttgtcgcacacaaaacaaaccaaacgccaaaaggaaaacctttggaaaatgcaaaaaaaaaagtaataatataaataaatccgcaaaactaaagatgcggagagaaaataccccgttgtctcacccagagacccataaataaccgaatccaaagtcagtggcacaaataatgatgtgacatgggccccggccaggaaaatggcagtgaagccaacaacctggtcgaaagcaatctccacgcaggctcagtggcatcatcattgctgcacgcataaatcgattgcagcttgttagttggtccaatgacaatggtgccccaatggatggggctgctttgcatatggaaagatgaatgatgaatgctctttccatctacgagcagcacttcctggttggttgcttttggccaagctggcagccacacaaattaatgtcaaagtcaaaacgaaaatggtatttggcaagcgcaacgtgcaatgtgcaacgtgtaagttgtaagttgtaagtttgctggttgccagtggcttagttgctaggctgccaacttgcggctcacaaatcgcgccataaatttcagccatcggagctgtaaaagcaggcaaaaatgacagaaatgcgtttattgaccaaatgtgcagcgtactcatcgattacgaggccaagacttgccttgaccatagcgcatgcgttgcggctgctgccttttgggaaattgcaacgcaccggcggcgactctcgtgtcgtatacgtaatatgttgtctatgctatgcagcacatttgttgctattgctgttgctgctgcgtgtgctatacacaaatatatcgctatcaatttatttataaacattttcccagttaagtgtcaccggtgctacgaagcagcagcagcaggagtttgggtaaatatttcgatcgtcagagatgtttaagttaaccagtatggatttatagctagcttataaaagtattacttgcaacaataaaagctttaattagttaaattgatttcgtttagatttctatgggatgttcctcaatattctttccaaatttcacgtgccttttcaacgaatacttccctaaatcattaaaaaaaattctttaagtatcttctctttagtcaggcctaatcacattctagccattgggttgttgctctttcagctgtctgttttagccagcattgccggcacttggccaaaaacgggtatctcttagccatgccaatccgcgggccgcaagtccaaactatttctgtgactgccaagcgctaaatgtgtgttacttccgagcaatgtcgtgagtcgcagcctcctcagacacaggcatacatacatgtgacagggaacacggaaggggcgggtaaaaaggggggatggggcacagccagcaggcgactctaatgcatgatttatagtaaaatatttatttttactgttaagtatatgccgcagacagtgcagtgataaaaaatccgacaggcgtatgaaatgcatatggcagaagatctttaaatgcaatttaggtggatttgaaattatgcaattatgtaagtaaaagtggtagctgctagtcagcattaacgtttttaaaattaggtaaaaatacatttttgtacttctgcttataggtataacatatatttttatgttccgtaacactttttgaattaacaatcatcagtttacaaattaaacaggtagcaactcttaagtaatttttaaaaataattcttttcttaagaaaatgctgtatttttgttagtgtatcgaggcatgagttgtcgcatctcttggggtgggtgcccagctccatatggacctgggtcttggaatggaactcggaatgggactgggacaggttgccactgccactgatgcggctgctcctctgctcctctgctgcttccactgctgtcattgtttgcggccttatcagtgtgcatgcaaaggaaagaagacccagatgaagtctaactgttattcctggctgaagatggcagcttgttagctgggggattctcgctaatgtcactcatacgacacgttgcacagaggcaaaggcagcaggagcagcagcagcagcggcagcagcacagcaagtggcaagctccgccgccagataaaatatgaatgtcaaccgttggcgcatataaatcagaatgctatcagctgatgaccccattcagagcacagagcgaacccatggcttttcaataaagcgtgtcaagcataaatcattgaagatatcgtctcaatcagcaaaagggagagagttcggctaggcgaattaagccagaagaccccttgacaagcgggccaacaataagcgatagccatcagcgccattgattttgcattgaggtttttggccatgtgctctggtcttaaacaaaagtgtcataaatcttgcagccaagatgctcgacacactgttacgaatctgaagggcttcccgcaagtgcattgtggccctgtgacaaagggatactaatgcacgtaatacgtgccccttcaaaacttggcaatttgagaaaaccgggccagaaaccaagttcgagtgctaagacgtgagccagccacaaagtacgacgtaaaatccgctgccaaaagatcctcaatcaggtaagcctttttcaaaattgattaactcgctgccgctgaggcgacaagcaacttcctgtcccatccattttaataaaaccctttttaatcacaccagcaatcacctttgtagcgtaaccaaaaactgaaaagaagattaatgacaaacagcaaattgcgctcaatgtcgcattaattgaggcaatgagcgcatgaataaattcatgaatttacacaccagaccaaaccaaaaaatcaacaaaaccacgaaacaaaaaaaaaaaaacaatgacaaggcgccaacttctaagccacaaaaatgcgctttgagccaaggtcgcttacagctttagacgggctgattgcgtgataaagaggctggcaaacgcgatgaagatcgtcgagaatcacttaaacgcctttgaagataatttttgatgatgttttatttatgtcgaaagtaattagcatcattaaatgcttataaccaatttgagatggaaacaaagttcttgaccgccattctaaaatgttcttaacagcaaatgccaatttttaaggcaaaagctaaattaatactaatttaacattttaagctaaaatatgtacgtttaaaaaataatttaaaattccttatgtatttaaactgcgtataagattcagatatgctttttcatatctcaattatggccgtagttagtagtttgcctaacacttgctggtaaacaaatgtgtacgtctatggccctgccccactaccaatttcctggcgcgtgtttcgaggcttttggccgccatcaagtgtggccaaaaatcggctggcgctttaaaaccatccatctgagcaattgggcagcagctaaatgctggcggttcgctgctagccacacatataacgtggcaacacaccacagtggtacacacccaatttggctttcgggcctttgacgctgtctattagccgggttatgagcaaattacgggagcgccgcagccataaccaatgccatgccccacagaaatccacggcggaaaaaagctaattgcaccacaaacacacgttgcgatcggtggtgccccactcggtggtgcggtggctctggggttcggtggtattttggtggagcggcctacgcagcctgcggccgttgtttaatatgcaacaaatcaacgcgccaattgtggcgtaaaatatttacattggcccccgccgcggggctttcgaccaaagccacttcgaccctgtgccgccagctgccgacttttaaagccacgagcttctccacagagcttcctacttccatctctatttactctaatgtattccaatcgacctcctataatatgcctcattgctccataattcatgagagcaaattctcggatcgaacacactttgctaatatccatcttgtggcctagttttgcaagctaagcatatagtacagtgtacaataaataaaattttaacaatttttttttctaacaattttatcaattaggtaaacattcaaaatacaacattttacacacatacatatacaagacaataccgctcataaaaacgttatctcccctgcagtttgttaatttttcaacgcgtaatcacctactcggctaccagtaattccgctcccctcgactctttgattttgtttattgcgtttaatttgcgcattgtttgtgtggcttttggggataattgcaggcatcaattgcagcagcagtggcacccactcagtgccacagaggggcaatcaaattgccagtggacagtggcaatcagattgccacagccaccgacacccacacaaaccaccactgagccactgagccactggaaaaatttgctaaaaccacaaactgttcggtttggctttcattaagttttcagccgcttttttgttttggcaactccataatcaacgttcatttcgaagtagccccctaatcccgcagtatttgatttagccatttgtttgctgttttattttcccaacgctgtgtttgcatttctcgccgagttcgtgttgttggtgtatcattaatctccaacatagaaccaatcaaacagcaacgccaaaatgtggcgatgccccactgttattgatgatgtgttgattaggttctgacaaacccatcgcggtcatgtgaacaacaatcaaagtacacagtttcactttgaactcgagccgcactttttggtaggatgggaggggggaaacccaagccccctcgccgtgggggtggaacttttgggcctggacgccactgcaattcatgtgtgtgcggtcataggcgaaatttgggtcatgtttggccgttcatgttgccaaacgaaaaccaaaaaaacaaaaatgggaaaaatataacgaaataaggaaaaaaccttaagctgaaatcatgcaaaccagcgtgtgtctaatgaattgccacccatatgcagtcttttttgtacatttttttttcaccagcggaaaacggctggtcaagatttgtggtcgctgcagttacgccaaagagctgccaccggtgcaagaataacgccgactgtctgtcaattgttcgatatttatggaacataaatccgacctgaagggtcattcactaattggggttttgccttaatgggtagaggtttttatggtcgactggcttaggaatgaatcagttgggttcgtattttagagatatgtacctccatttcagtcttcttttacagctaattctgttttacgttttccttggaacatcttcaggtatttgattactgattgaattctatataattggtaaaactaatttaccattagtatttacttcttcgtttacaacaaaatgaatttcctgatttcaaggaaaaataatttatgcttgtatttattgcttctgtgtaaattatatttaatatatagtttaatgttgctaaatcgcaactcatcaatgttccacacgtcagtaattcatatcccatcaacgacctttgatttcatggaactcgcacaaaattatttccttcaaacacacaaatcaactacaattatgtccgaattccaatttagagtgaacttccgtaacaaccctcgctgcggccagtgccccatcaaatgccagttaagtcacacaagagaccgaaaacaaaataacgaagaaagatctttgcatttataatttcatgccagaattcctcgataaattgatatatatgctggttcacttcactggctgacttgctgcccgaccatggccagtgccacgcccccttcggcccaccgagagcccggctaatggcctggccaattgtcgcaaattagtggaggccagcccagcacgcacacatggccaacatacacaggcagacggaacaggtgaagtggagtcaagacaagacaactggagtcaagacaaacacctaaagccaatccacatgagcacccaagctaacggtacaccggcaaacagaagatggccaagaaggcaagaagacggccgagaagccggagagaaagaacagctataaagaagtttactgctacaattggcaaattgaaaattgttcgctggtggcggcggcgttggagttttgagcccaactcgaagctccaaccaatgctgatgttctcaagttgattttgaccgggccagacggaagcttcagaccaaaagaccctgagcgggcctaaagctaaggcccccctatctcaagcccgctaactccctgcgatgcgttcgtctggccagataagctgacatccacaacgtgccacagacgatgatgcatttgccaaggtactcgcaactggttgccgcatcagtcgctgcagtcgacgcaccagacagagacgtttcaatttcaaacgagaagagctctttcaaccgacgccagaacttcgaaatactctaagtggaaattaattttccatacctgtcgcatttgatacgcattcattttatccacagttactatgttgcattaaatactcgcatatcaatgatcccaagtattgtaagcgaacctactaatatatctcaagtatatgtaaagagtaatgtttaagttctgaaaatgtatttgcttgattctaaactagacgcatgtaagtttgtaaatatcaaagataccctacccgcttaactaaaaggtattcttaaaaagcaacaaaacggttttggtcgggccaatctggcaggcagacattttaatgaagccgccgtcaggcagcatttgaggcagccactcttggccgtctggctagtaacggtgccaagtccacgggtctatatagcgataagtcaacgcaccggcgtctgtggccgaaacgaatgacttaagcgacgaacctgatgagcgcagttagtgcgttggattacctaagttttggactttgccgtatatataaacgtggaggtgacttcaagaacaccccgaaaatagggccaaaaatgtcactttcaactttcgctaccagttttccctgccaacacatcaaacttgacccaattctgtggggaaacacccacacggcgttttatgagtcgggttctctataattaaaaaggcaagcaaacgaaacgaaatgaaatgttaacttcaaagtccacttgatttgggatccacgcacttgattggcactgccacactgaagctgaaagagagaactgggcccagtctgtttaggcgttaattgcgggttctggcaaattacagacttggccaagaggccagaaacatgaaatgcactttctctttgccgccgcgaaaagtgagtgagttaaaatggattgttttggattgaattggattggattgggacttgagatagatgtgcgcgggcgtaatgccaaaatcgatggcagctgctgcttaccttttgtttagtcttctaattgctcccgaagatcgcgccgatcacattaccactgcaaaaagcaaaagagaaacacatgagtaagcaaaagagaaatgcaaattagtttatgaaaacactcaagcagacaatgaactcctcaactcgattccttttatggactcagctcttcaaatacgagtatgaatcttgaaaactacctctgccgtcagctacaaattgacattgtttctgtatttattttcgacacattcatgtggcggcaacaacacgtgttagcccgttgttctgtaagtgactttgatttcgatttgatttattgcctgcaattgtcgcacacagctaaaaagtgaaaactttccgccgcggttttgttcacttttgctttcgaaactttcaattcggtgacttaatttttgtgcagcgccagcggcctaatgaaatcgaactgccgcttaacaatggcaatagcacttttattgtcaaggcattgctttgccaaagaaattatcaagtgcagtttgggctttggcacttttactttcattgtcgtggaagtgctaacaattgagcaaacgggctcaaaacaattttcaattgagtgagtaatgctcattttccatttagcatcggctaatgagtcgaaaatgcttttcgagcccattttatagggtcggcagtcagtcacagagccaaattaccaaacaatttcaatgtctttgaatgtgaagtcgatttttatgggaaaatgtttcggagcgaaaatgaaatgaagctcccacaaagtgttaacaaaaatgtttatgtaagtaaaatgtgtgaaaaaaaggctttgttttctgtgaataaacgaaaagccattaaatatatcttaagtttgattcaactttctaatctcaatatgaattctttacattcttgatatattctaagccccattatttggtcaaatatgtaaatttatttccgaatttgtaaacaaccttttatcgttaaactaaatgatcataaactgatgtcataaaaatgtataccgttgtgttatgtcaacaaatcgtttgatt

SEQ ID NO: 22487 - DNA, 3114 bp, DROSOPHILA
tgctttttgcagtggtaatgtgatcggcgcgatcttcgggagcaattagaagactaaacaaaaggagaaaaggcttcggtaaagcagcttaccaactggcaacgcgaaggcgtcaaagggaatcgaaaggagtgcaggcaaattgaaaaggactattcgcacactgtggccagcggaggaggaggaaatcgaaccgaatgcagtatctcaactacgctctgcagacatccacgcgactgctgacgtaccagggcccgaaccaggatctatatcctgaccagacaggagtagcctccgcccacgaggaggaaatcaagcacgcctgctgcagtcgcggcgctcagctgctgagattgcgccaccgagagctggccaagcgacgagctctcgaggatcagattaacgccaatcaagaggagcaggaggagacggaggaggactctcgggatcagcaggagccgctgccggaggagttggacagcgagcagggagccgtcggcggggagcaactgcatccgcagccagtccaatgaaacttactctcatttaatgtccaactggcgcgcagcaagctgctatcgttcttcaaccgcgacatggccgccaccgatggccaaatcatattggccgcctcccgattcggcgatgccacgcccgtttacctgcgcgacttttccaagcagccgctgccggcggtggccaagatcatcaagggccagcaccaggcgctgggggtgcccacattgtcggccccatctctgcagagcaccgccctatttctgagcgccggcaagaagtaccagatcctggcccagcccatcaagatcaaggagggtcgcaagcccaccaatgtgggcgccaaggtgctcatcccggagacctacggcggctacttcgagctcctcagcgaggatggtcgctccacgcgatgcattgactccgtgctggagctctcgcgacggcgaaacgcccgcgtcctggtgcgggagacctttcgatgccagcagatgaaccggaccatccacgccggcgaactgctgaccaccatgaacgacaacgggaagtacctgcagtgcaggaacatcaaggacgagatcatcaatctgccactcgataccaaagccaagttctcgccgatcgccagggaggacagcatcagcggtgtccacaccgtcaagaatctgctgctcaagcggatgccagtcatcgtgagactcgttcacggcagtgcgcccaagggtctgaaacagccatttgtgcccgaactgcgactgctgggctgcgtggagatcgacaggatattcgcgttgccactgcaaaaggacacggatctggtgccggtgccgctgaatgccaagatcaagctgcagcgagccaagaacatggagcaactggagcacttcatcgagtactcgcgattcctggacaaggcgcagcgattgctggccgatgcacgcgatcgcctgcagatcgtcgatctcaagctgagcgagaaggagaagaaagactccaagttcaatagtcgcaatgggggcaggttgccggtggtcatgctgccatctgcagcgggaatggccagtggactggcggaaagtggttatgtgctgcgcaagagtgccagttgtgattcgtggtcgaagcaacagcagcaggcactgagcagcagcgagattgcggaggagtacaacgagatcgatcatatatatgattatgtgaggggcctgacgccgctctcgaagggattggcccgcttcgagcccatctgcgaatcacccactctgcggtcccatcacacggacagcggcagtggcaactattgcagtttgatcagggctccggttcaccagcaggccaccacctccggcaacaacaactacagcagcttggagtcgaacaagcacagcagtagcggcggtggccatcatcccggtagccaccatcaccaccatcatcacgtggttaatcactaccatcatggccatattcaggaggacatcaagccggtgccgccgcccattgaaacgattccgggcaagaagccggcggagaagcgccagcgtcccactctaccaaagctttacatcaagaatgcccacagtgctgggagcagcagcaatggcaactccacgggcaccacccacagcaccagtcacagtcacagccatagtcacagtcacgtccacagtcacagtcacgggcagtcacagtcgcagcagcagccgccgacacccaatgggaatacgggcaatgcggtggccaatgcggccgcctcagcggtcgcagctgctcatcacggttcccacggatcgcacggatcacatctgcacccccatccgcatgccagtgtgcatccacatccgcatcctcatcacggcaaggtgctgacgcccaacaatcatctgccgagcaaggaggctctcgagccgcagtcgcctctgtttcacatcaggtacaagagtcttagcagtctgcagctgacgccggacaacaacaattgctcctctgtgacgccgccgacgatctcagcccacggcaagtcatcaggagcaggcgttggatcgggagcaactgcgtcgggcacaccgggcacgccgggcactccaccggatgtggggctcaagtgcggcagcatactgaacgtgcacggttacctgtccagtccgcatcctctgccattgccgctgccccacagccggagttccagtagcaataaccatcacaatccgagggagggtacgctggattcatcccgcagcggaggccggacatcgggcgactcgaacaagctgcccgagaagaagacacgccgcctgtcccggccaagaagtctgtccaacctggtctgggatctgcggccctcgaaggagaagtcgaagaagaagctctacatccatcatttcgatcagcggcagcaggcgacgctgtatctgtaggatgattgcatggatgtatctccaggatgacgatgacgatgaggaagtagcagcacgatgatgatgatgatgatgattcgttgccaactcgtttctagctgccatcgacccccacaatacagaaacaaaaacagtaacagaaacagaaacagaaacagaaaaacactgagaaataaaacac

SEQ ID NO: 22488 - protein, 111 aa, DROSOPHILA
MQYLNYALQTSTRLLTYQGPNQDLYPDQTGVASAHEEEIKHACCSRGAQLLRLRHRELAKRRALEDQINANQEEQEETEEDSRDQQEPLPEELDSEQGAVGGEQLHPQPVQ

SEQ ID NO: 22489 - DNA, 3177 bp, DROSOPHILA
tcttcactctctcgctcggctctcttcgtcacgctcacaggcgtcttcttctcgcgaacttctctttttgcttcgcacaacttttgtcgagagctaatggttttgcaattattccttcgccacgggaaagtaaccgtaatgctaactaaaggtgtacttggttaaacactaggagccagttcgctaaatctaattcttgtattttagatttttataacaaaaaaaaacgcgctcagcagaaagttgcatgtgaactgtaaagctggaacaaaagtcaatggtgatgggatacgttcgatgtattttggcatcgatagttacctgcaaaactatcgataaatattgtttaaccattattgcacttaatttaccgctaaaatttaaaaccaacaaatactaaaattaaaaaacatttagcgagttaccaaaataaattgatatataaaaaatacaagaatgatatctagataaaaataaattaagcacgtaaaaaaagttttgtgataccaattcttaaaaggctacacatatgtacatatatataaaatatacaaatataagtgggtgttatattgcaatttacataaatttggaattattcctttcccccctccacatttaaacaaattgttgctttttttttaattctttaatttacttatcaaatggaaggcaaacactttttacgaccgaaagtgaaaacaatctagctaagcccacaattcggctacaaattaattgaatgtcttaaacaagtgcatttaggtgatgaaatctccaacggcacatatattgaaaggcggatagccttattgcataggccggaaaacagtagcatctgtacgtacaggtatacgctatttacacgattttattccccactgatatcacaaacatcatcatcatgtggaaatcgaagggacttcaggcgggacttcagaagggacttagttggcggccagtcgcacaagcagcttccgccgatcctcatcgatggtggtcaggaaattctggacgcgttcgctgtagaagtcagtcgccttggccagctggcagctctgcatcctctccgctcgccgaaagtcgtccagctgccagcgatcacgctggtaggccagaatgctggccaggaaatgccagaaagtgatctgcggccacaggacgttgctgaagtacaacacggatgtgcttaactgaaatggtaaaaacagtcgtttaatatttaagcttttccactttatcaaagaccgcaaaactgtcaagatctcaatttttaaatgcattttataaaaatgatgcaatcgcagagcgaaattcaacgaatgaacattgggcacaggtaactacttaatcactaatcaaactaaataagtgggaaatctgccaaagggggtgactaaaaacaactgttcctggaagagatccttctacacacctgccacatcatgaagtcgcttagcctagtctcgccggaggtgcggaacaccagatccggtggcggcgagtgtcgcgtgtagaggcattcttccagcaaccgctcactgatgtcctcgcccgccaaatcctggctgccatgccgcagtatcgtttccaccgcctgcgtaatctcatcccgcgacgtgtacgcaaaggcgacgttcaggaagagcttgtcattgcgctccgtgctaagcatagccgaagccactagtttctgcaagtcgtgtggcagtagctcgatgttaccaatcacccgaatgcggatgccatgttcgtccagtcgagcagtctcctccagcaggcgggcaaacttctctctggccaaattgaacagaccctccacctcctcgttggaacgcttgaagttctcgatgctgaaggcaaaggtggtcacctcgcggacgccaacgtccaggcaccagcgcaggcagtccgcaagcttctcgaatccccgcgaatgaccctcgatcttatcaatctgctgtgagcgggcgaacctccgattaccgtccatcacgaaggcgacgtggtgcggaatgtagccacaggcgcgcagcgttcgcatcgctatccgctccgtccatgtgtacttgtagtcggagacccacgacatggtctttgaattcagctggattaagattggatgtcagtcaattaaataaataaatatttatttatttttttgcggtgtcttgtgattagaccgctgccaatcgactattacgctatcgatacttagaaccttttatatagaacgcagtgtgaccatatgcgatatttcggtatttagcatagactccaaccgacacgatgaaaatgtggccgttgtgagatataaatgtaataccattaagcagatacacgaaccaacatcgatagaagagtagcccagacatcaaccgtctacgaaaataagcgcagaaactgcagttattcggttttttttggaagtctttcctctggcgtggcttttaattataatataagtctatctgaaactaataaatgtttcataaaagtgctaaaccaattaaaagacgcacaaaaaagaatgcatttttaaatccacctggggtttgaagccccgacacactccctatcgataagctatcgccaaacatcgcaaaactcagcaaccctgtcattttgacagctacgtcaaccttcttttttgatatccggttaacgcaagtggttcgtctttaatttttccctcttaatttttgcgaaaaaaaacccgactttgagcccctaaacttaaaaaatgtgccttcctccagagtgttcagagcgtcgactgaaaatgacaaacaagctgcccggcagctaatttttttttacattttttgttttgtttgttcgcacgcatttgtttttatttgtgaaacacgtggtataaatgtggaaattcccttgctattcccgcagttgctgatcgacaaacaaacccagaatggcacccaggaaggctaaagttcagaaggaggaggttcaggtccagctgggaccccaagttcgcgacggcgagatcgtgttcggagtggctcacatctacgccagcttcaacgacaccttcgtccatgtcactgatctgtccggccgtgagaccatcgctcgtgtcaccggaggcatgaaggtgaaggccgatcgtgatgaggcttcgccctacgccgctatgttggccgctcaggtgagttg

SEQ ID NO: 22490 - DNA, 909 bp, DROSOPHILA
tcacaagacaccgcaaaaaaataaataaatatttatttatttaattgactgacatccaatcttaatccagctgaattcaaagaccatgtcgtgggtctccgactacaagtacacatggacggagcggatagcgatgcgaacgctgcgcgcctgtggctacattccgcaccacgtcgccttcgtgatggacggtaatcggaggttcgcccgctcacagcagattgataagatcgagggtcattcgcggggattcgagaagcttgcggactgcctgcgctggtgcctggacgttggcgtccgcgaggtgaccacctttgccttcagcatcgagaacttcaagcgttccaacgaggaggtggagggtctgttcaatttggccagagagaagtttgcccgcctgctggaggagactgctcgactggacgaacatggcatccgcattcgggtgattggtaacatcgagctactgccacacgacttgcagaaactagtggcttcggctatgcttagcacggagcgcaatgacaagctcttcctgaacgtcgcctttgcgtacacgtcgcgggatgagattacgcaggcggtggaaacgatactgcggcatggcagccaggatttggcgggcgaggacatcagtgagcggttgctggaagaatgcctctacacgcgacactcgccgccaccggatctggtgttccgcacctccggcgagactaggctaagcgacttcatgatgtggcagcaacgtcctgtggccgcagatcactttctggcatttcctggccagcattctggcctaccagcgtgatcgctggcagctggacgactttcggcgagcggagaggatgcagagctgccagctggccaaggcgactgacttctacagcgaacgcgtccagaatttcctga

SEQ ID NO: 22491 - protein, 240 aa, DROSOPHILA
MSWVSDYKYTWTERIAMRTLRACGYIPHHVAFVMDGNRRFARSQQIDKIEGHSRGFEKLADCLRWCLDVGVREVTTFAFSIENFKRSNEEVEGLFNLAREKFARLLEETARLDEHGIRIRVIGNIELLPHDLQKLVASAMLSTERNDKLFLNVAFAYTSRDEITQAVETILRHGSQDLAGEDISERLLEECLYTRHSPPPDLVFRTSGETRLSDFMMWQQRPVAADHFLAFPGQHSGLPA

SEQ ID NO: 22492 - DNA, 3945 bp, DROSOPHILA
gtaagtcctggaacgagccacttctcacaattcattcattaaatattcaaattcctggcagggagatttcaagtggatgcatcgctcgagggtgcggactacgatgcttggtagcaacggcaatattccggagccgactgaccttttccgccacacggaggtcaagatggagcaggtcagcaccgcacccgaaatgctggaccaggacatggcctacaagtacaaggccaagatgaaacgtgttcttccttacttggctttgaacgaggtaagacaattaggattctatgctggattgcttagatcttacaagctgtctacataggtatttattggcgagcatctatcggcccgagtgtcccacttgcaactggtgctggaccaccaggacgtggtgaacaagaccaaatgctccggactgtgcgtcagcacgggcacgggctcaacatcctggcacaccagcatcaatcgcatcacaagccgagatgtggacgacctgttgcgttccctgcccgacggcgattcaaagaacgtgatgatgctacgacaaaatgcagaggagatcgcccagcggtacaaccaaggcctgctcttcgcgccagacgacccgcgcctctgctattccatccgggagcaaatctgcgtgggcgtgtggccttcgccaaagacttttaaggagcgcgattttgtgcagaccgtgtttgtcaagtcgcattgcatcgatgccagtgagtagttggacattcaaatacgaaacaagatataactatgacaattacatctccacagacctggttatagatggcagcatttcgttccccttcaacgatggcgccaaggctttgctagaggttcacccagaagatgcccttctgacaatcgctttagactgaatccagtgatgcgcccctagtgcctggtcatctcgctctagcatgtctgaatttttgaaattatttaagtaagcattttgcaactacttagcagtgtaagctcaaaagttattttgttattttataaaagtatatttaaacatcacgctttatctttcttgacatctgctctgcccttttgggcaactggtttttctttgttaagccttttcagtggcttggttggggtatcttcttgggtggctctacttcgtccttttcccttcttctcaaacctcgcactgtctacagatttaaaacgctcgtcctgtaggagagctttgccctcttcgctggctgccggctctgcgtgctgcagttttctctttcggcgtatttcccttagtttatccttctgttttttacgatacctgtggatgggatacaaaaattgttataaaatacaacgaatatgcgtattttccactgcttacaaagcttccatttggtcggggtccttcccctccataatccacgtctttcgcctatagttttgcgctcgctcgtcgaaatcgttattatctaattgcatctctgattcacggcgcgtgacatttacttgcataaagattctctccaccatgcgctctaatttatataatatatatattaaagatagttattttgtgtgccactaattccaacaaaacttacgatcgatgggatgctctgtaagtttggtgttgatctcctcctcaatggcggccaaaagctctagatcgcgtggaaagcggaatatggagatggacatgcccttgcgccccgctcttgctgttctgcctacgcgatggatgtactcctttggtgtccggggaagcatgtgattcataaccagctcgacgctgggtatatccagacctctggcggccacatccgtagcgatcagtgtacgtatttggttggacttgaagcgacttagagcagctacgcgctccttttgccgcatgaaaccatgcaagcaaacattatcgatttccatgttcttcagtgtcatcgagagaagctgacagtacctaaaatgattcgttattaaatccttagaatttacttcctattattgtgcaactaacttttttgtgttggtgaagatcatgacattagcgttttcgttctcctcgcgatactttcttagtgcctctattaagaccatgtcgcgatcgtagtcggcgcacagcagataacgctggtccagagtctctacagtggccacgtctgagtcctgcgaccattcaaaacactacattcggattaagatatctattagtaccattcaacagggtattcataaaacttacatcgctggcaatgggaaatatgctggactcctttatgaagtccttcatggttgcggaaaagaaaaggttttgccttgtctttggcaaacagcgctcaatgatggataggctctcgtcaaagtctccgttcagcatgcgatccgcttcgtcaacaaccaaatacttcagattgtcgaaggagaaggtgtcgcagccggttaggtgatccgcgagacggccgggcatggccaccacgatgtgcggtcgctgcataagcttctggctctcgaccatttggtctgtgccgccagagacaacacatacgcgcacccccatcgcctgtccagccacaagaaactgctcggagatttgataggccaactcgtgcgtgggcgtcagcaccagggcgaagtggctcactggctcttcgctcagccgctccagaatgggcagggcaaaggcgaaggtcttgcccgagcccgtcttggcagctccaatgcaatcctggcccgccaatatcgctgggatgcatttctgttggattggagttgctcccttcaggcctgaaagcgcaatggtttaattacttgggtaaacccgtggacggcttgacattacccaacttggtcagctgcttaaccaaccatggacgtaggcccaggatctgaaagggattggcctcctttcgttgcatttcggtaaataaaaatacaacgaaataaaaaaggaaaacaacgtgcgctgtattagtgatggaagtattgtcttctgtatcggtatataactatcgatacgtttttaatttttgctccgtgtgagtggttagctgtatttagtacgcatttttaatttaaattcaattaaattttttatttacttcaaccgcagaattattggcgagtaataagaaaaaattcactataaaattaataatacattttataattaatcgacaatagtcacgctctagacaggtaagattccgcatctatgggcgcgatcattttgtaaacacactgaatatttcgatttagactcaatgcaaagatgtccgaaaaccatgatagcctgggtgcatctgtagcctacagtgagctggtggctatagaccagaaggacatcatcctgatgatagactttgattcggcggtttccatttgctcagcatgtatcgcaaataaatccgcgaatcctgtggatgtcttgacattgtggttcaccaaactattaggagcatacatcgacgattccgggtattgtgtactagcagctcgggaaatgtgcaagtggttcacgatcgtaggtaattcttacacaatgcgcttcagtctattaactttaaattcgtcctcaggaagcagaaactggcaatgaagtccacagcggtcatataaaactcatgtctgtggcacaagaatttgtatccacattcagggatcgattgctggaagcaggcgaacgtttggttcaaatccttgcctatcttgtctttacaattatcgacttctgtttaatgtggtaagaggggcttggataaaacctatatgtaaaatatttctatatatttttgcttacatcattcagcgataagagtcatcgccagattgttgcggatcttcaactcgaaacgctttctttaataaaggattctatcattaatttgacagaagtccaccctcgccttgcgacctgtaagttaggaatactaacgaattgatacacccaaaaatttgagtatt

SEQ ID NO: 22493 - DNA, 1646 bp, DROSOPHILA
cacgttgttttccttttttatttcgttgtatttttatttaccgaaatgcaacgaaaggaggccaatccctttcagatcctgggcctacgtccatggttggttaagcagctgaccaagttgggcctgaagggagcaactccaatccaacagaaatgcatcccagcgatattggcgggccaggattgcattggagctgccaagacgggctcgggcaagaccttcgcctttgccctgcccattctggagcggctgagcgaagagccagtgagccacttcgccctggtgctgacgcccacgcacgagttggcctatcaaatctccgagcagtttcttgtggctggacaggcgatgggggtgcgcgtatgtgttgtctctggcggcacagaccaaatggtcgagagccagaagcttatgcagcgaccgcacatcgtggtggccatgcccggccgtctcgcggatcacctaaccggctgcgacaccttctccttcgacaatctgaagtatttggttgttgacgaagcggatcgcatgctgaacggagactttgacgagagcctatccatcattgagcgctgtttgccaaagacaaggcaaaaccttttcttttccgcaaccatgaaggacttcataaaggagtccagcatatttcccattgccagcgattgttttgaatggtcgcaggactcagacgtggccactgtagagactctggaccagcgttatctgctgtgcgccgactacgatcgcgacatggtcttaatagaggcactaagaaagtatcgcgaggagaacgaaaacgctaatgtcatgatcttcaccaacacaaaaaagtactgtcagcttctctcgatgacactgaagaacatggaaatcgataatgtttgcttgcatggtttcatgcggcaaaaggagcgcgtagctgctctaagtcgcttcaagtccaaccaaatacgtacactgatcgctacggatgtggccgccagaggtctggatatacccagcgtcgagctggttatgaatcacatgcttccccggacaccaaaggagtacatccatcgcgtaggcagaacagcaagagcggggcgcaagggcatgtccatctccatattccgctttccacgcgatctagagcttttggccgccattgaggaggagatcaacaccaaacttacagagcatcccatcgatcagcgcatggtggagagaatctttatgcaagtaaatgtcacgcgccgtgaatcagagatgcaattagataataacgatttcgacgagcgagcgcaaaactataggcgaaagacgtggattatggaggggaaggaccccgaccaaatggaagctttgtatcgtaaaaaacagaaggataaactaagggaaatacgccgaaagagaaaactgcagcacgcagagccggcagccagcgaagagggcaaagctctcctacaggacgagcgttttaaatctgtagacagtgcgaggtttgagaagaagggaaaaggacgaagtagagccacccaagaagataccccaaccaagccactgaaaaggcttaacaaagaaaaaccagttgcccaaaagggcagagcagatgtcaagaaagataaagcgtgatgtttaaatatacttttataaaataacaaaataac

SEQ ID NO: 22494 - protein, 521 aa, DROSOPHILA
MQRKEANPFQILGLRPWLVKQLTKLGLKGATPIQQKCIPAILAGQDCIGAAKTGSGKTFAFALPILERLSEEPVSHFALVLTPTHELAYQISEQFLVAGQAMGVRVCVVSGGTDQMVESQKLMQRPHIVVAMPGRLADHLTGCDTFSFDNLKYLVVDEADRMLNGDFDESLSIIERCLPKTRQNLFFSATMKDFIKESSIFPIASDCFEWSQDSDVATVETLDQRYLLCADYDRDMVLIEALRKYREENENANVMIFTNTKKYCQLLSMTLKNMEIDNVCLHGFMRQKERVAALSRFKSNQIRTLIATDVAARGLDIPSVELVMNHMLPRTPKEYIHRVGRTARAGRKGMSISIFRFPRDLELLAAIEEEINTKLTEHPIDQRMVERIFMQVNVTRRESEMQLDNNDFDERAQNYRRKTWIMEGKDPDQMEALYRKKQKDKLREIRRKRKLQHAEPAASEEGKALLQDERFKSVDSARFEKKGKGRSRATQEDTPTKPLKRLNKEKPVAQKGRADVKKDKA

SEQ ID NO: 22495 - DNA, 2483 bp, DROSOPHILA
tttcgttgataagaggtacgtgtaggctcctcaaatagaggcagatgccaaagtgaatcccatctagaaacaatgaatgtagaggtactcgcatttcgattgggatccattcatgtgtggcagctgtgaaaataatatatgtatattaactactacaagctaattctatttcagattcttaggctaacattaattctttctaaattaattctttctaataaaaaagagcattatacgaagagttatatttcttttatgcattctagttaagatgcaaatctatgttttatcattttaacaccaactttctttctggtaacctgagttttatgcatatataatacattttcattcaacatatattctatttttaatcatctccaatttcgtgttttctattagtaagaatatcggatgttactttcgccaaaatttgatttcctcccaagcaaaattaccttacaggttccgcagacccaagcagaatttagtttcccaaatcgattcatcattttacaaggtcaactcaatttggccattcttagctggaattaatgatgtgaaaagctttggtaatccccaaatttggttgtaaaagagtttagaatacagcctctgcacgaatcatttttcaaatactcgaagcgaatcttattcgctttcgttggggatggcgtaatattttaatcttcgggttaggctgcggatgttgcgcatgataaatttccatcgaaggttctctcgacagtttacgcaataaatccaattagcaaaaaacattttgtcttggcaggtttcattaagaccgcctgtcatcgtaatttgttattacccaacggagttggccaaacaagatgtatcaacaattagccaaactgcaagatcatctgtgacccaccagcctctgtctctagaagtctgcctcaatgttccgggttaaacaaacaacgccaaggacattgatggcatttgagatagtgaaattatggtcaggtatgcatatcgttgtattcggttatatattttgcaattatctgaatatacaaagtgggtatggtttttataatagctagactcggataccaatcgagataatatttggtgaagttttttacaataaaatatttatgaagcttagaaattcggaaatctgtaggtgtaggtgcttcccactttccagctcggttctgagttgccatatggtcctcccaagtgctgtccatatcctccattcagtccaatctcgtggcgtccattgtcgctggtccacaccttctggtgaccctggactgcaaagccaaaaccatcgccgctctggccaccgccgcctccctgaagattgagtgggtactgcggtggtggagtgggcttcatggtcatgtcgtcgggcatcggataagccaaagtagaagcgattgcgcagcaaagtaaggcgacggcaatggtgaactgcatctcagttgttctcaattgaagaactggaatatgctgactgatacctttgctgcagtttcgatgctcttttataggccgctttccaaaaggaatccccgatgtcaccttatctactcagaaagtatacctacggcggttattgtctcataattagaacccaagattgattaccggtcataaaaaaggaatccccgatgcaaaaacaaataccaccaggggatctttcttaaacgaggactcacaccttattttcatttgacaaacaagaggttaaatacttattaaatgataaaatttgtaacctcttattccacgaagtttttaaatatgtatcttaagaacaatatcccaacctcccagcttattattaacaattaaaacattaatgatttcccttcgaaaataaacgaaagttcatccttttcccagttccacggattaattttaaaacctctccgcggcgacagacaaagagcgatgtatgtttgtatgcaggcaaacaaaaaaaaaaacaaatataaatatttaataagtgataattgattaaaagcagaggttgagcaaacgtaaaaacagtttcccatcagcagttgagtgccgaggcagccgagagaaatgttgttacaatcgatattaatgaaaatattggccgtttttttggtctgctgggtgagtgcggcaaaggaaaaatatacaattaatccgaaaataaaaaaatataaaaaaaaatatatatgcatatttactttacagctgggacacgtcacagcccagtcatctgccgattatatagagcttgaaattggttcaaggggtgaaggtccaccggaaaagacggaatttccctggggcaatgatgaccaggatcttgaagcaacattttaagtttcttaagattttttaaattctataaattgcatcatatacatctctgttaaatatattataaagagaatccaagtcttatcagtaaagttacttgttataaccaaaattatactatacttttgggcccatagaaaaataac

SEQ ID NO: 22496 - DNA, 483 bp, DROSOPHILA
tccagttcttcaattgagaacaactgagatgcagttcaccattgccgtcgccttactttgctgcgcaatcgcttctactttggcttatccgatgcccgacgacatgaccatgaagcccactccaccaccgcagtacccactcaatcttcagggaggcggcggtggccagagcggcgatggttttggctttgcagtccagggtcaccagaaggtgtggaccagcgacaatggacgccacgagattggactgaatggaggatatggacagcacttgggaggaccatatggcaactcagaaccgagctggaaagtgggaagcacctacacctacagatttccgaatttctaagcttcataaatattttattgtaaaaaacttcaccaaatattatctcgattggtatccgagtctagctattataaaaaccatacccactttgtatattcagataattgcaaaatatataaccgaatacaacgata

SEQ ID NO: 22497 - protein, 106 aa, DROSOPHILA
MQFTIAVALLCCAIASTLAYPMPDDMTMKPTPPPQYPLNLQGGGGGQSGDGFGFAVQGHQKVWTSDNGRHEIGLNGGYGQHLGGPYGNSEPSWKVGSTYTYRFPNF

SEQ ID NO: 22498 - DNA, 2771 bp, DROSOPHILA
aatgccgatttaacgatatattgtacgtttataaaaagcctgaggtgaattactgcaatgaacatatattcaaatgaactcgtgtagagctgaaaaacaaaccttaaagcatttgctggccaatcatcccatttgcatgctattcgcaacactcacccatttcaagataaaaaccaaacttgatcttaattgagagcctaattaaaacgcatcgaattacaagcgaccacggccatgcaattaaaatcgaacaacttgccggctgatgcgtcgccgctgataaattcggaaatgccaatcggatgaaagggccagaagagcaaatgttttccgaacagaaaagatcatccgccgccaccgtcgcctctgcaatagcccagtttgtgcgtaatcgttctccgttgatgatgtgctgctctggtgtctgggcgtttcgccggtgagtcaacaacgtcaacaaggcgggatgtcgccggcactgtggcttctccgttttgttctcttgttgaccaatctctgtcacgccgaaaatgttcgcgagttcaaagtacaagtgggccaattatatttgccaagaagtgcgattgttcgtccgcgagctgaaagagggaattccacggaagatacatatacatacatatacacggcatacacgacagactaattaaaatcgttagttatattggcaaacaatttgtctatgcggcctatacaagtacatagatgtagaattgtatgagggaccatgtacattggtaactaagtctaaacaatgcaacttaggctacgcaaaggaagggtggcaacaatctatacacttatcaactaggagggtacgtaatgcactaatccggagtctcgatccgaaccgaagcgatccattgttcgatcggaacggatccgcagtcgttgcttatcgttagtgtcataagccgtacttaaggtataacaaggacttaaagtgatctactgtacaccaggcgctgtgctgccttaaccatcaccagtcgtccctgggcagccggtacgtggtgttgtcgctgcgcacgatgtggatgccggctccgtagtagggtatcacataggcggagccatccgccggacccacaacctgcagggctatcagcacgatgtcaatcagctggcccaggaacatgccgccgagggtgcagaacttgaggagtccgatgcccggatagcccaaatagaatctatccacgccgaacatgcccagaaagacagagagtagcagtgtggtgtccaggtgatagccattcctatagaataggaatagaatataggtcttaagattatgtttatgagatactgtagctgcactcacgtccacttgcagggcacttctcgggtgaacgtggcattgccagtctccgtgcagttgatctcgttggcggcgatgcaccagacgcgggcgcgaccctccctggtgcatccggccagctgctgtgtcttgggatcgatttgacccctcgccgggtcggggcacatgaactggcccatcatctggagctcgttgcagtccacattgatctggtgggtttccttggcgaagaagaagagaaggagcagcagcactgggaacatgggtggtgttctttttggccacttcggttggacaggcggtggtggtgttctgttggcgggagctctttctcgcgggtactatctgttgtcgttttcgattccggtttcgatgttttgtttattgcagttcgcgggggcaggctccaaaattgttgttgttttttaacattggcattttgggattgggtcagtgtgaccgcactcggagcggtcgcaaataccactgtgcagagatctaaaaatataccgaaagttttatggctctaaaggtataatgttagaaaataacagcaatttaacagcattagtacattcttaaatataaatggtcgataaatttaccaccttggcggaatatttaaattagagataaaaaaaacctagttattaactttgtcattgaaacaagcctgcctgtttattgaacacatatttcttacagttcagcaaaaccttaacattcttcacattgcttattgtttcaggagatagggcgtcctgaaaagttatagccactttggatgtctggccaaaggtgcgttcaatgcgacccttctctcccgtcgagagctccacattcttgccgacgtacaaatcacgtttggcgtccttaaaaaggttttgaactatcacttcgctgctattgaccactcgctgaatgcttcccactttctgtttgcgcttgaaaatccgcagtttcggcagttcttcctgaaagtatttggaactgtgcgtctgccaggcaatgcgtccccaaaacgccaatctacaactggtactatggacatccatgtccagcttcgaagcaatcagcgttgaatgtggcggagatagaacaggactttcgaattgcaacagagcgtagatcacatcattatgttgaacctccgcaggctggacgtcctccatatactcgtattctttgtccagttggaaagtggaagttgtgccgtccgtatcccgaaacaaagttacattggccatcactgtgttgtgtcccacggagatgtgcatcttcctcatagattttatgacttccttgtaatagcggatgggtttaaactgtagacacacggcatagatgggtttcaggtaacccggttgggtaatgattccacgctccagcagctttgcattgaattgtgtcacgcaaagcccaattctgtcgc

SEQ ID NO: 22499 - DNA, 706 bp, DROSOPHILA
atgttaaaaaacaacaacaattttggagcctgcccccgcgaactgcaataaacaaaacatcgaaaccggaatcgaaaacgacaacagatagtacccgcgagaaagagctcccgccaacagaacaccaccaccgcctgtccaaccgaagtggccaaaaagaacaccacccatgttcccagtgctgctgctccttctcttcttcttcgccaaggaaacccaccagatcaatgtggactgcaacgagctccagatgatgggccagttcatgtgccccgacccggcgaggggtcaaatcgatcccaagacacagcagctggccggatgcaccagggagggtcgcgcccgcgtctggtgcatcgccgccaacgagatcaactgcacggagactggcaatgccacgttcacccgagaagtgccctgcaagtggacgaatggctatcacctggacaccacactgctactctctgtctttctgggcatgttcggcgtggatagattctatttgggctatccgggcatcggactcctcaagttctgcaccctcggcggcatgttcctgggccagctgattgacatcgtgctgatagccctgcaggttgtgggtccggcggatggctccgcctatgtgataccctactacggagccggcatccacatcgtgcgcagcgacaacaccacgtaccggctgcccagggacgactggtga

SEQ ID NO: 22500 - protein, 178 aa, DROSOPHILA
MFPVLLLLLFFFAKETHQINVDCNELQMMGQFMCPDPARGQIDPKTQQLAGCTREGRARVWCIAANEINCTETGNATFTREVPCKWTNGYHLDTTLLLSVFLGMFGVDRFYLGYPGIGLLKFCTLGGMFLGQLIDIVLIALQVVGPADGSAYVIPYYGAGIHIVRSDNTTYRLPRDDW

SEQ ID NO: 22501 - DNA, 3818 bp, DROSOPHILA
ccaaagtggtgccaaaaattggtcattagatttggcaaccattttacaagtggcttactcattaccaaagtaccgaaacactgcctagtccgagttgtttgtgtttagtatttatttacttactactaccgccttttgttttggcaaccattaatgatgggtcacggtgggcttaggaagctccattcgccgatccccgcctggcagtctaatagagctactgtccacggcaggtgcgaacacgctaatccagccataaagagactcccccggaaccaatcaaccatattgaccgttgggattgggactgggactgggcatgtgcctgcctgattggcttattttacaatttacaccagttgagagtggagtggcgtggagctggtgcctaactggttaactggctggctggctggctggctgggtgagagtgattctcggagccggcgctgctaaatgagccatgatcgctggaagaatgcgctgcccgtcaattagcgggcttccaaatctagcaccttgtcagagtgaaaggcttccggggaatcagtaggggatgggggtctgtgggtatacgacgcggttcgattcccagcactcaaagctgccaatggcgcgttttatacatttctatttgttggcctttgttctacggtggcattttagcatcaacacatacaggggtattgactccccatcgggcatatcggagctcttgactttaatcacactaattacgcaactaaaaggataatcgtgtcgctgaccgcacaagctccttaatgcgtttgtccaactttttgcgagtgcgattgtgtgtgtgtgtgtatgatccagtttccccaccccgatattttgtcataatcccctcgacttaacaagctcattaaatgaatgccaaaattaagcttaaagtcgtgtatttctcttaaagacattcgagtttatttaatggttgcggcaagaaactatccaattctaggtgaaaacaaatgagtgcttaaagtagcgaattcctctggcggtaagtcatactgaagcccgtctccacatcacgattcaaggtgaggtcatcgctggagaagtgcatcatgtagggtggcgaggctgcaaatagggaagccacatatcaggcgctgttccaacgaacattcccctttcgcaaaaccaaacactcaccataaaccagcaggttgtcgttggtgccgcagtagtaggtgggctggtaggccatgttcttggccagaatgctctgcggtatcatcaagtagtcctcctgtctgccagtcgtgtggacagtggcgtggcagaactcgtcgtagccctcgccggagtccgactgcaccgacattgaaaacttgctaaaggagtatctgttaagaaattaagtaggaattaaataagaattgcctttataagtggttcaaaaatgattaaatattaagttaattaaataattaatacgtggactaaatctatcccatagacactaattaactaagctatacttaatactctattctataggaagtattattacttctatcccattgaaataatattagtggttagactagatacttcacccagatgagtatataaagatttcgaaaagtagttagtagtaggagttttccctaagatgaaactcactcgatcatgctggcggaagtagctgatctgatgcagatgttgtaactcaagtcaggcatatagttgctggtcactgaagtctgaaagttgaagctgcgaatggtgcccgacagatcggtgtagtattgctggcagccgggcggcgcaagtagctcatagtcagcgtggtgcgaggcaaagatgtcccttagatcttgcagagaattggtggaggttcccaggccggtagatgtgctcgaacgccgtcggctattcgctggtggaccttccagctgggttacgatcaacctccacacgggtgctgttcctctggaggtcactacaaacgttagagtcacctgatcgactcccgcagccgcattgaagggcaggtacaggtgctggccatcgtttactccgcacaacttgaagccgcccgcctcaaagtagtcctggcactcgagaactccatccacatccgtcggctgctgcatcacgaactgctcaaaatcgattcgcaattgctgcacattgctgctaaaggcttcgatggtgtaggtattcaaatcgctggataaaacgccaggatttttgataatcgttcgcttctggcgcgtagaagagcccacttgaaggttggctacggaaaaaaagaactattagtttaacttaagagaaataataattcatataagtattcgtcgtcttaaggtattttcatacgaagttgttttaaatatctatacaattcagtgaattttaatgttatagcaactcattgaaaatgcaaatggctccttttacacgtttaaacacttgagagagagcaattacataatattctagtgaattcatgatcatggccaatatatctattgacctacttttaccgatcacacattttccatatcactttcttcaactcactttcacagcacacgccgtaggtgccgcagtatccattcactgtgcccgattgccgcatgcacttgaagcgtgtgagacaggtgccggtggtgccgctattggtgacgcagctatctgccaggacactcctccgtctggcctggcgccacatgccaggctcctgagcgacggccagagcaccgcttgctgtgtcattcagcgtttgcgcctgcgcaatggccaataatcccagcggaaacagcagcgtatatccaatcataatcctcggtttcactcaggttctattcacccacgcactttcacatcgactgtgtggatcttttgggggtcgcagcgcttatatagcacttcttgggaccgaagaatccgaagaagatacagcggcgctggcagcgatgcggtgatgagattttcgtgttagaagcaacggcgtgtcaatatttggtaagaagctcggttcgtcacctaccggcatgaatattcaagccaggctagttgcgcctattaacttgctgcttgctggccgaagttgccgatcgatcgagtcattgaacctcaacggagtgtccattactttgatcttagatctgtcaaaactgggttatgtttgcacactgtttttgagggaactgagagggctgactggctggctatctcattatcatcgccataaacgaagatgacaatcgatagtaacgatgatgatgatgatgatgacgatgacgatgatgtcaaaaagtgaaaagaggtaacaagtactgtagtgtgagtgattgagttgacaagaccccaattagagccaaattgcacaactaaaattgggactcagcttcgataaatgcagttccagctgagttctattcgtagtcgaaagttgtttaaaaagtatatatgccaatcaattgattgccacatttacacatttatctgataaggtaatttaatttgaaataaattggattttgaatgctgacatagttaaaagaaatataattaaagagggcaatggggaaatacctacatcattaacaccaaagaggaaacaataattatctaagttgaaaactcttagaatcaatagcttgatagctgaaaatggaaatgtcacaccattgcaagtttctggacaaagtcatactactcctttgtaagagtatacaaagctcttaagatcaaaatagcctaaatagattgccaagactttttcccactgatagagctattaaaaatatcatttccgtggctaaccaataatagag

SEQ ID NO: 22502 - DNA, 1179 bp, DROSOPHILA
atgattggatatacgctgctgtttccgctgggattattggccattgcgcaggcgcaaacgctgaatgacacagcaagcggtgctctggccgtcgctcaggagcctggcatgtggcgccaggccagacggaggagtgtcctggcagatagctgcgtcaccaatagcggcaccaccggcacctgtctcacacgcttcaagtgcatgcggcaatcgggcacagtgaatggatactgcggcacctacggcgtgtgctgtgaaaccaaccttcaagtgggctcttctacgcgccagaagcgaacgattatcaaaaatcctggcgttttatccagcgatttgaatacctacaccatcgaagcctttagcagcaatgtgcagcaattgcgaatcgattttgagcagttcgtgatgcagcagccgacggatgtggatggagttctcgagtgccaggactactttgaggcgggcggcttcaagttgtgcggagtaaacgatggccagcacctgtacctgcccttcaatgcggctgcgggagtcgatcaggtgactctaacgtttgtagtgacctccagaggaacagcacccgtgtggaggttgatcgtaacccagctggaaggtccaccagcgaatagccgacggcgttcgagcacatctaccggcctgggaacctccaccaattctctgcaagatctaagggacatctttgcctcgcaccacgctgactatgagctacttgcgccgcccggctgccagcaatactacaccgatctgtcgggcaccattcgcagcttcaactttcagacttcagtgaccagcaactatatgcctgacttgagttacaacatctgcatcagatcagctacttccgccagcatgatcgaatactcctttagcaagttttcaatgtcggtgcagtcggactccggcgagggctacgacgagttctgccacgccactgtccacacgactggcagacaggaggactacttgatgataccgcagagcattctggccaagaacatggcctaccagcccacctactactgcggcaccaacgacaacctgctggtttatgcctcgccaccctacatgatgcacttctccagcgatgacctcaccttgaatcgtgatgtggagacgggcttcagtatgacttaccgccagaggaattcgctactttaa

SEQ ID NO: 22503 - protein, 392 aa, DROSOPHILA
MIGYTLLFPLGLLAIAQAQTLNDTASGALAVAQEPGMWRQARRRSVLADSCVTNSGTTGTCLTRFKCMRQSGTVNGYCGTYGVCCETNLQVGSSTRQKRTIIKNPGVLSSDLNTYTIEAFSSNVQQLRIDFEQFVMQQPTDVDGVLECQDYFEAGGFKLCGVNDGQHLYLPFNAAAGVDQVTLTFVVTSRGTAPVWRLIVTQLEGPPANSRRRSSTSTGLGTSTNSLQDLRDIFASHHADYELLAPPGCQQYYTDLSGTIRSFNFQTSVTSNYMPDLSYNICIRSATSASMIEYSFSKFSMSVQSDSGEGYDEFCHATVHTTGRQEDYLMIPQSILAKNMAYQPTYYCGTNDNLLVYASPPYMMHFSSDDLTLNRDVETGFSMTYRQRNSLL

SEQ ID NO: 22504 - DNA, 5244 bp, DROSOPHILA
ggcacattgcggagattccacgtgtaggtggtgttcaggaaatcgctgtcatcctcgtcctccgtagaagaatacgtatcctcggcggcggccgctggcagtttcatgaaatataccgtgctgcccggctcatcctcatcgtcggattccgtgtcatcgctcgcctcatttgccggataattggcttccgatgcataatccgattccggcgtgacatccttcagcagctttgattgcttggcacctttcggtacatccacgtcctcagcatcctcctcccgaaccaacaccaaatcttcctcatcactgtcagtgtcacctgcctgttccccgttcctcagctcaaagtcaagggcatcctcgtcgtaggagaacttccgctgcacataggcctcctcctccccgacgtcatcctcatccacctccgattcactcattcggccaaaattctgcgacacggtggccaaagtggagcacaggattttcggtatttcggcaatggctgacaactttcgctgcatctccagcagacgcatctcgatggagctggctcgaatgcgtcctaaatggaatccattaaggagtagtggtattttggggttttcggggggtttctttttattaaagcgacaaaaacagacacgaaatattcaaaattatgtacaagtatgaaagagttagggaactctacacaggggaaaagcttcatctaaatcaagactatttattatctgagattgtaatttatagatagaacaattttgaacatttgaaatgcttcattctctatcttgaaaaagattctaactagtaatttgcagctataaattatatttaaagaaatttcatttcaaaatgtttacactgaactaaacattatatcttttacatatttggtgggtaataaaaacttttgactggcattttttctcagtgcaggtgtagggatgcgacagcttctgctgccagggataagccggttagctgggtgaacggctcctcacttggccttggaggcgctgggcagggccatcagcatgttctcaatggtgttcgtgcgcagctcctggttgtcgcccacctccgcaaagaatcgccggatgttccggatgatgcgatggtggggcagctcctggatcgcggaaggattacaccgggaggggcatggagaacacggagaacacggcggaaagaggagaatggaaaaacggaatgtgttaatttcgatggcagagttgttggcatgcaatcgtgtggttggttcacctgctcctcctcgtcggacgactcgtcctcgctgagctcaatgaccacctcgttgccctcgtcgtccagctgcgttttcgttttctttttcttgggcttcggcggctccggagggtcttgccacattatcggatgccaacaacgcgagccaagcaggggggttggggtgaattctacaaaaagatacaaagccaagtgagttcggggctctacacaggaaacaactggggactatgaaacctaatgactacatatttacattaattgttaattaattctgatacgaacgttatacatttaagacaagtgaattcttataaagcagttagaagagaggctgtaaatgagtttctttatttttcattctcctattactaagtatcattcaatgtattgtatttcattatttatggaagtttatttaatcttaattgaaaataactataagctgactgaatcatcttttaacttagatatatatttttctagcattaagtgatattttcttagtaacttatcaaacacacatcacatattattaattgcacttgggttattaatgaaagtaaaacattttcactacactttaatgtcagtaataaaggaatgggatggagctgtaggcgaatgaactgatttgggaagccatgcaaaaagtaagtactcaccactgggcggcggcaaaggctttggaacccgcatcacaatcgacttctcctccccagcctcaaactggcccatgggatcgtcctcctccatgctgcggggttatagagatggacagcagacagtagtttgctcattacgtaagttaaacggcctgaaagcctcccagacgcaccgcaggccaagtgcatctggggcaacctacttgcgcagcaggaaatgtatcttcttgggtgtcgagttgattttctcgtgggcctgggacagcgtcagctgcgaggcgtcctcctcgttgatctcgagtatgatgtcgcccaggcgaatgcccgctttgtcggccaggccgttgggggtaacctgcaaggaccacaaggatgtcgattgaaatcgagagcgttgcgatgtcgatgccgataccgaaaacgtaagtgaaagcgaaatcgtggcagctcctttcactttcagcagatgaaagagcagcaaaaaccgtaccgtgcgagtttcgaggcgcaattgaatggatatctgcgtactttgagtttaggttcagaaaatataagcgatgcgcgaacgacagatacagatgacatgtatacgagatgagctgactgaacggctgctcccaaaagaaaatggcccaaaaataatgaaaaaacaataacatctaaaagaaaacagacacaatgcggtgtttttaaagaaagcataatcaacttggcgtgtaccctataatagacatcccttgaaaaatataaaaatagatgaaataaatacggttcagaagtatattacatatgtgagaatttaatgtttaaagagcaagtttagctacgccaaactaggcattaagttcatcaaactcttcaaatgttaccctcaaaatgacttgaattcaaaaataaaacaaacaaaacaacaattgatatttttctttaagactaaacgcaaaacgtcaaaagtaaaatgttgcacaaaagccaaaagcaatactaatagttttgccttatgggaaatcattttgcatagatatacggtacagtgcgtaacatttttataagtgttgtttataatacaaatacaaaatggttatgactttgatttccaatacccataatcatgggatttctccagttgtaatgcgtgtaaaaatacttttattgatccgatattcgattgtatatctgcttcgacaaatatcttttatgacaaccagcgtatttattttatgtttgatgggaaggggtgttcggctaacccaaatattgtacattcactcgagactgaagtgggccaaaaagagcaaaacaggcggagacaagacacgccaactaaaaggctagaaaagacttgaagaccgaagactgagcactgaagaccgaacacgaagaccgaagacggggcgcggcaggtgcagatggaagaaacaataaaatgcccgcttctatttggcggcagccaatttgcattcgatgcgacttcgtcatagcataattggaattcaaatttgacgtgggctggtgggttgggttgttgtcattctggctcgcaaccaaaaattggaaacaatgacgaaacagcagttgcagcggaaagaagctacagtagatactactgcaagagtaactcaagccagttgattatcaataaaaattctatacattacgtatattgttcaaataattgaaaaatagaaaaaagattttagtcagcaggttttctcttctcaaaactcttcttaaaatcttaaaaatcaattaagcctacgatgtatctaaatcattttttaacttgaaataaacaccactaagcaaacgcatactatttaataccactagttatcaaccatgttataaattatcttcatgcggtgtaactttaataagtttgaagtgaaatgaggaattggtttatattgcaaatttctattgtatttttccctttcctggtggtttccggttatccagttcagcttaagtgccttagctaaaatttccaatggcccgagattgactgtatcaatataattcttggccaggcaccagatggtcccgttcccaagggtgaaccacccccatgccgacctcaagcttaaccacgcaactcacctggaagactgtcagcggcatatggaactcggctccgccggttatgaggaatccccaccggctgtcgtccttggtggcatacgcatcggagtcgacatcgaaggcgggatagccgtccgtatcgccgatgccgcaggacaccttgatgatgggcgcctttgacttggactccggcacggaccatagcagacccagttgttccggcatcgctttgtttacccgttctctggcgaagagataccggatctcttcctgctatccgctggttttatttataaattcgcactcttgccggcggcactcttgcttttctattctacctttccacttttatattgctcttttttttagcgctgcgaaagttttagttgctcttttttccgattgcttgtttgcgtttgcctgtcaaaattccgcctgtgcaaaaatattactcgacttttgccggcttttcaacacaacctgaaactcgcttactttcgaactttctattgaaagtgaaggaactagttgaatgcctgaactttgggtaattgtgcgacttatataatcagcagtcacgcattgcacaaccccaatctcattggatcttggcccgcaaagtggcgaaaagtacggaaactccgaaattgttgaataaccaagaataagcacgactatgagggataattatggaaagtgtatttaacgctttttttatgcctgctgcctggttcttttgtttttcttttttttttattgtattttgtggcttctctttcacttccacacgactgcactcgacttgggcaactaaaataattttcgagaagttttcctttgtggctgcattttttctattttccccattctctctcgcgcttttcctctgctcctcgtggtctgtttttcctttttttttttagataatgtgacgatgcaaaactgttgcattctttgttgctttttttttttgccaagtcgaagcgttttttgcttttgattaaagatcttctcaaatatacaagtttaaattcacaagtgcatttggtattcatagtcaaagcatcagctgttttttctctttccactgttattaagttattattcattgctcaacaacgagtattaattaaagctacgcatgcaagctagttttatattcaatcaagaaaaggaactggagatgaaagtaacagatgataccttataaatttatttataaaat

SEQ ID NO: 22505 - DNA, 756 bp, DROSOPHILA
atgccggaacaactgggtctgctatggtccgtgccggagtccaagtcaaaggcgcccatcatcaaggtgtcctgcggcatcggcgatacggacggctatcccgccttcgatgtcgactccgatgcgtatgccaccaaggacgacagccggtggggattcctcataaccggcggagccgagttccatatgccgctgacagtcttccaggttacccccaacggcctggccgacaaagcgggcattcgcctgggcgacatcatactcgagatcaacgaggaggacgcctcgcagctgacgctgtcccaggcccacgagaaaatcaactcgacacccaagaagatacatttcctgctgcgcaacatggaggaggacgatcccatgggccagtttgaggctggggaggagaagtcgattgtgatgcgggttccaaagcctttgccgccgcccagtgaattcaccccaacccccctgcttggctcgcgttgttggcatccgataatgtggcaagaccctccggagccgccgaagcccaagaaaaagaaaacgaaaacgcagctggacgacgagggcaacgaggtggtcattgagctcagcgaggacgagtcgtccgacgaggaggagcaggagctgccccaccatcgcatcatccggaacatccggcgattctttgcggaggtgggcgacaaccaggagctgcgcacgaacaccattgagaacatgctgatggccctgcccagcgcctccaaggccaagtga

SEQ ID NO: 22506 - protein, 251 aa, DROSOPHILA
MPEQLGLLWSVPESKSKAPIIKVSCGIGDTDGYPAFDVDSDAYATKDDSRWGFLITGGAEFHMPLTVFQVTPNGLADKAGIRLGDIILEINEEDASQLTLSQAHEKINSTPKKIHFLLRNMEEDDPMGQFEAGEEKSIVMRVPKPLPPPSEFTPTPLLGSRCWHPIMWQDPPEPPKPKKKKTKTQLDDEGNEVVIELSEDESSDEEEQELPHHRIIRNIRRFFAEVGDNQELRTNTIENMLMALPSASKAK

SEQ ID NO: 22507 - DNA, 2792 bp, DROSOPHILA
taactaggttttcgttcggcagctgtgacaacaggtgtttttttttttttttttgtgtcgctcactcattgagtaacttattttgtttgcgtttcacaggcaatggcatcgaggcgaaaaatctggagtgtgccgaacaaagaggaagctgttctgtggctttgggctgcgcacaacgaggtgaaccagcgcctggcaggcgatgccaccgaggatccagagttccccaagaagcaattcccagcgccggaaagctgcaacgaatgctaccgcacgcccgtctccaagtcggagaacttggagatcgaatggaacaaggacgccgtgctgggcttcctcaagaacatacacaatccgcagttcgttagccggtacggtgtgcagcgggaggagctgctgcatcccacggcggacaaaatgcggcagaagcgacagatctcaagtgtcttcaccgacatggatatgcggatgggcatgctgctgtacgccttctgcattgtgatgatggtgttggcatttaaattgttcgccttcaagggataccgcaagaagccctatggccacgatctcctgggcaaggtgtaggttaatccgcaggaaagctttcacatattctaaacaacaaagaaaagacaccgaacaccgagaaacggaatttaacacgccacctcattgcatgatttgtattcgtggcacctagagttatgattaagttaaaagtgtgtatatatatatatatattgtatgaacgaacagtcctcttccagttgtagtccctaacctaatcgctttttaccacgacgatgcacctgattgctttattcttaggcatgcaaatgtgatttttccctccagaagtgacagtttgaataaaaacgatcaatgctagacgaatgttcacaatgttgtacacttgttatgggcggtagcacttgtgataaggtgcgaacacagaaataatgcagataagaaaactgacaatagttgcgttgcgtgagttttatttaacgaatctctggaagtccggatgccaccagggcaatactttgtacttttcgatgcgatcgtgcttaacggttaccgacacatttcggcagccatcctcggcgaagtccagctctaggttcttggcccgcatatccgtgcagaggagttcccgggtggctcgcagacggtaacgttgctgctgagggccataggctagatggttggaagttggcacgaagtggcggcagataacaacaagcagaaccacaccctcgtggggattacaaaaagttggagctagctttgtcgcatcatcatccgccagggattcccagtcatttacgacttcgccggtgtgcgtctccgtttcgtcctgctcatgggactgtcggttccaaaacttgtagcacatgatccatagacactggtaatgcgtctgaaaacaggaaacaaagatgcgctgcaacatccagtccaggttatagcctagctccaggcgaaccttcagcggtcggtggcagtgaaagagcgccgcgatgacaagggatttaagcgcccgggtcttacaattgcgtatcgactccagctgcagctcggcgggcagattcagattccaaccagaggtggctccggtgcagtgacgccggtaaagattgcgccaaaaggcgcgagaagccaccagtctggaggtttgtttacatattagagcgaaggtctgtacgtcctccggatcaatgtgcatggatatgtggaaccaaatgtcataccgcatgctaatcacattgttgttgttgccctccgccatgggcaaagtgggtgcagtggctcggaatgtggacttttgcttcaccgcgacgcagacatccgattgccgggcatatatatctgagggtgaggtaaatttgcactgcaaattcggagcacccaagtgagcgggtcaacttaccacatttccctttactacggaatagtttgtttttaataaactcatcacaatcggcatcaaaactcattgtgttcggctctcgctggttcaacagctgttgtttgcttgcgagttggtcaggtggtgacagagttgttatccgacgcgaatggattaaaataacaattattagtctattttctatgttttattctttattgttatatatttgtaaacttcaaatagtatgcagaatacgaacgtcaagagacagtttgcttaaaaaagaaaacataaattttgattgaatttaatgttactttgttactatggcgcaagtataattatcaaaacaatttgtgttataaaaacaactgcataaagcaaaacttttgaaggagcttaagtagtttacaagctttagctatttacagttgatctagccagagatataaagcccagatctggtaactctgttcaagtgccatcaccggttggaaatctcgctaaatctagctagaaatagataaaacggtacaactgctaaaattgattaattgttaaaacaaaaatttcgtcaaagttcgttgataagactctcctggagttccgagaccataacaacgagcaattccgcacgaagcggtcacttaccgtccgtccaaatcagtgcgaaaaagcgactatcgagccgatcgtacaaaagcaactaccgtgccgtggggtaaagttcacagcacttttccttttgtccgaagtcgaagtcggattttgtcaccatggtcgacaacaataacctacgcagtgcggtgatcagcgatgccccgctactgccgccctcgagcagcatcggagtgggcgtttcaagcggcggaggata

SEQ ID NO: 22508 - DNA, 792 bp, DROSOPHILA
atggcggagggcaacaacaacaatgtgattagcatgcggtatgacatttggttccacatatccatgcacattgatccggaggacgtacagaccttcgctctaatatgtaaacaaacctccagactggtggcttctcgcgccttttggcgcaatctttaccggcgtcactgcaccggagccacctctggttggaatctgaatctgcccgccgagctgcagctggagtcgatacgcaattgtaagacccgggcgcttaaatcccttgtcatcgcggcgctctttcactgccaccgaccgctgaaggttcgcctggagctaggctataacctggactggatgttgcagcgcatctttgtttcctgttttcagacgcattaccagtgtctatggatcatgtgctacaagttttggaaccgacagtcccatgagcaggacgaaacggagacgcacaccggcgaagtcgtaaatgactgggaatccctggcggatgatgatgcgacaaagctagctccaactttttgtaatccccacgagggtgtggttctgcttgttgttatctgccgccacttcgtgccaacttccaaccatctagcctatggccctcagcagcaacgttaccgtctgcgagccacccgggaactcctctgcacggatatgcgggccaagaacctagagctggacttcgccgaggatggctgccgaaatgtgtcggtaaccgttaagcacgatcgcatcgaaaagtacaaagtattgccctggtggcatccggacttccagagattcgttaaataa

SEQ ID NO: 22509 - protein, 263 aa, DROSOPHILA
MAEGNNNNVISMRYDIWFHISMHIDPEDVQTFALICKQTSRLVASRAFWRNLYRRHCTGATSGWNLNLPAELQLESIRNCKTRALKSLVIAALFHCHRPLKVRLELGYNLDWMLQRIFVSCFQTHYQCLWIMCYKFWNRQSHEQDETETHTGEVVNDWESLADDDATKLAPTFCNPHEGVVLLVVICRHFVPTSNHLAYGPQQQRYRLRATRELLCTDMRAKNLELDFAEDGCRNVSVTVKHDRIEKYKVLPWWHPDFQRFVK

SEQ ID NO: 22510 - DNA, 3551 bp, DROSOPHILA
cggaaaaaatctaaggacgagtcagggagaacaaatgataaattattgagggattttcgttaatttgatgacactgatgatggccaaggccagattatcctgactgccgaattttgattgggccaaacagggaacagaagacatatctcataaaataatttgtaatgatttcaattttaatagatatagatatacttatgttcgattaaaatctttttgttataggcgtagaaatttaaatagcaccatatgtcagctaatcgagagtatttttataagcttatcaacataattttaccaatgtcttcaaagctaagacgatgaaatacacttttaatatatataatataatataataatataatataatataataatataataataatatataagatgttaaacggaatcccgtttttataaagtgaatgttttcaaactattacttatttccatatttaataagtgaaagttttctattttcgaattggtattaaagcaataagctgagtatataggtatttattttatacttatggcgtaaggcatggaaatataatttattgaaagtcaaattcttggtgtttttaacttaatgaactgattatacatattatttatcactcttattctttattttacttcttttttcgagagcattagtcgcaagtgcgtcttcgctagctttggaatgtgtactcgctaatatggaagtatgtacacactgcatagaatgaaaaaacgctatcttattccagaacctcaaatcttgtacagcttgaactcttttagacatgtttataaatggctgaagttgcttatgttaataggagtctacgattaactgtcagattccaataatccgatcaagtggcatcttttaatgcacaagtttaaatggtttgcctaacagtcacgataatatatatcaaatggttggcaacgcgatacgtagcattctgagttgacccgacaatgaactggtatctatttagtagccagttagtattttattggggcggtcacactgatccgtacccaaaaacaatcaaccgatgcgaaaagcataacaattcgaaagtttaaaattcggtcaagatgagcgcctattatcggcgcgcggcgttgcggaagaagagcccaagccgagggtcatccttcgagttggagatgaacgagtctggctacacatccttcctggcgctgcacaattccaccgcggagacgccatttttattggaggacgctgagggcgaaaactgtcgcaatgcatcgaataccacaacattctttcgggggctgaacacgcccagtggccaccaggagcaggacctttactggggcaagccctatcccagaacacagccccaaaagaaattttccgcggaggaggagcctttctctatgactccgcgtctgcaggatgagcatagtctgcccaagcgacgcaagaaacactttcaatcgccacacagtagccccaagaagtccaaaaagctgctctttccccacatagaagaaccgcccaagaatcgcttctacggcggtgtcgaaaagctggatatcgtggccaagctggcgcaatggcaaccggcactgcagtgcatactgcgtcatgtgggcgcccacacgctggacgtgatgaccaaggtatcgccggcctggaagcaggctgtttatcgcagccaacgcgacttggagcgcctacagaaccaccgactcaaattgaatctaaccaaagagaatcctcacgtgcccaagcggtgcagccatgtgcccaaggcaaaccacacagtgccattgcagacctcgaaccatagcagcctggccaacagcgccgcctcgctaatggactcgggcaactcgagcatccacctgatggacgtggatgccggaagggtgctgcgcgagcagacgcagcgcgtcaagtgtccgcgatgcggtcgaggcagccgggttttcataagcgaggcggccaagtgtggcgaaaacctattgtcgcaaactctgcctattggacgtacaaccagcacattcccctgcatgacgggtccgcctctcaaacgcttcctgtccctggatcttgacgaggtcaggacttcaccgcaaggaccgccatataacttcgccgaatgcaccagtgtcatctgccagtttcggttctgcgtcaactgtctgtgcaagtcgcatcccggcgagcgttgcctggtcaccgaactggacacaccatccaaactgatgatgccacgggagcgactgacgccgccacaacgtgcccagaaccgtgatccgaaaatcacaaggaagaactcgctcaagcggctctgcttttagctttatcataggcttttaactattacgattagtattcgatttttttaaatctcattaatttcgtattatgtccatcgcattaagttccatttcatcacgtacattcatatatatgtttttaaatcgttccatgtaaggtttgtcggaattctgtacctctgcgagattaagtattttttacacatgcaaaatatataaatcatttttagaactataattgttataattataactgggggaaagtgattcctgtttattaacatgtaaggctttgttattatacatcattataacaggcttcaaaggcagccttaatatgttaggcaagtcttaaaaatattttattattattgattgcattgcataaaataaattcaaacagaaaatgtttaaaatcagctgtagtatactggtttgggtcttggctaacgccaatgcgcgctatttaccgtaagctactttgtgtactgccaagagatctttggccacaccaacaaaacacgtgtggagtgcggttgccgcacatttattgttctccgtttttacctttaattaacttgagaaaaaaggaaaaaacgatcatccaaaatgagtactgcgttggcacagcagctgcagaaactggctgcgccgcagtcgtcggtaactttggcagatgcacgaagtcgcgcctccatactcttcgatcccaaggaggcggccaccaaggatcggcggtccatttatgagatcgggttaacgggactgcaggagctgaccgactttaatccggccttcaaggagttccagctaacgttgttcgatgaggccacattgacgctggagcgttccgtggagctgccggagattaacaagatgctggacgcggccattgcaaagtttctgcgccttctttcgccgtaccttctgctccgccccgcacacatggccttcgaatggttgctgcgacgattccaggttcacgagtataaccgtagcgaagttatggccctgattctgccctatcacgagacaatgatctttgtccagatcgttaagaccatgaggctccggtcatcggatggcgactggtactggctgcgcccgttgcagcgtcctggcgttccgctagccaagactgctattattaacagagccgccagcaatcccgccttcctcggcttcatctgccaaagtacccagaaggcggttaaggaactgggtcctcgagcccacca

SEQ ID NO: 22511 - DNA, 1551 bp, DROSOPHILA
agttagtattttattggggcggtcacactgatccgtacccaaaaacaatcaaccgatgcgaaaagcataacaattcgaaagtttaaaattcggtcaagatgagcgcctattatcggcgcgcggcgttgcggaagaagagcccaagccgagggtcatccttcgagttggagatgaacgagtctggctacacatccttcctggcgctgcacaattccaccgcggagacgccatttttattggaggacgctgagggcgaaaactgtcgcaatgcatcgaataccacaacattctttcgggggctgaacacgcccagtggccaccaggagcaggacctttactggggcaagccctatcccagaacacagccccaaaagaaattttccgcggaggaggagcctttctctatgactccgcgtctgcaggatgagcatagtctgcccaagcgacgcaagaaacactttcaatcgccacacagtagccccaagaagtccaaaaagctgctctttccccacatagaagaaccgcccaagaatcgcttctacggcggtgtcgaaaagctggatatcgtggccaagctggcgcaatggcaaccggcactgcagtgcatactgcgtcatgtgggcgcccacacgctggacgtgatgaccaaggtatcgccggcctggaagcaggctgtttatcgcagccaacgcgacttggagcgcctacagaaccaccgactcaaattgaatctaaccaaagagaatcctcacgtgcccaagcggtgcagccatgtgcccaaggcaaaccacacagtgccattgcagacctcgaaccatagcagcctggccaacagcgccgcctcgctaatggactcgggcaactcgagcatccacctgatggacgtggatgccggaagggtgctgcgcgagcagacgcagcgcgtcaagtgtccgcgatgcggtcgaggcagccgggttttcataagcgaggcggccaagtgtggcgaaaacctattgtcgcaaactctgcctattggacgtacaaccagcacattcccctgcatgacgggtccgcctctcaaacgcttcctgtccctggatcttgacgaggtcaggacttcaccgcaaggaccgccatataacttcgccgaatgcaccagtgtcatctgccagtttcggttctgcgtcaactgtctgtgcaagtcgcatcccggcgagcgttgcctggtcaccgaactggacacaccatccaaactgatgatgccacgggagcgactgacgccgccacaacgtgcccagaaccgtgatccgaaaatcacaaggaagaactcgctcaagcggctctgcttttagctttatcataggcttttaactattacgattagtattcgatttttttaaatctcattaatttcgtattatgtccatcgcattaagttccatttcatcacgtacattcatatatatgtttttaaatcgttccatgtaaggtttgtcggaattctgtacctctgcgagattaagtattttttacacatgcaaaatatataaatcatttttagaactataa

SEQ ID NO: 22512 - protein, 411 aa, DROSOPHILA
MSAYYRRAALRKKSPSRGSSFELEMNESGYTSFLALHNSTAETPFLLEDAEGENCRNASNTTTFFRGLNTPSGHQEQDLYWGKPYPRTQPQKKFSAEEEPFSMTPRLQDEHSLPKRRKKHFQSPHSSPKKSKKLLFPHIEEPPKNRFYGGVEKLDIVAKLAQWQPALQCILRHVGAHTLDVMTKVSPAWKQAVYRSQRDLERLQNHRLKLNLTKENPHVPKRCSHVPKANHTVPLQTSNHSSLANSAASLMDSGNSSIHLMDVDAGRVLREQTQRVKCPRCGRGSRVFISEAAKCGENLLSQTLPIGRTTSTFPCMTGPPLKRFLSLDLDEVRTSPQGPPYNFAECTSVICQFRFCVNCLCKSHPGERCLVTELDTPSKLMMPRERLTPPQRAQNRDPKITRKNSLKRLCF

SEQ ID NO: 22513 - DNA, 3039 bp, DROSOPHILA
cgagaatatctttgtgtaaaatggttagaatgcaaagcaatagaatttcgcatatgtgcaacttaaggataatcaacgaaaaatgttttgtttcaaagttggccttgaaaaacctctttgttgttgcaaattacaaaaaaaaatatatatatatttttttttttagtgcatatatttcatattattacatatttaatatacacatttaataatgtttttggatcagtcaaagaaaaaccagtggaataacatactgcaagagtatgaaagacaagtggaggagcagaagcaggaaatctcgccggcagaggttaaaaataaattactgacccccaattggtattggtatcgttatatagacgaacagatcgttccgctaccgttgagccgtagtttggtacaggtcgccgaacccgagttatcatcgcccatctccaatacgtcaaaactttgtatttcggaaagcagtggtcttattgtcgccagtacgtcgagcagcgagagaatcacatgtcctccgccaccgttaatgttacccaagacagttgatgccgatttcgcagacattttggacatttcacgacaaagacgccatcgaaggatatgcacgtcctttagcatcaatgatattccacttcaaattgattgccctaaggtggatcccatcttacgagccggcggcacttttcgtgactatgagattatctggaaaccgatgagttccaagttggacgaatcgtgtgccgagaacattttaagcagatgcacaagacggatgagtaagttccgcaacaacctcagctacaattaatcgattaatatatattcagataataatgaaatcatgtggaaggcgacaaagatgtgctggttcgacgatctagagattcagattgagtcgaggttctttttcgtaagccatattttgttcacatattttgcgagaaattttcgcaaaatatcgagtcagtttttgcaaatgccagtgcaaaaaatcgatatggccgttttaatacgcatctacgaatggatgctgaacgaggagaaaacctttgtcgttggccaaaatctaatatcattctatgccgcagcccattggctgggcgttcaccaattgataaaacaggcctggtccaccttttcggcagatggagtttatgacatttgggaaataaatgcctttcaagcctacatcatggccaaggattatcgctgcccggagattatgattgtaatgcaatcgcgtttgcgaaaatgctttctaccaattgtggcatcttgggagtttctcgaattcgatgtgaatgaagtgaccactttgctggaacaagacatgctgtgtgttaatagtgaggatgagattttcttcgccgtctttcactggttgaattactcctggacggaacgcaagaagcacgcggtcaaggtgatgcaaaaagtacgttttggactcctgtcaccctggttgcgtcgatccatttgtaatatgcccgaaaacgatcgcatcggcgaaattggccaattaccggaggtaatgagcggttgattggttttgggaagacgaaacaattcgattgatatttgaaagttgcattttcttctataaatctggattattaattgtcttacagatttgctccttgatttgggagggtacacttttgtgtcaggcgatcattgccattggacagccggaatatcgaaggtcgagactggttcgtcgcatgttaagggacttcgagcacaaaaggatcacggaacggtcttgggtgttctgcgagggagttccgcatcatcatgataagaaatgtgcacgatatcgagagttgacatttgaaagctttaagagattcctccaccgtctgcacaccaattcggatatctttatggagagcctgaaggctgtgcccaataagatcactaacacttaccgctgctgcatagacgccaacttttgtccatcatacaaacgaacctgtcccatggcgccattctataggacgcatttggatcttgacaattggaaatatcgcaattaaataataaaattcaattttatagtgcttacagtttgcaaaaatttgaattcaatgtatttaaattaaaagatataacaatatactgtttaatagatgatgcgtcatctatgtattgtatatctccaagttgcagttttctaaaagttttaaatgtatacactattttattgccaaaaaaagtgattagccatgctcgttgccaaagtcgttaaaacttatggatctaacttcctggccaaaaggtttatcataatagctcattggactacgatctgaatgctggacgcgtcaccaaccgcagagtccgtggtgtgcacgctaaagctatcatctatgctctcattaaatccggcaaactggcgatcatcgtcattcgatccttgattcggattgtaattgctattgtcctgggtatgctgatcaatcatccgtacgttttcatcggtgtagttcaaaatgcaacgacctaagcgacggagatataacttctggtcgagatacattttcagcaatcccttaattccgatataggcaataccaccgagtatggtgcgctgcagtgcatcgtccagcctaccgaagaacacatttcccaccgttgtggcaaaagttggtagaaaaaatgctccgcaaatgagacgagagatgtagaagggttcggtgatggacggattatgttggattggtggcaaactgatcgaactgctcgaactgacgctcaagtcatccaagtcacccaagtcacccaagtccctcgatgcaccttccgactgattggtcctgtggaaaaagggcaatttgcgcggaatgtatatatatatgctgcgcatggccttcaagacggcatctttccatcgcaccagccggaataggatcaatcccaccggtatgaagggtaaacccactagcaggatgactttattctccatcaactgcattgcgcgatcttgacccaccacctggatgatagtgaatgctccgtatgtaagggcaatccagt

SEQ ID NO: 22514 - DNA, 939 bp, DROSOPHILA
atggccgttttaatacgcatctacgaatggatgctgaacgaggagaaaacctttgtcgttggccaaaatctaatatcattctatgccgcagcccattggctgggcgttcaccaattgataaaacaggcctggtccaccttttcggcagatggagtttatgacatttgggaaataaatgcctttcaagcctacatcatggccaaggattatcgctgcccggagattatgattgtaatgcaatcgcgtttgcgaaaatgctttctaccaattgtggcatcttgggagtttctcgaattcgatgtgaatgaagtgaccactttgctggaacaagacatgctgtgtgttaatagtgaggatgagattttcttcgccgtctttcactggttgaattactcctggacggaacgcaagaagcacgcggtcaaggtgatgcaaaaagtacgttttggactcctgtcaccctggttgcgtcgatccatttgtaatatgcccgaaaacgatcgcatcggcgaaattggccaattaccggagatttgctccttgatttgggagggtacacttttgtgtcaggcgatcattgccattggacagccggaatatcgaaggtcgagactggttcgtcgcatgttaagggacttcgagcacaaaaggatcacggaacggtcttgggtgttctgcgagggagttccgcatcatcatgataagaaatgtgcacgatatcgagagttgacatttgaaagctttaagagattcctccaccgtctgcacaccaattcggatatctttatggagagcctgaaggctgtgcccaataagatcactaacacttaccgctgctgcatagacgccaacttttgtccatcatacaaacgaacctgtcccatggcgccattctataggacgcatttggatcttgacaattggaaatatcgcaattaa

SEQ ID NO: 22515 - protein, 312 aa, DROSOPHILA
MAVLIRIYEWMLNEEKTFVVGQNLISFYAAAHWLGVHQLIKQAWSTFSADGVYDIWEINAFQAYIMAKDYRCPEIMIVMQSRLRKCFLPIVASWEFLEFDVNEVTTLLEQDMLCVNSEDEIFFAVFHWLNYSWTERKKHAVKVMQKVRFGLLSPWLRRSICNMPENDRIGEIGQLPEICSLIWEGTLLCQAIIAIGQPEYRRSRLVRRMLRDFEHKRITERSWVFCEGVPHHHDKKCARYRELTFESFKRFLHRLHTNSDIFMESLKAVPNKITNTYRCCIDANFCPSYKRTCPMAPFYRTHLDLDNWKYRN

SEQ ID NO: 22516 - DNA, 8527 bp, DROSOPHILA
cgtcaagtgtccgcgatgcggtcgaggcagccgggttttcataagcgaggcggccaagtgtggcgaaaacctattgtcgcaaactctgcctattggacgtacaaccagcacattcccctgcatgacgggtccgcctctcaaacgcttcctgtccctggatcttgacgaggtcaggacttcaccgcaaggaccgccatataacttcgccgaatgcaccagtgtcatctgccagtttcggttctgcgtcaactgtctgtgcaagtcgcatcccggcgagcgttgcctggtcaccgaactggacacaccatccaaactgatgatgccacgggagcgactgacgccgccacaacgtgcccagaaccgtgatccgaaaatcacaaggaagaactcgctcaagcggctctgcttttagctttatcataggcttttaactattacgattagtattcgatttttttaaatctcattaatttcgtattatgtccatcgcattaagttccatttcatcacgtacattcatatatatgtttttaaatcgttccatgtaaggtttgtcggaattctgtacctctgcgagattaagtattttttacacatgcaaaatatataaatcatttttagaactataattgttataattataactgggggaaagtgattcctgtttattaacatgtaaggctttgttattatacatcattataacaggcttcaaaggcagccttaatatgttaggcaagtcttaaaaatattttattattattgattgcattgcataaaataaattcaaacagaaaatgtttaaaatcagctgtagtatactggtttgggtcttggctaacgccaatgcgcgctatttaccgtaagctactttgtgtactgccaagagatctttggccacaccaacaaaacacgtgtggagtgcggttgccgcacatttattgttctccgtttttacctttaattaacttgagaaaaaaggaaaaaacgatcatccaaaatgagtactgcgttggcacagcagctgcagaaactggctgcgccgcagtcgtcggtaactttggcagatgcacgaagtcgcgcctccatactcttcgatcccaaggaggcggccaccaaggatcggcggtccatttatgagatcgggttaacgggactgcaggagctgaccgactttaatccggccttcaaggagttccagctaacgttgttcgatgaggccacattgacgctggagcgttccgtggagctgccggagattaacaagatgctggacgcggccattgcaaagtttctgcgccttctttcgccgtaccttctgctccgccccgcacacatggccttcgaatggttgctgcgacgattccaggttcacgagtataaccgtagcgaagttatggccctgattctgccctatcacgagacaatgatctttgtccagatcgttaagaccatgaggctccggtcatcggatggcgactggtactggctgcgcccgttgcagcgtcctggcgttccgctagccaagactgctattattaacagagccgccagcaatcccgccttcctcggcttcatctgccaaagtacccagaaggcggttaaggaactgggtcctcgagcccaccaactgcaagcccagatcaacttctatgccaccgtcgtagttggcgccctgcaaacggccaaaccactgcaggactggcacatcaccactattctggagtcgctgcttcgtggcctgatttccgataatatcgactttatggcggccgcctatgtgatcgttgctcagcttgtttcccgcaccaagctcaagagcaaggtgtgcaatgccctgctggaacgcgtggccaactgcccgtttgagaggcttcacagtgagtcgctgctcctgcttgtctgcatctatggcaaacagcaagccgcattgccgcactttaagccggaaaccatactcaatctggttgggaagaagtggcttatctccactctgtcctccctggccaaaggcaacatcgccatccagtctatctgcatgccactcatgaccggagccgtggccgccattcgggacgatgacgcctcttctaactcatgcaaactgttcttggacaacctgctgtcagaggtgccaatgccaaagccgactgctcagcaactgatcaagtgagtactagaagtatcgatcgaaaataataaaaataagagtttatacacttgaatttaaaacgattcagctgttccgatttaaataacatatatactttaaccatttcagttgctttttggatacttatgtagagactgcgatcgatgcaccagagcccatggaaactaactcaaacgaagatgacgataccattgtaattgattcggatgatgagatcgagacggaaaagaccacctttcaagcctggtattccacttacctcgagaagctggagagacgctatccagaagcttttgatctgagcgttaaagaggccttgagatcgaaatcctccacaagcaatcgccagaaggccttaaagttggctttgggtaagtaaaaaataataatatttatatatttattgtatataatgttttattcgattgaaggcttccgtctcaacactactgatgaaaaagcgaagcacgcctacgaaaaactataccactacagcgctgactggcgacttagtgctgttcagaaactactccagaatttgaatgtgactaaaaagcgggagagaagcgttaagcttctgcaggaatgtctgcccgataggataaatgatgatagcggtgctgtggtctcaaccttgctatcattgcctaccgaagagctcgccgagatgttgggtccgttgcctctggctcaaaccctatgtcatctgctgtatcgtgctcagtccgaaaaggatgaggaatggcaacctgtggttcccctcgctgttcgtcacttgacctctgccttggtgagcggaagctatgacacaaatttggtgctattagcgctgatgccgcttctcttccctggcgaagcattagctgaacatcagcacaaggctctgcggattctacttggcagtgattttgtcagtaaagttccgttcttggcagaacttaaagtgagcaacaaattcagcgactttaatgtcggtgagcaccgtcagcacttcctggacatcatagcgagcagcaatcaggaactgagtagtcaggaacgtgcgttgctccaaagcgtagaagatcatggcggtgagttgtacattcagaaagcctcccagctgacgcacctgttactcctgctaactgcctacgccaagagggaactacagcctcgggaaagccttcacatgctggagaaaattgggctttatagtcggcgcctccagttccgtgtcgtcaatggtagtcaaaacacacagaattgtgcacctctacaattgtatgtggatttcctattgactttggttaagaacaccaaatggacagctctagcatccactccttggaatcagatgaccgatgagcttcgcctctgtctgcgcctgctggaaataatatgcgcccaagtgttttcggaaaaagctgatcagccagagcgtcaggagtggacacgagccctgcagcaaagtttgcaactaatcctgcctgaagctcaagacagattggaagtgctatcaaacttctatgtgttcgagcgactgccagaattgtggcctcgagactctgactatgccgtgttccggttgcaagggtttattattctagaagcggtgctgtccaatccgaaatcccaaatagactgcggtctggttcatgtgctgcgggtggccaacgcctgtggatctcccttacaaactctgcgagtgcaggccattaacattctgcaattaatcagtaatcgcaagctggtgagccatgtggagcaattggtgcgttcgctgctgcagcgcaagagtgagttgagcatggatcatgaacaatatgccctgattctatacaccattctggaaccagagaaggcaactgccaaggaaagactcgtgctgtcaaaactgaaacgatctgttttggctttggcctccgatccgaagcagtctcccatttgtacggcgtctttgcttgcggccctaaagcacgtcaacgatgagaatttcttaaacgaattgctgccgctgggtcttgactccctgaagacgataactgcgggagaagacaaccagaatataaaacagctgccatggccacatagcgaaatctacaagtcggtgatagaaaggtttgaggggcgtgttgcgctgaatgtattgctgcgaaaggatctggcttggaaattgtttgaagacagcttcgcccagtatgacacctatgtccaacttgaacagaagctacagcctcttccctgcgtcctgctaaacagcctcacgccggagacctttgagcaaatgcatgccaagcacaagattgctctaatcaagctgatagtggagtcggctaccaattcggacaatgacagcatattcttggctagccatcgtttgctgaagcgctgccgtttggattgccagccactcgtaccgatcctgttggagatggccaacaccaaggtggagaagaaacaacccgtcaaacgacgatcagtacaggcaacccaactggatctaaccagcccatactggaagcagggaatgacccttctcgagctgttggagcacaagaaacagctggttggagcggagctgctgatcccaccgctcttcgaacttctacaggcctgtcttacgatggaagagcatagtgccgccgagtatcccaagcagctgattctctcaagcttgctgcactgctgtcagacggcacagtcggccggtgtgcagctcgttaaggctatgcctgaatctagcttccgcatcgagctggtggtgcaatccttgaggaatacccgaaatccgcagacccagcagcatgcgctgcttttcctgactcactgtgctggcatgtatccgcaacaagttctacacaagatcgttgaaatctttacgttcgttggatccacggtggcgcgacacgacgatgccttcagcctgcatataattcacaatgtggtggagtcgattatacccattctgcttctgaataccggacataatgagctggttatacccgtgcttaaggtgttcgctgatatttgcacggacgtgccggtccatcggagattgccattgtatgctaccctgttccgagttctggagcccaaggagcacctttggcagttcttgtgcattatctttgagtctcaagtgcttctggagcaagttccacaaaaagtgtccacagacaagtcgcggctggactttgcccgtgaactgacgttgatgttcgaagatccgacggtcgcaattcagacgtgcatccgtctattggattacttggccaagttgccggcaaccaaaagcagtctttcgggtggatcaggctcctctgtgctaagcacggaacaacagctctttgatgttcggacacggacgttcaagcaactgcggcactacaagtacctcatcatggacttcctttctggaattagcagctgcaacgaatgggagaagaagatgaagcgtcctgatcccaacgagctacttccgtattatcaggaattcatcctaaagacactcgcgtatgtgggcgtacttaatggagcattggaagcagcctccgaaacgccttctctggaaaagttctggcgcgtgctagctaaccatgcacacgatgtcttggataacgccatcggtcttttggcaccgcaacatttcatcagtgtgataaccgagctactgaagcatgatcatgtgtatgtgcgcattaaggtgatggacttgttggtgaccaagctaagtccgtcgagcgattacttccagcaatccaacgctgaacactttggagtgcttttcgctcctttgcaagagattatcaacggaatcctcgagggcagttccaacagtgcgcagcaggcgaagcttcaacagactgcgttgcatgccctacagttgttggccctccgtcacggacgcgactacatcgaggagtgtcgctctcttctggccaccttgaccaagatcaccaaacgacgtgcgaacgtgcccaaggcggtagtgggcaatgtggtgctgaccctcgtcgaaatttgcgcaagtcttaaggcccatgccttggcccaattgcccaagttcgctccccaacttactgagttactgaaggaacaggttcaccaaatggcctccctcaaacaaggaccagattacgtctgttccacccttgtcacaggtaagacacgaacaaatccatttggaaatatttcttaactaatgttccaactattctattgtagcactccacaagctcttcaaggcgttgccgcttttcttgggaccctacttggtggacattatcggaggcttggcgcgcctttcagtgcaattggaaaatccacagctgctgcaggataagcgcacacaggtgcttaagcagaaacttgcggacgtttggagtgcagttgcccagggcgtcgaggtgcgcattcttgtgcccagttgcgccaaggcgttctccagtctattagagcagcaagcgtacgacgagctaggacatctaatgcagcagctgttgctgcagagcgtccgacacaattcagccgctcaattgcaaccggttcaggatcccctaagcgagctcttcctgcaagcactcaacttccggctgcaagtgcgtggacttggtttgcagaggcaattggtttcggatgtagaggcttccataaccgagacctttgtgacgtggatcctaaagttgtcagagaccagtttccgtcccatgtactctcgggtacataagtgggcactggagagtacctctcgggaaacgcgtctcacctacttcctgctgaccaaccggatcgccgaagctctaaaatctttgttcgtgctatttgccagcgatttcgtggaagactcttcgcgcttgctgacggagcacaactcaatccgtcccgagttcgaagtcgaagaaagggaagatgatgtggacctgttaatggcaatactgaacactctgcatcatgtgttcttgtactgcagcgaggacttcattaatgaccaccgcttcaacgtgttaatgccaccgctggtcaaccaattagaaaacgacctggtattgggaaatgagtcgcttcagcaagttctcagtaactgcattgcccagtttgcggtggccaccaacgatgtgatgtggaagcagctcaacagccaagtgctcctaaagacacgcacatccaatcccgaagtgcggattctggcattcaacagttgtgtggctatcgcgcgcaaactgggtgaaagctatgccgccctgttgccagagacagttccattcatcgctgagctcctggaggacgagcatcaacgtgtggagaagaacacccggactggagtgcaggagctagaaactattttaggcgagtctgtgcaaaagtatctataattatgggagaagacttctccaaatgtaaaagttatgtactctaatactgtcataaaggaatctattattacatttttaaaatatgatatttcagtcataatcaataagatggccaaacaatctgtataacttagttaaagaattcgctgttcattaacttactcatttattcggaatgcagaatccgcttaatctagtgtacaataagaaaacaaccaacattattcttgacacaacaagtggagcgaatcggaagcgggactatgtgttgtatgtgtaggaaatgctggggatgtgggcgttgttgagcgtgttgtcgtgcgtctccttgtcctcgggtatctcgggatcctcgcgctcctcctcctcgtcgatgatgctgatatcgcgaatggatggacggtggctgcgtcgccagccactgaggtcctgaggctgcttggtcttggtcagcaacttcgtgcccgtcaccgagatcattatcgctcccagcggagcggtcagaacgatgctgaacacgcagatcgtctgcacaatgttcgcccagttgcgttcctcctcggtggcgtcgtctccgagatgctttagggccaccggaccgagggccgcctgcaccgttgccttggccatccacgacagtcccacaaagaacttctccttggtgttgaggcgatctccgaacgcaatacccgccgtggtaagtatacgcaaaatggcgcccgtaaaaatgcatgccgctccgatagacaccgtgtgtgagtccagctcgcgaatcttaatggtggcaccggtcagaccgaacagaattggctcgaagatcatccagaaaatctcgaaggcggtggacaccgggttgtcctccacgtcccagccatccttgcaccagaacagattcgaaacgaaggccgagaagacgacagccaggggaccggctccctcgaatcccagctcttcgctgccataaatggccatcagtccgccggtgaagagcagcagcgtc

SEQ ID NO: 22517 - DNA, 6291 bp, DROSOPHILA
atgagtactgcgttggcacagcagctgcagaaactggctgcgccgcagtcgtcggtaactttggcagatgcacgaagtcgcgcctccatactcttcgatcccaaggaggcggccaccaaggatcggcggtccatttatgagatcgggttaacgggactgcaggagctgaccgactttaatccggccttcaaggagttccagctaacgttgttcgatgaggccacattgacgctggagcgttccgtggagctgccggagattaacaagatgctggacgcggccattgcaaagtttctgcgccttctttcgccgtaccttctgctccgccccgcacacatggccttcgaatggttgctgcgacgattccaggttcacgagtataaccgtagcgaagttatggccctgattctgccctatcacgagacaatgatctttgtccagatcgttaagaccatgaggctccggtcatcggatggcgactggtactggctgcgcccgttgcagcgtcctggcgttccgctagccaagactgctattattaacagagccgccagcaatcccgccttcctcggcttcatctgccaaagtacccagaaggcggttaaggaactgggtcctcgagcccaccaactgcaagcccagatcaacttctatgccaccgtcgtagttggcgccctgcaaacggccaaaccactgcaggactggcacatcaccactattctggagtcgctgcttcgtggcctgatttccgataatatcgactttatggcggccgcctatgtgatcgttgctcagcttgtttcccgcaccaagctcaagagcaaggtgtgcaatgccctgctggaacgcgtggccaactgcccgtttgagaggcttcacagtgagtcgctgctcctgcttgtctgcatctatggcaaacagcaagccgcattgccgcactttaagccggaaaccatactcaatctggttgggaagaagtggcttatctccactctgtcctccctggccaaaggcaacatcgccatccagtctatctgcatgccactcatgaccggagccgtggccgccattcgggacgatgacgcctcttctaactcatgcaaactgttcttggacaacctgctgtcagaggtgccaatgccaaagccgactgctcagcaactgatcaattgctttttggatacttatgtagagactgcgatcgatgcaccagagcccatggaaactaactcaaacgaagatgacgataccattgtaattgattcggatgatgagatcgagacggaaaagaccacctttcaagcctggtattccacttacctcgagaagctggagagacgctatccagaagcttttgatctgagcgttaaagaggccttgagatcgaaatcctccacaagcaatcgccagaaggccttaaagttggctttgggcttccgtctcaacactactgatgaaaaagcgaagcacgcctacgaaaaactataccactacagcgctgactggcgacttagtgctgttcagaaactactccagaatttgaatgtgactaaaaagcgggagagaagcgttaagcttctgcaggaatgtctgcccgataggataaatgatgatagcggtgctgtggtctcaaccttgctatcattgcctaccgaagagctcgccgagatgttgggtccgttgcctctggctcaaaccctatgtcatctgctgtatcgtgctcagtccgaaaaggatgaggaatggcaacctgtggttcccctcgctgttcgtcacttgacctctgccttggtgagcggaagctatgacacaaatttggtgctattagcgctgatgccgcttctcttccctggcgaagcattagctgaacatcagcacaaggctctgcggattctacttggcagtgattttgtcagtaaagttccgttcttggcagaacttaaagtgagcaacaaattcagcgactttaatgtcggtgagcaccgtcagcacttcctggacatcatagcgagcagcaatcaggaactgagtagtcaggaacgtgcgttgctccaaagcgtagaagatcatggcggtgagttgtacattcagaaagcctcccagctgacgcacctgttactcctgctaactgcctacgccaagagggaactacagcctcgggaaagccttcacatgctggagaaaattgggctttatagtcggcgcctccagttccgtgtcgtcaatggtagtcaaaacacacagaattgtgcacctctacaattgtatgtggatttcctattgactttggttaagaacaccaaatggacagctctagcatccactccttggaatcagatgaccgatgagcttcgcctctgtctgcgcctgctggaaataatatgcgcccaagtgttttcggaaaaagctgatcagccagagcgtcaggagtggacacgagccctgcagcaaagtttgcaactaatcctgcctgaagctcaagacagattggaagtgctatcaaacttctatgtgttcgagcgactgccagaattgtggcctcgagactctgactatgccgtgttccggttgcaagggtttattattctagaagcggtgctgtccaatccgaaatcccaaatagactgcggtctggttcatgtgctgcgggtggccaacgcctgtggatctcccttacaaactctgcgagtgcaggccattaacattctgcaattaatcagtaatcgcaagctggtgagccatgtggagcaattggtgcgttcgctgctgcagcgcaagagtgagttgagcatggatcatgaacaatatgccctgattctatacaccattctggaaccagagaaggcaactgccaaggaaagactcgtgctgtcaaaactgaaacgatctgttttggctttggcctccgatccgaagcagtctcccatttgtacggcgtctttgcttgcggccctaaagcacgtcaacgatgagaatttcttaaacgaattgctgccgctgggtcttgactccctgaagacgataactgcgggagaagacaaccagaatataaaacagctgccatggccacatagcgaaatctacaagtcggtgatagaaaggtttgaggggcgtgttgcgctgaatgtattgctgcgaaaggatctggcttggaaattgtttgaagacagcttcgcccagtatgacacctatgtccaacttgaacagaagctacagcctcttccctgcgtcctgctaaacagcctcacgccggagacctttgagcaaatgcatgccaagcacaagattgctctaatcaagctgatagtggagtcggctaccaattcggacaatgacagcatattcttggctagccatcgtttgctgaagcgctgccgtttggattgccagccactcgtaccgatcctgttggagatggccaacaccaaggtggagaagaaacaacccgtcaaacgacgatcagtacaggcaacccaactggatctaaccagcccatactggaagcagggaatgacccttctcgagctgttggagcacaagaaacagctggttggagcggagctgctgatcccaccgctcttcgaacttctacaggcctgtcttacgatggaagagcatagtgccgccgagtatcccaagcagctgattctctcaagcttgctgcactgctgtcagacggcacagtcggccggtgtgcagctcgttaaggctatgcctgaatctagcttccgcatcgagctggtggtgcaatccttgaggaatacccgaaatccgcagacccagcagcatgcgctgcttttcctgactcactgtgctggcatgtatccgcaacaagttctacacaagatcgttgaaatctttacgttcgttggatccacggtggcgcgacacgacgatgccttcagcctgcatataattcacaatgtggtggagtcgattatacccattctgcttctgaataccggacataatgagctggttatacccgtgcttaaggtgttcgctgatatttgcacggacgtgccggtccatcggagattgccattgtatgctaccctgttccgagttctggagcccaaggagcacctttggcagttcttgtgcattatctttgagtctcaagtgcttctggagcaagttccacaaaaagtgtccacagacaagtcgcggctggactttgcccgtgaactgacgttgatgttcgaagatccgacggtcgcaattcagacgtgcatccgtctattggattacttggccaagttgccggcaaccaaaagcagtctttcgggtggatcaggctcctctgtgctaagcacggaacaacagctctttgatgttcggacacggacgttcaagcaactgcggcactacaagtacctcatcatggacttcctttctggaattagcagctgcaacgaatgggagaagaagatgaagcgtcctgatcccaacgagctacttccgtattatcaggaattcatcctaaagacactcgcgtatgtgggcgtacttaatggagcattggaagcagcctccgaaacgccttctctggaaaagttctggcgcgtgctagctaaccatgcacacgatgtcttggataacgccatcggtcttttggcaccgcaacatttcatcagtgtgataaccgagctactgaagcatgatcatgtgtatgtgcgcattaaggtgatggacttgttggtgaccaagctaagtccgtcgagcgattacttccagcaatccaacgctgaacactttggagtgcttttcgctcctttgcaagagattatcaacggaatcctcgagggcagttccaacagtgcgcagcaggcgaagcttcaacagactgcgttgcatgccctacagttgttggccctccgtcacggacgcgactacatcgaggagtgtcgctctcttctggccaccttgaccaagatcaccaaacgacgtgcgaacgtgcccaaggcggtagtgggcaatgtggtgctgaccctcgtcgaaatttgcgcaagtcttaaggcccatgccttggcccaattgcccaagttcgctccccaacttactgagttactgaaggaacaggttcaccaaatggcctccctcaaacaaggaccagattacgtctgttccacccttgtcacagcactccacaagctcttcaaggcgttgccgcttttcttgggaccctacttggtggacattatcggaggcttggcgcgcctttcagtgcaattggaaaatccacagctgctgcaggataagcgcacacaggtgcttaagcagaaacttgcggacgtttggagtgcagttgcccagggcgtcgaggtgcgcattcttgtgcccagttgcgccaaggcgttctccagtctattagagcagcaagcgtacgacgagctaggacatctaatgcagcagctgttgctgcagagcgtccgacacaattcagccgctcaattgcaaccggttcaggatcccctaagcgagctcttcctgcaagcactcaacttccggctgcaagtgcgtggacttggtttgcagaggcaattggtttcggatgtagaggcttccataaccgagacctttgtgacgtggatcctaaagttgtcagagaccagtttccgtcccatgtactctcgggtacataagtgggcactggagagtacctctcgggaaacgcgtctcacctacttcctgctgaccaaccggatcgccgaagctctaaaatctttgttcgtgctatttgccagcgatttcgtggaagactcttcgcgcttgctgacggagcacaactcaatccgtcccgagttcgaagtcgaagaaagggaagatgatgtggacctgttaatggcaatactgaacactctgcatcatgtgttcttgtactgcagcgaggacttcattaatgaccaccgcttcaacgtgttaatgccaccgctggtcaaccaattagaaaacgacctggtattgggaaatgagtcgcttcagcaagttctcagtaactgcattgcccagtttgcggtggccaccaacgatgtgatgtggaagcagctcaacagccaagtgctcctaaagacacgcacatccaatcccgaagtgcggattctggcattcaacagttgtgtggctatcgcgcgcaaactgggtgaaagctatgccgccctgttgccagagacagttccattcatcgctgagctcctggaggacgagcatcaacgtgtggagaagaacacccggactggagtgcaggagctagaaactattttaggcgagtctgtgcaaaagtatctataa

SEQ ID NO: 22518 - protein, 2096 aa, DROSOPHILA
MSTALAQQLQKLAAPQSSVTLADARSRASILFDPKEAATKDRRSIYEIGLTGLQELTDFNPAFKEFQLTLFDEATLTLERSVELPEINKMLDAAIAKFLRLLSPYLLLRPAHMAFEWLLRRFQVHEYNRSEVMALILPYHETMIFVQIVKTMRLRSSDGDWYWLRPLQRPGVPLAKTAIINRAASNPAFLGFICQSTQKAVKELGPRAHQLQAQINFYATVVVGALQTAKPLQDWHITTILESLLRGLISDNIDFMAAAYVIVAQLVSRTKLKSKVCNALLERVANCPFERLHSESLLLLVCIYGKQQAALPHFKPETILNLVGKKWLISTLSSLAKGNIAIQSICMPLMTGAVAAIRDDDASSNSCKLFLDNLLSEVPMPKPTAQQLINCFLDTYVETAIDAPEPMETNSNEDDDTIVIDSDDEIETEKTTFQAWYSTYLEKLERRYPEAFDLSVKEALRSKSSTSNRQKALKLALGFRLNTTDEKAKHAYEKLYHYSADWRLSAVQKLLQNLNVTKKRERSVKLLQECLPDRINDDSGAVVSTLLSLPTEELAEMLGPLPLAQTLCHLLYRAQSEKDEEWQPVVPLAVRHLTSALVSGSYDTNLVLLALMPLLFPGEALAEHQHKALRILLGSDFVSKVPFLAELKVSNKFSDFNVGEHRQHFLDIIASSNQELSSQERALLQSVEDHGGELYIQKASQLTHLLLLLTAYAKRELQPRESLHMLEKIGLYSRRLQFRVVNGSQNTQNCAPLQLYVDFLLTLVKNTKWTALASTPWNQMTDELRLCLRLLEIICAQVFSEKADQPERQEWTRALQQSLQLILPEAQDRLEVLSNFYVFERLPELWPRDSDYAVFRLQGFIILEAVLSNPKSQIDCGLVHVLRVANACGSPLQTLRVQAINILQLISNRKLVSHVEQLVRSLLQRKSELSMDHEQYALILYTILEPEKATAKERLVLSKLKRSVLALASDPKQSPICTASLLAALKHVNDENFLNELLPLGLDSLKTITAGEDNQNIKQLPWPHSEIYKSVIERFEGRVALNVLLRKDLAWKLFEDSFAQYDTYVQLEQKLQPLPCVLLNSLTPETFEQMHAKHKIALIKLIVESATNSDNDSIFLASHRLLKRCRLDCQPLVPILLEMANTKVEKKQPVKRRSVQATQLDLTSPYWKQGMTLLELLEHKKQLVGAELLIPPLFELLQACLTMEEHSAAEYPKQLILSSLLHCCQTAQSAGVQLVKAMPESSFRIELVVQSLRNTRNPQTQQHALLFLTHCAGMYPQQVLHKIVEIFTFVGSTVARHDDAFSLHIIHNVVESIIPILLLNTGHNELVIPVLKVFADICTDVPVHRRLPLYATLFRVLEPKEHLWQFLCIIFESQVLLEQVPQKVSTDKSRLDFARELTLMFEDPTVAIQTCIRLLDYLAKLPATKSSLSGGSGSSVLSTEQQLFDVRTRTFKQLRHYKYLIMDFLSGISSCNEWEKKMKRPDPNELLPYYQEFILKTLAYVGVLNGALEAASETPSLEKFWRVLANHAHDVLDNAIGLLAPQHFISVITELLKHDHVYVRIKVMDLLVTKLSPSSDYFQQSNAEHFGVLFAPLQEIINGILEGSSNSAQQAKLQQTALHALQLLALRHGRDYIEECRSLLATLTKITKRRANVPKAVVGNVVLTLVEICASLKAHALAQLPKFAPQLTELLKEQVHQMASLKQGPDYVCSTLVTALHKLFKALPLFLGPYLVDIIGGLARLSVQLENPQLLQDKRTQVLKQKLADVWSAVAQGVEVRILVPSCAKAFSSLLEQQAYDELGHLMQQLLLQSVRHNSAAQLQPVQDPLSELFLQALNFRLQVRGLGLQRQLVSDVEASITETFVTWILKLSETSFRPMYSRVHKWALESTSRETRLTYFLLTNRIAEALKSLFVLFASDFVEDSSRLLTEHNSIRPEFEVEEREDDVDLLMAILNTLHHVFLYCSEDFINDHRFNVLMPPLVNQLENDLVLGNESLQQVLSNCIAQFAVATNDVMWKQLNSQVLLKTRTSNPEVRILAFNSCVAIARKLGESYAALLPETVPFIAELLEDEHQRVEKNTRTGVQELETILGESVQKYL

SEQ ID NO: 22519 - DNA, 11340 bp, DROSOPHILA
ggatgtagaggcttccataaccgagacctttgtgacgtggatcctaaagttgtcagagaccagtttccgtcccatgtactctcgggtacataagtgggcactggagagtacctctcgggaaacgcgtctcacctacttcctgctgaccaaccggatcgccgaagctctaaaatctttgttcgtgctatttgccagcgatttcgtggaagactcttcgcgcttgctgacggagcacaactcaatccgtcccgagttcgaagtcgaagaaagggaagatgatgtggacctgttaatggcaatactgaacactctgcatcatgtgttcttgtactgcagcgaggacttcattaatgaccaccgcttcaacgtgttaatgccaccgctggtcaaccaattagaaaacgacctggtattgggaaatgagtcgcttcagcaagttctcagtaactgcattgcccagtttgcggtggccaccaacgatgtgatgtggaagcagctcaacagccaagtgctcctaaagacacgcacatccaatcccgaagtgcggattctggcattcaacagttgtgtggctatcgcgcgcaaactgggtgaaagctatgccgccctgttgccagagacagttccattcatcgctgagctcctggaggacgagcatcaacgtgtggagaagaacacccggactggagtgcaggagctagaaactattttaggcgagtctgtgcaaaagtatctataattatgggagaagacttctccaaatgtaaaagttatgtactctaatactgtcataaaggaatctattattacatttttaaaatatgatatttcagtcataatcaataagatggccaaacaatctgtataacttagttaaagaattcgctgttcattaacttactcatttattcggaatgcagaatccgcttaatctagtgtacaataagaaaacaaccaacattattcttgacacaacaagtggagcgaatcggaagcgggactatgtgttgtatgtgtaggaaatgctggggatgtgggcgttgttgagcgtgttgtcgtgcgtctccttgtcctcgggtatctcgggatcctcgcgctcctcctcctcgtcgatgatgctgatatcgcgaatggatggacggtggctgcgtcgccagccactgaggtcctgaggctgcttggtcttggtcagcaacttcgtgcccgtcaccgagatcattatcgctcccagcggagcggtcagaacgatgctgaacacgcagatcgtctgcacaatgttcgcccagttgcgttcctcctcggtggcgtcgtctccgagatgctttagggccaccggaccgagggccgcctgcaccgttgccttggccatccacgacagtcccacaaagaacttctccttggtgttgaggcgatctccgaacgcaatacccgccgtggtaagtatacgcaaaatggcgcccgtaaaaatgcatgccgctccgatagacaccgtgtgtgagtccagctcgcgaatcttaatggtggcaccggtcagaccgaacagaattggctcgaagatcatccagaaaatctcgaaggcggtggacaccgggttgtcctccacgtcccagccatccttgcaccagaacagattcgaaacgaaggccgagaagacgacagccaggggaccggctccctcgaatcccagctcttcgctgccataaatggccatcagtccgccggtgaagagcagcagcgtccgcaatggcaccacatacgcgtcccccttctccgggaagatgcgggccagcgagccccaaacgacgccaaagcccaaaccgcccaagatgcaaaccggtgcctgggcgatctgataggccagacccttgtcggagaacatcacagtgctgatgatgccaaaaatggccaccgacagggcatcgtccactccggccacggccaccaccagtgtgggaatacccttggccacgccatagccctttgtccgcagccggaacaggcagggcaccaccacagctggagacacagcagcaatgatggaacccagcaggaaggcccagatccagggcaggtccaacaggaaatgcgacatcacggccatcaccaccgcctccacgcaccacggtatgatgcccagctttaggatcgtcttgtacaccttcttaaaggcctccggctccatttcgagtccagctcgagtcaggattatggtaagcgcgaatttgcgcaggtgagccgtcaccttggagaagtcaccatcaatgtcggcccagcctacattctgcaaattataaaatgaagaaaacaatatttgttaagggaggaaatcaaataataatatgtgaaactcacctggaagagtatgcccaccaggagcatgccaatgagacgtggcaaggtggtcagcgatattaggtagccaccgaaattggcggccacagtgagaacgaccaggccaaagagctgcccaccaggggctgccgaatcgccgatgatcacaaaggcggtgacccagataaggacacctattattaaggaaatagttaacacaattataatgtatgtatatttaaataaaatagtttacttaccaatcagaataatggaaattaggcgcgataccgtcctaaatgtgggacagagcgggtaggggaatatcttctgccagaagggcggctcccaggacgcggatggctcctcgccgcggcacttgaggcagaagttgtacatccaagactcctcgacgtagttagcaccgccattgctgctgccgcctccgttgtgacccatctggtggccattgtacttcgcattgagcacgtccagcgcattctgtcgatagttttctgcggagacgaagacggttccaatgagtgatgcaagctattcggctgggtgcaccagcacctagtactcagtttgcaagacctcaaaatgtatactatcttcgaagtcaggtgggatctctaattaggtgataactatgggcattatatggtcatatatcgaaggggaatgcgtcaaaggcaagacctacgcaacaatattttgatttggcagagcccacttcccccggcttgctaattgataatgttgactggaaaatgaggtagacgtcggaaacgtagccgccgatcaaacaaacgcttcaacttgatatatttgcatttttttcaactggttaattcaggttgaaatttcaatgggaccgtgaaaatgaggcgctgaagtgataggaaacttcctatcaaatttgggaaaaatacatatcatgtatcatgtactctacgtgtgttaaaataagtgctattatatataagtggcgcccaatagtcgaaaatactttgttgaattttttaaaatatatataataacacttgccttaattacaatttagcacgtttgcagaagaatttaatacttcattgagacgcctatgattgagtttttgaaacgtgctagtagcgaaaatgctcagcacacgtgagaagtgaggtgtagacaatatacgtcgcagactatataagacatatttttgaaatataaaagtattgcgcagatatatagctaataaccacacagttacttatttgatattaatttataacaaaactctcgctgacaaactgctttcctaagacaaggattctgcgatcctggacaacatcacttaccatagctgtgagtcgagacccgatcactttcgttgtcatggggagcggtatccttcaggatgctcttccttcgcgccggtccaatgtccgtgtgcgaatgtgtggaagtctgcgatggtaatacaaatcgcgattaattttgttaaataacaatacgttatcgctggcactggttcacaagcgtgtgaccatatatacatatattttcattagtcgattatatggccagtagtacatggaaaatccgtttttacgatgcaaccaataagcggaatgatcgctatcgccggcggttaatgaattgatatagccaacagcactcacctgtgaaattttacgcctcggattttgctcataggcgggattatcgtatccggtgccgagaccaccattcccaccgatcatgggaggatcggaaataatgctaacccgtcgcttgggttggctctcgatgacgatggtgctcctgtggttgccagccccattgccactgccattcgaattgggcatgggcacatcgctgggcactgggatcggagtcggagcgatgatggtcgtcggtgtggttatggtcgctggtgctccgccgacggacggatcctcgcgcgcttctggctctcccgtggccgtcatcttcttatggctctgccggaacgaaatttacaataagttaatcatttaatgcttcgattagtttgcctttgcgcttacactaaacatttgacggcgtcgcgaatcaaatgtattcaattatttcgaagcgattcgcgagtttttacaactatctcgttcgacgtttagcaatgaaataaattcattaccactcggtggcaaaccgccaactccaggtggacacacacactcataagggcacacacacacacatacacatacaggcatctggtggctacactgggcgaaatggcaaggcgctaattgaaaagccaaacagccatttatcaaagcccaggagaatgacaggtaatgtgatataaagcgtaattgtgggaattaatgccctatttctgcaattcatttatttatttataaactactctgaaaattaactaataaaatatttaacattgtcatataaatattatgagaattattgtcctctttctttaatttatttattcatttataagctactataaacatgtactgtattttattgcgattgtgagtagttatgggaaaaatatttttttagcttagaaaagtatatgaacactattttttgattaagaattgaaaaaaaatggcacataattaactgatttcgtagattacgtatacgcactgtatgtcttttgagaacagacataaataggaagaaaatatattgctttatctaatgcgtgattttttctgaacatatatggttataatctttaaaaatatcttaaatataaaatatttttgttattatttgatttatttatttttcgcagtgcccttgtgaacttgtgaaaacgttaaagactaacgtaaatattaaataaatggtgtaaaatattcttaaaacctcaataaaaattaacggcaattagcttcaattatatcacctgccccaaaagatacatatgctatgcggtcgatgatacgcataggtactcctatatctccagccatgaatatgtaaaaaccatgtcggttctcgctttgatgaccaagaagttttttagccatttgtttgacattcaattatgacgcgtttatctaaacaatttcacgtgagctgctgggcttaatatctgtttaatgtgcccccccttcttcaaataattttttttttgtttccgagacgtctcgaaataatgaggctgatttgattattttatacatttggtgattatttgtttttcggggctttccgttgtttttgctatttttgcgctccggcggcgaggagaacagaatgtgacatcaagtcatgcggttcgttagctgaatgctgaaatcaaacaaagccacaggcatgttgcttgtgcctggcaaaatgttgatttaaattgttgttccctgccgccgccgccccccccccccccccctctgaagttggtccaaagttgcgttattcaatttgctaatttatggctcacacaaaaactggcggcaaacagcaggtgacaaatctgtccaaaatgcgagcacattggaattaaagccatattcgatgggcagataccaatggagatgagattttatacatcttattcagttcaataattttatcattaaacaatgtgcaacatgttgactatactcacacgctctgattggagtaccaaatatagacttaagtgggcagaaaggggcaatatctgtagacgatatcagaaatgttggcaacggtaagagtcaatttgcaatcacaactgcataattggccagccacgctcagtgttttcaattttcacctctaattagcgccgattcaacaaaaagtactgctattgataggagtgatttgctgtgataaaattgttttggacaatatttaagttgggacagtcaccccagcagcgattttcaatcttttagatctcaatcttatggccaaccattggctttgattattgagtttttacttagttttttttttttttttttttatttgggggctcggggctctaattgacgcgtgtctggtatcaaacagacccgagttgacaaacttttcgacacatcatcgtcatcattatcataggtatattatcgtcacgtgctatcatgcgaacaaatggcgaacaaagcggcttaattagcattcgtgtgtcatctgttgggcttttaagacatataacaaatatatatctggctataaaactgtaagtgttcatcatcaataggccatcgtctgtggccgattacaggtcatccatccgtagtgtgaacaactcgtgtgattaccaagcaaattcattttcaagttaagattcagatgttatctttcattctgtgcattttaatgtaagatttttttagggattgttttttaaagggattgcaattacacaatccctttgatttaataatttagctaattgcttgcgatatcttcagtttccctttgaacccttgttagtcatttttgcattcagcctgggctttcgacgtatttgccgctctttgaccttgccgtaggttgcccccacccccatttgcgcgcccacaccaaaaaagcattttgcattgccatcgaatgaacaacggcgtggaacgattctacgtgacatgtttgcctgatcgaattggccagggcataagcaaattcgaagcagttagttagcttgggtcagttggacggagcggttgtgttggccagctggagattcggattcggagaactggtcagttggccggattacttagcacgagcggtgccaagccgtttttggcccaaaaggttttccttcacacgcttcaaaacgcattgcacaatggtcatagccaaaaccagtgggtgagggaggggtttgggtcgcaaaaacatttacattttacgatttcgaaattggacaggcaaccaatggttgggtggatgggcttggatggagaagtagtatccgtattagtagcagctacctgtgacgtgattcactttcaaatctggtcagacgacaaacgcatttcagtgcttcgtctttggtttttcttcatttttttttctcttgtaaatggcacgactgttatcccatagccattgtgttaatctaatcgattgacagagttgagcattgtctacggaactgcccagcaatagataatcagcagtgataataaggtacgcgcattcttacacaattaatccccaaagcacttgagtgtgtggagcgtgtaaaatttgagaacaattcacttgaatcgaattcaaatggagagaatacacagtcggccatttccacggattcttatcaatcggagtcacatgtgaccaatggcgagggagatatgatgatattggacacttggctaatctccactgggctttttccggctgcgattagccggttgtaggactgttaattgactttagctgggaaacatggaatcatgtttttcaaggtgcaaagttatttaatttttttgtgtatctatagttgctaacagctatttaatttttttgtgtatatatagttgctaacagcttatatggttttagacacactttcacagttaaattactcctcgtacttaagcaatcgccagaaatgaaatggaatatttcgaaaaatatctattaaaggttgtcttctgataaaaccaatgatcacaatgattctttattgggcgccaataaaacagagtttattaccatgaatcggttcctgtgcgcttaacttcagattgacgtcaaaggagacgtcctccaactctcacttagctccagtccaatcgttcaattgatcaattaaatgggttttgcaaagacattcgatgccattgctcgaagaagttaaggaaaattctttaaatagcgctcgattgaagttatcaagtgctagatggcatcggtggaatcttttatggtcgacggatttcgttggagctttcacaaagttatctacggctgtatatttgcattaatttattgcaaatataaaagacttttgcgatgatgattgatcgcagcatgtagaacattcatataatataatatattcgcggcttatctgacaatcgacggcgatagcaaagggcgctatggcgaaaaagatttagccataaagatcaaatcgaacgaaaggctaaataaaaatccaccgaacactcaagttggcggctcgtaaaaatcgaaggggcccatgctagttgtggtttgataagggggacggtggggtagcggtaaacccttatcggtgcgccggactacttaattggcttgatattgccctactaccccaactaccgtgtggccaagtgtggattgtgattgatttcataccgaatgctaaatacgcagacgggatcgggtccccctccttaaaattggtttcacgattgctatcggatcgcgaaatatgtgtgtgattactccacttacgagtgtttcattaacagacccactccactcgaatcgaatctcaatcagccatgaatgttgtttctatataatcggctacagattcgatttcgatttcgctttcaatttcccccgagcccccttccttcgagccatcgagccctctttggatttcagtgtgtctcaggtgctttccactgggggtttatctgcctcaattgcgcgaattgtttattaaaacattatcaatatctgtaatccacagtcggatccacttcacgctgttctacactcgtttcgtctggctttggcctttgtcattagttccattgacaactgctaattgtggtaagtgtttattggcccaattttcgaggcattcgataagatttggcccgtgtatcactcttctcgtttaattatgcatgtatttcctttatcatggtgagacttcctctgcttatctaaaccgcacaaataatgtacttaaatgatgggtatactcgagatactgtttcggatagaggttacacattttggtaatatttactgctatcattaaggtgtttttcggcacgttttgatctggatcattgtttattctattgcagtgcacagaaaagaattaaagttgagtattaattcatattaatatataagttatattacttcgtatcaatgcaacttcaaaagacggaaactaaatttgtatctttaagtaactgaagtatctaaagtagagcaatatacgtgctatatatctgtgtatgacatgacagaatcaaagttgaaacactcattatatgtagatctaattattcgaaacgtagatgcagaaaccttctctttgattgtgatacaatgtatataatatataatacaatgcacaaccgttatacgcactgcgcatttccttggcaatgtgattgattttattgatactgatacggaattaatgcgttctgaaactcgttcacagcttacattaaagggttaacccgcttgagatgttcgcttaatagcatttaaatgatgatacaattggtagcactgcaaattgattttcctcatgcaataaaatattcttatgcattcatttcgagttcattaagaaatcattcacatttcattaatttcggtcaatatgcaaatggtcagcaaaacgtaaataaagtgaaatatatgagcaaaattaataacagctcaaagtcgcaagcgggtgttttaatcataaacgaatgtaatttgcatttgcactgttttggctgctttggcatttcgattggagtcgccataacaaaaaaaaaaacacgtacagccagaaatgtgaaatatcttaagtatttactttattacagccactgaactcgaagatgggaatgagtggcaaaacctactttgtattcacacggcggccaggaggaaattaggcaactttcgttgatgtttcaaatctgaaagcactttgtcacttttcgttgtcttcgtgttttaatcttcttcacttttctcggaatggcgccagcactcgactaattagaactcagttagtcgttctgcgttgacttttactttcatattcacaaaacgcggaccacggaggcggaaaactgtggcgaagtcgaaccgcaacctggccaaaagcacgactaagtcgctgcaaattcctgccagcgttttataggcacacacacacactcacgtctgtaaacgcgatcggaagaattgaagcgaatcgaattgaaaccgctctcttgctcacccattcattcacgcactcactcactcacttgctcacctactcactctccgatttgcgaagaattgcccgaagttatgtggctgtaagtcttatcttcttgtatgatccacccacctgaaaataaaggtggcccaaagcccgctcttctggtagaagaggcgtaaatcaaggcgatcaagcagccaatggtgtaagccaactatatagcttcatgtggctactgcactgccgcgagtatatcacgaacttaaggccctctcgagttgtgcgacccataaaatggtcaacaaaataatttcctcaacgcttcccaggccataaattcagttgagaatttaccattggcaaatgcaatgtcataactggtactcttggcggtgtgaaaatacattgtttatatggccctatatgtgacacgaaaaagtatgcaataaaaaatatgattgatgacccgagataacgattggtttttctttaattaggcagtcttgagaagctcaatcaatcggaaatcgaaagcgcttgatggctttatggccacgttaatcaattcgtattgatatggtcgcgacgtttcgtttgcccatcgtttgatgaactttagaggggatttggtaattgagtcacattgaatgcatggcggtggaaaagtcaattagttaattggcggtctaattgacttgactttacagtgctcgtcatgcgtatcaataatacaaatagcttctaaatatctaaatacttgcccaaatattatattagattaatcatttggcgtaaacaaacaccgataaagatgtcactttgtttatttaccatttgcataaaacccaaatgtatgattttcgtttatttaccttaccgaatttcaactg

SEQ ID NO: 22520 - DNA, 2379 bp, DROSOPHILA
ccaggttgcggttcgacttcgccacagttttccgcctccgtggtccgcgttttgtgaatatgaaagtaaaagtcaacgcagaacgactaactgagttctaattagtcgagtgctggcgccattccgagaaaagtgaagaagattaaaacacgaagacaacgaaaagtgacaaagtgctttcagatttgaaacatcaacgaaagttgcctaatttcctcctggccgccgtgtgaatacaaaagccataagaagatgacggccacgggagagccagaagcgcgcgaggatccgtccgtcggcggagcaccagcgaccataaccacaccgacgaccatcatcgctccgactccgatcccagtgcccagcgatgtgcccatgcccaattcgaatggcagtggcaatggggctggcaaccacaggagcaccatcgtcatcgagagccaacccaagcgacgggttagcattatttccgatcctcccatgatcggtgggaatggtggtctcggcaccggatacgataatcccgcctatgagcaaaatccgaggcgtaaaatttcacagacttccacacattcgcacacggacattggaccggcgcgaaggaagagcatcctgaaggataccgctccccatgacaacgaaagtgatcgggtctcgactcacagctatgaaaactatcgacagaatgcgctggacgtgctcaatgcgaagtacaatggccaccagatgggtcacaacggaggcggcagcagcaatggcggtgctaactacgtcgaggagtcttggatgtacaacttctgcctcaagtgccgcggcgaggagccatccgcgtcctgggagccgcccttctggcagaagatattcccctacccgctctgtcccacatttaggacggtatcgcgcctaatttccattattctgattggtgtccttatctgggtcaccgcctttgtgatcatcggcgattcggcagcccctggtgggcagctctttggcctggtcgttctcactgtggccgccaatttcggtggctacctaatatcgctgaccaccttgccacgtctcattggcatgctcctggtgggcatactcttccagaatgtaggctgggccgacattgatggtgacttctccaaggtgacggctcacctgcgcaaattcgcgcttaccataatcctgactcgagctggactcgaaatggagccggaggcctttaagaaggtgtacaagacgatcctaaagctgggcatcataccgtggtgcgtggaggcggtggtgatggccgtgatgtcgcatttcctgttggacctgccctggatctgggccttcctgctgggttccatcattgctgctgtgtctccagctgtggtggtgccctgcctgttccggctgcggacaaagggctatggcgtggccaagggtattcccacactggtggtggccgtggccggagtggacgatgccctgtcggtggccatttttggcatcatcagcactgtgatgttctccgacaagggtctggcctatcagatcgcccaggcaccggtttgcatcttgggcggtttgggctttggcgtcgtttggggctcgctggcccgcatcttcccggagaagggggacgcgtatgtggtgccattgcggacgctgctgctcttcaccggcggactgatggccatttatggcagcgaagagctgggattcgagggagccggtcccctggctgtcgtcttctcggccttcgtttcgaatctgttctggtgcaaggatggctgggacgtggaggacaacccggtgtccaccgccttcgagattttctggatgatcttcgagccaattctgttcggtctgaccggtgccaccattaagattcgcgagctggactcacacacggtgtctatcggagcggcatgcatttttacgggcgccattttgcgtatacttaccacggcgggtattgcgttcggagatcgcctcaacaccaaggagaagttctttgtgggactgtcgtggatggccaaggcaacggtgcaggcggccctcggtccggtggccctaaagcatctcggagacgacgccaccgaggaggaacgcaactgggcgaacattgtgcagacgatctgcgtgttcagcatcgttctgaccgctccgctgggagcgataatgatctcggtgacgggcacgaagttgctgaccaagaccaagcagcctcaggacctcagtggctggcgacgcagccaccgtccatccattcgcgatatcagcatcatcgacgaggaggaggagcgcgaggatcccgagatacccgaggacaaggagacgcacgacaacacgctcaacaacgcccacatccccagcatttcctacacatacaacacatag

SEQ ID NO: 22521 - protein, 708 aa, DROSOPHILA
MTATGEPEAREDPSVGGAPATITTPTTIIAPTPIPVPSDVPMPNSNGSGNGAGNHRSTIVIESQPKRRVSIISDPPMIGGNGGLGTGYDNPAYEQNPRRKISQTSTHSHTDIGPARRKSILKDTAPHDNESDRVSTHSYENYRQNALDVLNAKYNGHQMGHNGGGSSNGGANYVEESWMYNFCLKCRGEEPSASWEPPFWQKIFPYPLCPTFRTVSRLISIILIGVLIWVTAFVIIGDSAAPGGQLFGLVVLTVAANFGGYLISLTTLPRLIGMLLVGILFQNVGWADIDGDFSKVTAHLRKFALTIILTRAGLEMEPEAFKKVYKTILKLGIIPWCVEAVVMAVMSHFLLDLPWIWAFLLGSIIAAVSPAVVVPCLFRLRTKGYGVAKGIPTLVVAVAGVDDALSVAIFGIISTVMFSDKGLAYQIAQAPVCILGGLGFGVVWGSLARIFPEKGDAYVVPLRTLLLFTGGLMAIYGSEELGFEGAGPLAVVFSAFVSNLFWCKDGWDVEDNPVSTAFEIFWMIFEPILFGLTGATIKIRELDSHTVSIGAACIFTGAILRILTTAGIAFGDRLNTKEKFFVGLSWMAKATVQAALGPVALKHLGDDATEEERNWANIVQTICVFSIVLTAPLGAIMISVTGTKLLTKTKQPQDLSGWRRSHRPSIRDISIIDEEEEREDPEIPEDKETHDNTLNNAHIPSISYTYNT

SEQ ID NO: 22522 - DNA, 4947 bp, DROSOPHILA
tttctttaagtcaattttttgctgaaatttgtccacaccttcccgtttattgtttcgattaatagtgtcatacttttttgaatcctgacctcttacgttgtctttaagctttcttccatgttcctcgtgccgtttaggaattttatttgagattgtaggtttttgggcatcgtgtttatcatacttaaaagatgtgctttcagataatgtaaattgaagggagggtcgtgaaaagtgaatcttgcggctcaccgatgcttgtggtcttttagctattgatatcgacactgcatatgggttaattgtttcaccttccattttagcaggatttcttctgttcttttgttttcccggtacatgattttctttgtcttccatttcagatgaaaaatttgtatttcctatcaaagcactatcttccttattcttacaatgaattgaatttcgtttcttgctattacagcaaatttcgtagatctctttatcgttgagttgtggcacctttggtccattataaaacaatatatcttgggagctctgctgtttaaaatgaaataaggaacagattaggaagttgtcaaacgagtatttataatttgtgttttatcatattttattgtttttgaaatgcttgattaccaacatcacgtacctgaaatttagctagactcccagaaatgttcctatttagcgcacaaaaattttttatcttttgatgtatctgcttgtacggatttgacaggcagttgcaccagcagatgttcgtcttgtgaaacgcagccattgaatgagttccaaacgcaagaattcttacaacaatgaatttatggtgcttcccccacaatcgaaagttccaatttgaattaaaactcaatgatggtcacactggccgcgcttaacagcacgctgtagctgaacagcctaacagtgcctcaagataaggcgcttagattcttccagctctgagatactttttatttggcaagagtcctgcgcgctggcagtcgaaattgcgttgagagcgaagctggcaaaaagtaaaagtgaaaatcaggcccttgaaatttgttcatcaattatgcattgattgaaacacgagcgagtgctgtgaattgtcttgttgtgtgcgcgcataacggaaagtgaatttgaaaagcgagtgtgcaaacacacaagcattgcgtacaaagattgtcattccgttccgtaatccataattgcgtgaagacactcgagcgcacccacccacaccacgcacggtatattgtatatacacatatacacacacacagcagtgggccagccgcccccacattgcccttggccccacggacccaagaagcgttcgatttttcacaacagccagcgaaaacgccaagcggagagcgccccaatagcaagcagtgcaatccggacatcagagacccatcatcaccatggacatgctcaaccagatactcagcatcaataacggtggcgcctacgggggcggcaaggctggcggcgccttcgaccccctcacgttcgccatgaagccccaagtagtcatcagggccttgtgctgggtgagttcgggttcggacaagctgcgtccggggaatcgctgggatttgtggacgcacacgccactcacatgacccgattgtcacactgtttacaccgcgcataattcatgaagtaatgcgagggcagagttcttctaggaccttttacataggatcttaacattgcttagcttttcgtttaaatatacatgttcttaaattcatacatattgcgtaagccaactccgtgctgctataatgccttctaaaggcttaaaatattgtgatccaaatattaaaggaattttctttaatttatttacaaacccttaagtttaaaaaattaataatttagaatgacaagaatatattgccttttaaaaatatatctagcttatctagtttttcttaattcaaactgaatgaaaatataaaaacacgtttaagatccctcttttcccaatgcttttaataaaattaggtttttataaatattgcttttaaattgcgaccataaaagtgacctttatgtgccattccgattaaatggctagctcgtaaatgtggcagaaaacgtgcgtaatttgagaatctaagtaaatcgtgaatgttgccacataaacgcagtggcactcaaaggtccgatttgtttacacccgctgcagaggggcgcagcgaggatatagtgggagtgctctggtgttcagctgcagagggactataaaaactctcacgtccatgaaagctttataattaaatgtggtaaggtgcccgggcaattggccactaggcttaggacttcattctgccatcgactggatgtgcgtcagcagggaagtgggaaaacggtataaccgagggggcgtttagctcaccgcctgtttgcgatggtatacgtaatatgtgcccacgctgttgaccaaggactctgcgattgcagagccattcccgctcttttcttcctggccaaacaaaccaaacttggccttcattccgcaaattgggtcacaaacataagtacgtgtctgccgcgttgtctgtgtacttgaacttctggtttgttgcacctgctcaagaaaatcaataatggagtgcgagttctatatcagcataagaaaatgatgatgtgaaaatcaaaatccgaaagttggattaaaaacctaagtaagagcttagccagcagaaagtgttagtaaactcgaacctacaatcacgtaaaaaggatgttcacaagctttgatgttcatacttttataacaacgttctggtactttcattcacaacacacaaaagtgattgaaattaaactgaaacgataaaattaaaatttttaaaacaggtcagctttatagttgatttaatggcactttgagtcattttcagctcttcaacatttctgtgtgcatacaaaaggaccattaaatgttaataggcgccctcattcattgggaattctcttgatttttccagctcttctcggtggtggtctttggctgcatatcctcggagggttggacggagaaggatggcaaggagtactgcctctataatggcgacggcatggcctgcaagtatggcaacatggtgggcgtcttcgggttcctggcctccatgggtttcatgggtggcgagttcctgttcgaacggatgtcgtcggtgaagagcagaaagcgttatgtcatggccgacatgggtttctcgggtaagtagttctggccaaatatgcatatattcctctgacagcacataactaatggcaatccatcgtcgcagccctctggacattcatgtacttcgtggccttcttgtacttgtggtcgcaatggagctcatccgccccaccgccgctgggaatcggagctggcagcatgaagaccgccatttggttctgcctcttctcgattgtcagctgggttagtagatttctgcatatttggttggagaagtttcctgatttttgggcttctttctgcaggctctgtgcgccctgatggcttacaagcgtttcctgatcggcgccggcgatgagttcacctctgccttcgaaacggatcccgccaacgtggtccaccagcaggcctacggctactccatggacaacgacaacgaccagtacagcgcctcaccatttggccagccccagcagggtaagttcatggtctaatacaatgccaaagtataagttgggatataagatgggatataaacttgccattcctagatcattatgtacaatatattgaaagtacctaatcattcttagttcttaactgatgttaaccattataatatgtaatctgatgattctcccacacttggcacctgattaatctgagtttttctcccgcaggtggcatggagcagcaacaatccggaatggagtaccagcagcccacctattaaggaattaccacacttgctcctccgttgtccgcacacactcacttcgattttgtagtgcaactggcaaggatttacacgactaaacagctacaacacacaagttggctttaaccatatacaccgatgtcgaacatataacaagagtaaccaaaacaataacacttgatgcaacaagcaggcagcaaaagcagctgaaaccaatccaagcactggctttagctattggaagagtcaagggatatatccaaaccgatccgatccgatatgagatcggatgggatgagatgggatggttcggataaggagtagtttgaataactcgtaagctagccctttaagttgagtgtgcagttttttgtagtggaaatttgttgcaatatatatatatatatatatatatatatatattatacagatatccactagttatatatcccatatgtatacatgcagaccgcgctttcaacgttgttagttatttagtgtttacgtgtacgtaccatttgaattgatttgaattgatttgttttggtgccagaccctggtccccccgatgatcagcttgttagcaatggcaatagctcgagacagaggaaaacatgatgtttttttagataaatttacacacgtgcagtgcaaatagttgatgcaaatagttgatgcgattcggccacctgaaggacatacatatgtacgaaccacactgctcaagccacatatccaatttaccatctgagatttacccaacaaatatagaacctgtggccagggtcgatgcttggttagatgagcagcaaatgcaaccacttacaataaacgccaaacaatatgtaaattctaaaccataagagattcaataaccgtagaattgttgtgagggattcagtactcgggagattactgcaggaatatttctagttatggttcgcaaaaacacgctgaagatatgaaatggtatagggcttgttcaaggcttactgttgccacccccttcctacca

SEQ ID NO: 22523 - DNA, 1162 bp, DROSOPHILA
gcagtcgaaattgcgttgagagcgaagctggcaaaaagtaaaagtgaaaatcaggcccttgaaatttgttcatcaattatgcattgattgaaacacgagcgagtgctgtgaattgtcttgttgtgtgcgcgcataacggaaagtgaatttgaaaagcgagtgtgcaaacacacaagcattgcgtacaaagattgtcattccgttccgtaatccataattgcgtgaagacactcgagcgcacccacccacaccacgcacggtatattgtatatacacatatacacacacacagcagtgggccagccgcccccacattgcccttggccccacggacccaagaagcgttcgatttttcacaacagccagcgaaaacgccaagcggagagcgccccaatagcaagcagtgcaatccggacatcagagacccatcatcaccatggacatgctcaaccagatactcagcatcaataacggtggcgcctacgggggcggcaaggctggcggcgccttcgaccccctcacgttcgccatgaagccccaagtagtcatcagggccttgtgctggctcttctcggtggtggtctttggctgcatatcctcggagggttggacggagaaggatggcaaggagtactgcctctataatggcgacggcatggcctgcaagtatggcaacatggtgggcgtcttcgggttcctggcctccatgggtttcatgggtggcgagttcctgttcgaacggatgtcgtcggtgaagagcagaaagcgttatgtcatggccgacatgggtttctcggccctctggacattcatgtacttcgtggccttcttgtacttgtggtcgcaatggagctcatccgccccaccgccgctgggaatcggagctggcagcatgaagaccgccatttggttctgcctcttctcgattgtcagctgggctctgtgcgccctgatggcttacaagcgtttcctgatcggcgccggcgatgagttcacctctgccttcgaaacggatcccgccaacgtggtccaccagcaggcctacggctactccatggacaacgacaacgaccagtacagcgcctcaccatttggccagccccagcagggtggcatggagcagcaacaatccggaatggagtaccagcagcccacctattaa

SEQ ID NO: 22524 - protein, 241 aa, DROSOPHILA
MDMLNQILSINNGGAYGGGKAGGAFDPLTFAMKPQVVIRALCWLFSVVVFGCISSEGWTEKDGKEYCLYNGDGMACKYGNMVGVFGFLASMGFMGGEFLFERMSSVKSRKRYVMADMGFSALWTFMYFVAFLYLWSQWSSSAPPPLGIGAGSMKTAIWFCLFSIVSWALCALMAYKRFLIGAGDEFTSAFETDPANVVHQQAYGYSMDNDNDQYSASPFGQPQQGGMEQQQSGMEYQQPTY

SEQ ID NO: 22525 - DNA, 3895 bp, DROSOPHILA
tccttaatttttccaattccgaggcttcatctccaggattagcaaacgaaatacgctttgtatattgtgttattggacttaagagggtaccatatcagcacattaatttcgaaaatcttttatttaatgtattataatcggccatgtattttattgtacgtaaccctccaattgagtcgtttaattgataaaaacattccgtgcctctgttagaaaatgaatgtgtatgtagtatgtcgagcacgaattttgaataaaactttttaagtgtttaaacctgtttttaatgaattcccattaaaatagttgtagtactggtccagaagctaacatacattaaattatagatcttgagattgcaggttataagattaattggtttaattacttaatgggtttagttgttgaatactaaatttaacttcatggcagagaaatgaaaagctgaaaacattaaaatatttttttaagactacaatactggatgttaaaaaatgttataattgttttttaaaatatttttatgtttaaatatttagcctaccagggctggctaatcgcgatagtgtcctcgccagaagttccattcttccaatcgatagctagcacactagacatatgtatgtatcgataggccaaaacaaatacaaacaatacagacgagccaagaatttttgctctgcgtcccaacacataaaaatccataacaaagtgagtcaaagtgttttaaaacgaggactacgaacgcaatagatgaagataaaccattgcagatcaagattaatacgctcagggacggcagggtcacaccaataacgggtggtcagagtgaccaaagtgggcaggaaaagaagcaaaaataaacaaacaatacagacaggaaaataagcagcgcgtgcatgggaagagttttttcgccttaggcccaaacactgaaaccaggaacacagacgcactgcatcactggcaacggggcacacaatccgattgcgaccaagctatggctgcggccaccaacaacgattcctccggcgtggagtcggccaaggaggaggtggagatgtcgatgccgccatcgcccatgtcgatggccatggtactggccaaatcgacaccgatgcccatgcccaccagcgcctccaaggggatcatgataacgccgccgccaccggcaatgccgcccacgcccacatcgtcgcccaacacgcacggcgagtggccccacatgaacatcaacctcaacctgaacatgagttcaaaccccagcacgaatgcatcattccagctgagcagagatcggggcgagcactttgccctgccgcatctgccgcccctgccgctgaatccaaatgcctccaatgccgagtatctgcccagcctgattcatccaagcaccctgccctcgggtagcaaaagcttcaagatgcggccgcgaatgcagcgtctaaagcactcctacagctacagcaacataatcgtccagtcaaatggccgcaaactgcgcaccgccgcctccacctgcaacatcgagctgctcaaccgcatccttgagggtggggccaatccaaatgccgccgacgagtacaatcgtagtcccctgcatctggccgcctgtcgtggctacatacccattgtccagcagctactaaagtacggagcgaacccaaatgtagtcgactcgctggggaataccccactccatctggctgtgatttcggccagctccaataacttcaacgttgtggtgggtgtgctgctccagggcggcgccagtgtccacatgtacgatcgcagcaacaagtcaccgctggagctcgccgaggccaagctaagattgctgcgcaatcgttacgatcaccctacgccggagacggccaaaatcctcgaggacatgtgcatgctgaccacgctcatcttacgctacatggtaaagcagcagcgcgagctggaggatctctccgcgctggagaagcgactgcagaacctgagcaccagcgatgaccaagagcaggtcgtatcccagaccgccgatgagctgctcgccagtgtcgagcggctatcaatcaacaacaagtagacgggacgtaaactggacgccagggtaacccgaccgcaggctggcccaaattgcgttcgatgagttgagaaaaaagtgagtatgaaaacaaatagtctacagatatatacaaatatacatatatgcaatacaaataatgaaaccccaagttgtgtttttaaaaacgttatctataaagcatgtgacgtcgcatttgccattccgcaaagcatttgtgatcttagtcactcacaagattagaagcaataatgtttacaataccttaattatatgtcaaatggttcggaatattggttttaatattttttcagactagtgatactaatcaactgctttcttttcgttgcagtttgtttatcgtttcctaatttggctgccgttgagctggagttggcattgtgacaagcagctggaggagattgagatcctgcgcccgatcctaaacccacaaagctgccaaatgcgaccaacgctctcaaacacacaagcacacacatacacacccacacacaaaagaaaacacacattgttttatgcgatctttttattaagtatttcatttaaggcttattgtttatgcaaacaatcaacaaacatgattacattttaagctttacgtttagcgcgccaaaaacaaaaagaaatcaagttatgtaataatgatgcaatcgcaactcaagaggacacctaacaatttgctacattacatttaactaaatgactacattacttggaaatcgttaagtgtctattgtatactataacaaaaaaaaaaaccatatgcgtgtaaacactctctgaacaataaacgaaaaaccaaacggccatttgacttaatccgcagatcaagccgaaatctgtaactaaataactgagaggacttctgagtgaatctggtttgtggtgaggatctgacaatcaaataatctagaaaatccttttcagaaaatcaaactgaaaacgtttctacttagatacaacttgaaacttcattttaacataagtttggtgttgccaagtctattaatgcattatgacaaacggttttgatatactaattgcccttgattggtatatattttaaaatccataaattcaacaaaaaaaatcgaagcttgaaaatcatctataaatctatttaacagccttttcctcttgccgtttaaatgtattcaaagtgcgattaggaaaacccacattggggtcttttatgagtatttatgtgtaaacttcacattaacatgaggtggataagaaaaactaaacgttttaagaaacttgttcacgacgcaaatagtaaacgaagtttacgaacccatattgacgtcaagatcgagttaatactaaataaatgttgtaaattagggagatcaaaaaacccggtccaaatgggtttttcattcataacgaaataataacggaagctagacaaatgaccaaaacacttttccggacataaatatgagaaaatatgggaggagtgggtttataaacaggcccaaaaacctgaaaccgaaactcgtagacccattcatacgaatggaaatgccacaaaatactatatttataacatctgcgcctagcttcgaattttgtgggcggggcaaatggaggaggaggaggaatcgagtggacagctggaaacggaaaaaaagaagaaaagccctgtctcctcttcttcccacgtcggttacgtttcgttgagcgaaatgatcaacatattcaaatggtcgttacgcacgctacacagaaaatagcattgtgaacgttcttaacaaatattatgatacactttaaaagcatatactaaagggaaat

SEQ ID NO: 22526 - DNA, 1621 bp, DROSOPHILA
atggctgcggccaccaacaacgattcctccggcgtggagtcggccaaggaggaggtggagatgtcgatgccgccatcgcccatgtcgatggccatggtactggccaaatcgacaccgatgcccatgcccaccagcgcctccaaggggatcatgataacgccgccgccaccggcaatgccgcccacgcccacatcgtcgcccaacacgcacggcgagtggccccacatgaacatcaacctcaacctgaacatgagttcaaaccccagcacgaatgcatcattccagctgagcagagatcggggcgagcactttgccctgccgcatctgccgcccctgccgctgaatccaaatgcctccaatgccgagtatctgcccagcctgattcatccaagcaccctgccctcgggtagcaaaagcttcaagatgcggccgcgaatgcagcgtctaaagcactcctacagctacagcaacataatcgtccagtcaaatggccgcaaactgcgcaccgccgcctccacctgcaacatcgagctgctcaaccgcatccttgagggtggggccaatccaaatgccgccgacgagtacaatcgtagtcccctgcatctggccgcctgtcgtggctacatacccattgtccagcagctactaaagtacggagcgaacccaaatgtagtcgactcgctggggaataccccactccatctggctgtgatttcggccagctccaataacttcaacgttgtggtgggtgtgctgctccagggcggcgccagtgtccacatgtacgatcgcagcaacaagtcaccgctggagctcgccgaggccaagctaagattgctgcgcaatcgttacgatcaccctacgccggagacggccaaaatcctcgaggacatgtgcatgctgaccacgctcatcttacgctacatggtaaagcagcagcgcgagctggaggatctctccgcgctggagaagcgactgcagaacctgagcaccagcgatgaccaagagcaggtcgtatcccagaccgccgatgagctgctcgccagtgtcgagcggctatcaatcaacaacaagtagacgggacgtaaactggacgccagggtaacccgaccgcaggctggcccaaattgcgttcgatgagttgagaaaaaatttgtttatcgtttcctaatttggctgccgttgagctggagttggcattgtgacaagcagctggaggagattgagatcctgcgcccgatcctaaacccacaaagctgccaaatgcgaccaacgctctcaaacacacaagcacacacatacacacccacacacaaaagaaaacacacattgttttatgcgatctttttattaagtatttcatttaaggcttattgtttatgcaaacaatcaacaaacatgattacattttaagctttacgtttagcgcgccaaaaacaaaaagaaatcaagttatgtaataatgatgcaatcgcaactcaagaggacacctaacaatttgctacattacatttaactaaatgactacattacttggaaatcgttaagtgtctattgtatactataacaaaaaaaaaaaccatatgcgtgtaaacactctctgaacaataaacgaaaaacc

SEQ ID NO: 22527 - protein, 358 aa, DROSOPHILA
MAAATNNDSSGVESAKEEVEMSMPPSPMSMAMVLAKSTPMPMPTSASKGIMITPPPPAMPPTPTSSPNTHGEWPHMNINLNLNMSSNPSTNASFQLSRDRGEHFALPHLPPLPLNPNASNAEYLPSLIHPSTLPSGSKSFKMRPRMQRLKHSYSYSNIIVQSNGRKLRTAASTCNIELLNRILEGGANPNAADEYNRSPLHLAACRGYIPIVQQLLKYGANPNVVDSLGNTPLHLAVISASSNNFNVVVGVLLQGGASVHMYDRSNKSPLELAEAKLRLLRNRYDHPTPETAKILEDMCMLTTLILRYMVKQQRELEDLSALEKRLQNLSTSDDQEQVVSQTADELLASVERLSINNK

SEQ ID NO: 22528 - DNA, 2376 bp, DROSOPHILA
caatataaaagtaaacaaaaacgctattaggccggatgtttatattttcacgacgaacttcaataacataatatttgatcttcattgagtaacgcattaatcaaattttttactttttcggtcgtttcgaattttgtttaccgttttatcagtctattattatgatgggctagatgttgtttattagatgtttatttaagaacattatcaatacaaaaacatcaatgaaagtgataatacgaattgaccatgtagcaatttgttttgtgtctatagactgaattttttcccctacattaatcaaaattatatttttatattttattttgagtttacttgggtttttcatgaaattaaagattaacctggggtttttacaatccattacgataggctttctgttcattgcatctatagcctctgtacttttccgtgcattcttaaagcaaaagcatacatgtatatcttcaattcaagtatatctgcaatttagtttgcttatctggagtcgctgtatcccgacctatccaaactcgcgtcccagtcaaaggtaaaccatttttatttagttcccagcctctggtatttgttgttatttatcggtgactttttgaaatttattcaattaatttcagtctttgtgctcttgataacacgatttcctcgttattcatttagtttgggtttaaccaaaaccctttagcgaatcatttttgctggacagtccagttgaattcggtattctacacacaaagctcatcttacagtgaaaagtgttactttatgaaatacaaatgaggctctaagcaatgcttttcgcttacgcttttcgataagcgtacaagtagttcccctaccgaaggcctataaatgtgactgcacatgtatcatcataatttgttgatatacttcgtttatacccgactacgcatcggctaaagctgagggatcggtgcactatataagcttctcctcgaagttcccaagccacaagtcgctgataattcaaacagaaatcatttaccaagctccgtgagaaccttttccaatatgatgcagatcaagtacttgttcgccctcttcgctgtcctgatgctggtggtcctgggagccaacgaggccgatgccgactgcctgtccggaagatacaagggtccctgtgccgtctgggacaacgagacctgtcgtcgtgtgtgcaaggaggagggacgctccagtggccactgcagccccagtctgaagtgctggtgcgaaggatgctaaatccatgagcaattagcatgaacgttctgaaaagcgcgtttagctctccactacttacacatattctatgctgcaatattgaaaatctaataaacaaaactaatgtacattaattcttcagttttgaatatccttctcctgactttcttatttagaattaatataatactgcatacattaatactgtaaatatgataagtacctgcaaaacactgcagctcaagtcttaatgaggttctgcgatagcttagcataattagtaacttatcgcgcaggaattccctaatgttcccgacctacatgtacttctgatagttgccgaggtcaaatgttgttgtatttgtattatacctcaatattggtatattcaatatctaatagtacccaattcaattgcaaagatagtcattaaaaaaacctaaatcacttgcaaattgacttttctgccggaaaagcaaccttgacacacaaagttaattagtttatctggaagtcatgtgagaaatttgtaaataaataaatagaaaatttttcgcagtaatttaagtgggcctaatcccttttaagcatcttggttttacgatgacaccgcaataaggtacaactttatattgtttttgcaatcagcttgagtctttattaggcatcagtctttctctctaagtttcttcgtgcaataaatgaggttccaaactccgtagatttttccttctttgttgaatccagatcctgcaaagaaaaaagagcaaacccctaggtctgtccaggaatgtattttcgtgtttgtcgacggtctgagctttggtgaagcgtgaaaatgtggcagtcactgagtggaatcgatggggggattgacgcgtgcccaactggtgggccaaacacttcggattgctacggttcgtattgctattgagccaaagggacccggagcgcatcactccggtccaaaatgtaggcggatgtgtgtctgtttcggggaaagatggtcttctgtcggcaagacatatacataggtgttaaatatgattgcattagttttatactacgtataaggaagctttgattggatcgaagcgactgaaggcgaccctcgtccttgaaattcggtagcag

SEQ ID NO: 22529 - DNA, 376 bp, DROSOPHILA
ataattcaaacagaaatcatttaccaagctccgtgagaaccttttccaatatgatgcagatcaagtacttgttcgccctcttcgctgtcctgatgctggtggtcctgggagccaacgaggccgatgccgactgcctgtccggaagatacaagggtccctgtgccgtctgggacaacgagacctgtcgtcgtgtgtgcaaggaggagggacgctccagtggccactgcagccccagtctgaagtgctggtgcgaaggatgctaaatccatgagcaattagcatgaacgttctgaaaagcgcgtttagctctccactacttacacatattctatgctgcaatattgaaaatctaataaacaaaactaatgtacattaa

SEQ ID NO: 22530 - protein, 69 aa, DROSOPHILA
MQIKYLFALFAVLMLVVLGANEADADCLSGRYKGPCAVWDNETCRRVCKEEGRSSGHCSPSLKCWCEGC

SEQ ID NO: 22531 - DNA, 2339 bp, DROSOPHILA
gacactgcagtgccagtctgaagtgctggtgcgaacaatgctgaggatcctcatcgtccaatatgtttgacacatatgtgtgtcatatgttttttattgttttgaaaagaaaaataaagaatatacttcacagcaaataatacagttttatttctacttaaagaacgaatccttttaaaatcataaatttacttcgaaaatgagatttataatggaatggaagaaataattaaatgataaataatcagagttaacttcaatagaaagctaaaattcatttagaaagaagtggaatatataattcaactcataataagcatttaagaaaaaaaaagcatagactatttcagtcttaacaagagttggaaaggccattttcatttatgaacacaaatcttcatttaccagcacccatatcactttatgggaaataaagataatcttgtcatgttaatatttccaacaaattatcaaccgtgttacatcgaaaagtgcaagtttggtgtttgaatccggttctgggttttcctaacaaactcgacagttttacaatttatgaataaatttaattaatgaaactggtttaattagtttcctagaagtctcgtgataaatggcacattgcataaaatcaatgtcggcagattattaataagccatttttaattttccattagaaaaactacgcattcttactcaactgctaactgagaagatggcagtgaaactttttaaaaagaaaacgaaatttcatgcgacttttcttagacacttaccgtaatgatcattatctcgaaagagaatactttttgaagtcagttttcgttgtcttatcagccctaaagtatgcccttccatgaaatacaattcaataattatctccaattatctgccaatcaattccagaaatacgacgaagctggcagagagatcccgatccctatataaagcggttgctgggggtttggactcataaatcaagttcgaattgttccgacagcagcactctgattcaaaaccgacaacatgcagatcaagttcctgtacctcttcctggctgtgatgaccatcttcatcctgggcgccaaggaagccgatgccgactgtctctctggaagatacggaggaccctgcgccgtctgggacaacgagacctgtcgtcgggtgtgcaaggaggaaggacgatccagtggccactgcagtcccagtctgaagtgctggtgcgagggatgctaggccatccttcaaggcgcgttgctctaaattgccggaaaactactaaatgttatagtttgttgataactataaataaatattaaatatattattgcaacgcaaatgattatttcgtactggttcaactgtgatactaactatgtgatactaaggtatttaaatgtacgtacaaaggacggataaggattgttccttaaaaatgttaatattaactgatgacgtactcgaaaaggttttcttctattcttattcattacaaaatatatgaataagtacatataaatatattctcaattaaaactagctaacaccttaattctctgacttagtctgtgaagtattgaaaatttaacgatattttaaaataatttgtttttattcagattgtaacatgcttcaaatactgcttaagttattctatttataggatgaataattgcagaaaatagagcgctgcgtacagcgatactatatgatgtaatctggattatttatctctcaagaatgcttactgaaactgtggaagtagcttgcaggacagcatgcattacatagataggtaaaacgcagaatactaaaataattaaatctctggttagactaggaacttctgggaaacccaagggcgtgcacttaatacagatgtcactcatccatattccatagtctattattaaagcaattgcttcaatttatttgcgttagatagggtcaaatatattcaatgtatgctcatgcgaatgtttaattgttatctacgaaacgggttttagtcgctgacgataaataatctttaactaaatttatttttagtctgagtaaaacacaaccaagccaaaaaactcaccctgttaatttaactccattatctttcaattgaaaaacctttgccttaagttgataacaatttatttaaaaagccattcataggaccaaaagaaagtcccctaaaaattacacaaatttaaaagtgctatggttttaaacacaaaaagtataatttattaaaacgctacttacaaactaacagatataacatgatacaaaagattaacatcaatggcttggaatgagtttacaaagttataaaaataagcgtgcaa

SEQ ID NO: 22532 - DNA, 339 bp, DROSOPHILA
cagcactctgattcaaaaccgacaacatgcagatcaagttcctgtacctcttcctggctgtgatgaccatcttcatcctgggcgccaaggaagccgatgccgactgtctctctggaagatacggaggaccctgcgccgtctgggacaacgagacctgtcgtcgggtgtgcaaggaggaaggacgatccagtggccactgcagtcccagtctgaagtgctggtgcgagggatgctaggccatccttcaaggcgcgttgctctaaattgccggaaaactactaaatgttatagtttgttgataactataaataaatattaaatatattattgcaacgcaaa

SEQ ID NO: 22533 - protein, 69 aa, DROSOPHILA
MQIKFLYLFLAVMTIFILGAKEADADCLSGRYGGPCAVWDNETCRRVCKEEGRSSGHCSPSLKCWCEGC

SEQ ID NO: 22534 - DNA, 2823 bp, DROSOPHILA
gagtaccaggaatggcgacgaggtggcactctaattaggagcctagtttaacgttaattgtgcaaaccgctgcaatggagactggtctgccatggtgcagctttcgtgtttttttgtatcattatttgttcttagtggaatttaggcgtaaatgagagtgggacaagttcggtcgattgaccattgagctagtttaattaaagtgaaatcaaaaatgaaaatgaaaatgaagaacacgattatctattagtgcgggagacacaaagtttaaaggaacatgctgttcaggatgtcattcatatactatatagtatgttaaacctattcgattgtagttaattgcattagtttagatcgataagtgagcccaaacagcagagaatacatatgtactacgttttttacattttgagaaagtttatacatacgtgaaataaattattgtattcaatagttacccacggattagcaaatgactaaagacagtttacaaaatacataggtatacacgcatttgtgtttgtgtatggttagacatagtccctaaatcttagtagttgtaatgctatatgtaaatgtttttaccacaaccgagaacctagtttctatttaattttaatcgtatcgaactttataatgactatacatttaatgcaaacatcatgtattattttatgatctgcattaattttcagatgtatatgtttgtaaataaacgccaaacataattagaccaagcgaactaactgtatacaatttgataaaatgcctctttggagtcgaaattttcgatacaatcaggggtcactggtacttcctgattccctgattcattttatcgattgcagcaatgggcaagattgcgagctctgcctcgagtttcttggaagcttatcgaattcagataggagcacatgtgtgacatcaaagttgaggcacctagccactgagcaaatgcatcacaaaagattttgaaacgtgctaaaaaagattattggaaatgcatggaggtggtgtagtcctatataagcgtccccacaagctgtcgataccaaacgtcttcgagaactcaagtaaagtaccagactcgttcggaacatcagttgcaatggtgcagatcaaattccttttcgtcttcctggctgtgatgacaattgttgtcctggccgccaatatggctgatgccgattgcctttccggcaaatacaagggtccctgcgccgtctgggacaacgagatgtgccgacgtatttgcaaggaggagggacatatcagtggccactgcagtcccagcctgaagtgctggtgcgaaggatgctgaatccatactatatccatttgaaatgtgtatattgaatatttcattctaaacaaataatatataaatataaaggcctcttacgcttatcactcatacgcactgttgtcttttaatttcctgtatggcaatgtgttaggagaagtgaatgtttacatacatcattaaatcgaaaagatagcaattctaggtaaataacttattatgataacgatgcatttttaaatcaatgaagttgacacatggcacacataaatcaagtgtttctggaaaactaggattatatcggttattgttagcttgaatttccgagaagcttatcgattgctacgatcaaataaaaaatcttaaaatctgtatctctatataagcgtccccacgagtggtcgatgccaaaagtctttaagaactcaagtaaaattcccgactcgttgaaaacatcagttgtcatggtgcagatgatattcctgtttgctatccttgctgtaatgaccattgtcctaatggaggccaacactgttttggcacgtgattgcctatctggaactttcggaggtccttgctgggcctggagtggagaaaagtgccgccgtctctgcattgaggagggacatgtcagtggacactgcagtggcgcaatgaagtgctggtgcgaaggatgctagatccactgcagttcaaaagtgcatgctgtttttttgtttattctgagccaataataaatatactgtacaccgcacagtaaaaggcacgtaagcattgcctttcaggagttatctcttgatttgatttaatatgtatgtggtaagtatattaaacaaaaaggtgcatcaacatcaagaaggtatagcaattctatcatcccaaaatagcgatgcgcgttttgtcgcgtaaaaggcccaaaagtatgcctttcgaaagttatattgcagttatttgcattttcacctttatgctaatcggttaatatacaaattctgtacctatataagagtgcagtcggactcaagaaactcaaaagtaaagattttaaccagaagaacattctaataatggctcaaattaaaggattgtttgctctcctcgctgtggtgaccattgtcctaatggtggccaactcggcttcggccgtggattgcccatctggaagattcagtggtccttgctgggcctgggatggagagcagtgccgtcgcctctgcagggaggaaggacgtgtcagtggacactgcagtgccagtctgaagtgctggtgcgaacaatgctgaggatcctcatcgtccaatatgtttgacacatatgtgtgtcatatgttttttattgttttgaaaagaaaaataaagaatatacttcacagcaaataatacagttttatttctacttaaagaacgaatccttttaaaatcataaatttacttcgaaaatgagatttataatggaatggaagaaataattaaatgataaataatcagagttaacttcaatagaaagctaaaattcattta

SEQ ID NO: 22535 - DNA, 823 bp, DROSOPHILA
atgcatggaggtggtgtagtcctatataagcgtccccacaagctgtcgataccaaacgtcttcgagaactcaagtaaagtaccagactcgttcggaacatcagttgcaatggtgcagatcaaattccttttcgtcttcctggctgtgatgacaattgttgtcctggccgccaatatggctgatgccgattgcctttccggcaaatacaagggtccctgcgccgtctgggacaacgagatgtgccgacgtatttgcaaggaggagggacatatcagtggccactgcagtcccagcctgaagtgctggtgcgaaggatgctgaatccatactatatccatttgaaatgtgtatattgaatatttcattctaaacaaataatatataaatataaaggcctcttacgcttatcactcatacgcactgttgtcttttaatttcctgtatggcaatgtgttaggagaagtgaatgtttacatacatcattaaatcgaaaagatagcaattctaggtaaataacttattatgataacgatgcatttttaaatcaatgaagttgacacatggcacacataaatcaagtgtttctggaaaactaggattatatcggttattgttagcttgaatttccgagaagcttatcgattgctacgatcaaataaaaaatcttaaaatctgtatctctatataagcgtccccacgagtggtcgatgccaaaagtctttaagaactcaagtaaaattcccgactcgttgaaaacatcagttgtcatggtgcagatgatattcctgtttgctatccttgctgtaatgaccattgtcctaat

SEQ ID NO: 22536 - protein, 106 aa, DROSOPHILA
MHGGGVVLYKRPHKLSIPNVFENSSKVPDSFGTSVAMVQIKFLFVFLAVMTIVVLAANMADADCLSGKYKGPCAVWDNEMCRRICKEEGHISGHCSPSLKCWCEGC

SEQ ID NO: 22537 - DNA, 2219 bp, DROSOPHILA
taattccctaaccaaattcctcttttccccattatgaagatcagctgctgtaagtatcatatcaaaaatagatcacgaagtttactttaaaattgcacgtttcatttaggcaactgctgatcaaactctgagcattgtttatcatttatttgcgaaaaatctgtaaacaacccttcacaatgagtatatttcaatgaaaggaagttaagtgtgttacataaatagatgcaaaaaaagcggggcagtagtaatgctaaaatacatcgttttggatatgaatgacccaaaacaaccccaacttggggtttttccattatcaatcgagttccgtatgatcagtaaaatatataaaaatttttatccatagataagaaagggttgtctatttattactccatgcacatgaatagactcttcttacatgtacatctttttttagcatccttcgcaccagcattttagactggggctgcagtgtccactggttcgcccttccctctggcagatatctacgcacttcttcctgtgccacacagcacaggaacccctatatcttccggaaaggcagtcggcatgtgattcttccgctcccaggaaaattatcatcaagacagcggacaggacaattaggaacttgatttccatagtttcggtaggaggtctggtaacttagtaattgttgaaatgcaatcctcaagaaattgatcgctctcagctcagaataagcgcttaaatacgttccgatctgtaagttttacactcagtacgacgacgctgtggtgaaatttatctcgtggagataaaaatatttacccagacttttcggctgcctttacaatttcaccacgtgccgaatataacaatgcattgatctgaacaataaatattggttcttgacttgattttattttaaataattgtgaatgtttagggaattgaattttatgattgatacataatcattctgggtctatagaagttgtccaatttcggtagaaattcagcatccttcgcaccagcattgcagcctggcactgcagtgaccactcactcgtcctcgtccctcctctcggcaaacccgcctgcatgtctcgttgtcccagacggcacagggacctctgtaccttccggaaaggcagtcggcatcggcttccttggcgcccaggatgaccatcatcagcagagcgaggaaggtgaacaggaacttgatttgcatcattttcagtagttttcgtggtgattgttttctttgatgtactaatcaattcagattcggatcgaatttgttttcaagtgctttcgacgagcttatatagggctggactagtcgatgtcgctgccagcgtcgttcgattttatttattgatactaccttttgtctggataaatatacaatacacacaatataattgtaagaacgtctctcaatctaggtcccatgaatggttcaaggaaaagcaaacaataaatggcgtaatgcacttaattatcacaaccaaaacaacaggatagtgatatttgctactttgtgcttattgcctaaagcacatatattttcgaatgcaattctataaagtttaaattccaacggagagcgcaaaattcgatataagcatcgataactgcacctagaagtgtgaccatgtttcgcgaacctcaaataccatgacttaattttcaaattccactgagaaccggatcggctattttgaatagccagtttttctctgatcggcgatttgacaagacgtgcgcgcggactgaaaattggatcccaaaaccgctaactgaaaaataaataaagccgtgcaaaagaaataaaaagtaaagaaacaacaagcgggccaataagtaaaacgtaatcagcgtttcaattctctcttttatttgcgctctcgctctcttaagccgctcacattgcacattgttgttgttatgctcgttgtagtttttgtgctaattagaaaataccattgttgttgcttttgcgccggtgtttaaaacgcggctatttctaattactgccccaaaacagaaatgaaaacaaaaaaagaacaatagaaaaaacccactaatctggtttttgcgtgtgaaagcaactggtgtgcattggaatttgttattaaggtcgaagagcagcaacaagtgacaaaaattctttggcataaattaaaacagaatccccaaaaagcgctgaaaaacgttaagatttcttcggt

SEQ ID NO: 22538 - DNA, 219 bp, DROSOPHILA
atgatgcaaatcaagttcctgttcaccttcctcgctctgctgatgatggtcatcctgggcgccaaggaagccgatgccgactgcctttccggaaggtacagaggtccctgtgccgtctgggacaacgagacatgcaggcgggtttgccgagaggagggacgaggacgagtgagtggtcactgcagtgccaggctgcaatgctggtgcgaaggatgctga

SEQ ID NO: 22539 - protein, 72 aa, DROSOPHILA
MMQIKFLFTFLALLMMVILGAKEADADCLSGRYRGPCAVWDNETCRRVCREEGRGRVSGHCSARLQCWCEGC

SEQ ID NO: 22540 - DNA, 2195 bp, DROSOPHILA
gacttgacctcatcacctccccttttttgcgacccattgacgccacttgttgctgcattgtccagtttcaccctcgccgcagaacctctgtcagcgtctccaagtggtttcttttgtgtcttgatggaggagtgcatcctcatcttgcgcaggtcggcatttgacagttataagggattctctatcgtatttctcacttgatgtcaggctttatcaatacgttattttgcgtggagggattattctgggggagccggaaagggaaggcgagcgaaataaagagcgacggtgagagcggcaggatttgagtgaagtttcagccgaatcctaattgaattttctgcgcaggagcgggcaaaaaggatgcgagccgaaagagaggagagcggaaactttaacccgcagtgtcaacgaaaagtttgcactgaaaaatataatctaccaggtaattagcttataaacatttttttcaaaccctgtttttaaaaaccaggatatatatttttaaatgtcgtaataatttgttctatttaaagtatttacatatgcaattatatacgaactaatctattaataaataagttttataagggggcttgtcagttcgttttttttaggggacaaacccattcattatgatttgcagccatctggttatttcgctagaatttaagaagaacgtgctatagaacaggtttgtgattcatatgagtcgcgaattaaattcgtttaggctttttttctctcaaacgtgacttttgtggttttgttttgagcaagtatatttcttatcagctctagagctcagcagattcggtacaaaaaccgctgataagcgatgggaacccctcattgtgtcacaattgattgaagattattaattgctgtctttcgtgtgtttattgcttactgtttgcagaaagtaaaaaattcacaatttttataaagatttttcaaaacaaatttgatcggatgacttctccgcggtatgcacacatctttaggcgggcagaatgggtggtggcctgatggcagcttgagtcaggtgatcctcgatggccagtgcctcgcgcctcactcgaatggggcggggatgggaggtggggcgtgggctgtaggggcgtggcttgccgggagtggccacacccatggcaaaaacgcaagcaagcagcaggaaaacgatggtgaacttcattgtgcttggagtggtggacaaatcgaactgatttgatttcaatcagagcacttggctttatatagatgccatcgatgcaacaagagattcgaatgggtggcacgtcttggctgtggttgccggtgattccccatcttggggacttttcatgttgcctatcaacgaataggcgactgaaggcaaacgtgttgaaaattattatttttattttttaatgtgggttttcgctgcgtagtttacatcattcggtactttacattttaggcggctggttattttaccaatgccttacaaatttattattattttttaaaatttgaatatatgtatgtatggtttacatcgctaattttgataatttttttggtgcttgtaaactgctgaaggaagtggaattttaaaacgaacttttcccgccaagctgtcactttcactcgtgtcatctctttcgcactcgccgtgacaggacgacacttcctctctttcgctctctttgaagtcctgccgtccaacgcgtcaaatctcattagattggatacacatacacacacacaagcacaccttagcgtgcgacagcggaacgcgcttgagcgagcttttccgtccgcttttctgagcgcaacattttcttttcggggctctttgggaaaactcttgggcagcttgccaaacgctcgtatagaggccagacgcgaggaaaactctgcttatcgattacgcacgtaacacatttgccccacagtcgaatagttaaatagttcaacgaatccagccagccaaacaatatttctggtgcgtaatataactattgaatcaatggtgaaaagtgcgaccagtttacataatacaaaggatacgaaataaggacttaaagaaggctttcgccccaagtgtctcaacctgtgacaatggccttcaagaagtgtgcgaaaattgtctatatatagagtgtgatatgtacctcgttttttgtgggcacgtgtgagccattaaatgggaa

SEQ ID NO: 22541 - DNA, 195 bp, DROSOPHILA
atgaagttcaccatcgttttcctgctgcttgcttgcgtttttgccatgggtgtggccactcccggcaagccacgcccctacagcccacgccccacctcccatccccgccccattcgagtgaggcgcgaggcactggccatcgaggatcacctgactcaagctgccatcaggccaccacccattctgcccgcctaa

SEQ ID NO: 22542 - protein, 64 aa, DROSOPHILA
MKFTIVFLLLACVFAMGVATPGKPRPYSPRPTSHPRPIRVRREALAIEDHLTQAAIRPPPILPA

SEQ ID NO: 22543 - DNA, 3967 bp, DROSOPHILA
tggccatccgattttaaatacttgcaagatataagatttaattgagattttataataaaaagtaataagaattatagaattatagatcaaggggtgtataaagaatataaagaaatcgattcaccatcataggcatctcaaggctcaagctcaagggcagttttggtggagatcgtaagaaatttcgaaatcaatgtaaacgtcaagacgcgatcggataatcgactgaatgacatctgcttgacgtattttgaagagcgatagtaaaatggctgaagtgttgttgtaagtgttgataagataatgcgccaattaaaaatgaaatcagaaatttgattaactacttaggtgctacacacattgtttgtccagagtatctatacccattactcgttaaatgaaaatgggtatgttgtattcctagaaaagtatgcaactgatagatggaccttctgaatacgacacattgttttttgttttcatcaagcatcgcactttgcaatcctacttatttatttaaaagtcgatacattgctatttttcctttaattgtttatggtttatgtatatgtcgtttaatttcacaaccgtttattccatttctctatgctactaaaaccgttcccttaaaacacatctttatctgcgtgctttagatacatatgccatgtacaataattgtaagtttgagcacttagtgaaatgacaagctgaaaagttctgtttcatcgtcatatcataaaatggcttttcttaacagtttttgtactactactttgtggcgcatgacctaggactaggtatattgtagccccttgatcttgataacgaaatcaggcattatcttcaaatggtgcaattttatatacgacaaatattaacagcggtggtgaatgcaatttgatcaatttgtttactgggtgaatccatccacttgactggcgcgcaagttcaatttaaatgactgcggcagctcaattgagttccagttggttttcatccgcgttggcgagaggttgtgccatgtgtccgatttccacggctctttttgtaattgcggccatcctggccttgatctatgtctttctaacatggaactttagctactggaagaagaggggcattccaacggccaagtcatggccctttgtgggcagttttcccagcgttttcacccagaaacggaacgtagtctacgacatcgatgagatctatgagtaagtgtatagagttagctacgttatctggttactgattgcatcatctcattaggcagtacaagaacaccgacagcattgtgggagtgtttcaaaccagaattccacaactaatggtcacaactccggaatatgcgcacaagatatatgttagtgacttccgcagcttccacgacaatgagatggctaagtttgtgagtagattgcaaatacatactggtcttaggagcccatttcataagttaattcacacaatagaccgacagcaaaacggatcccattttggcgaataatccgttcgtattgactggtgaggcctggaaagaaagacgcgccgaagttacacccggactttcggcaaatcgggtaagcttaggttgccctcgaattgtttattcaaaacttatctcgtgctaatgtttattttcactgggggccctgatacccttatcaattgaagtgctccaatcaattaacgctctgcctccccaaaaggtcaaagctgcctatcccgtctcgctgcgcgtttgtaaaaagtttgtggaatatataaggcgacagagcctgatggcccccgcccaaggactaaatgcgaaggatctctgcttgtgctacaccaccgaagtgatttccgattgtgtcctgggcatttccgcccagagtttcacggataatcccacacccatggtgggaatgaccaagcgcgtcttcgaacagtcttttggcttcattttctacacggtggtcgccaatctatggccaccaatcacgaaattctactccgtttcgctgttcgccaaggacgtggctgcgttcttctatgacctcatgcagaagtgcatccaagttcggcgggaaagtccggcggcacagcagcgagatgacttcctcaactacatgttgcagttgcaggagaaaaagggactgaatgcggcggagctgacctcgcacacaatgacatttttaacggacggattcgagaccaccgcacaagtgcttacccacacactccttttcctggcacgcaatcccaaggagcagatgaagttgagggaggagatcggtaccgccgagctgacctttgaacagataagtgagctgcccttcaccgaagcctgcatccatggtgagttttttggcgaaatctgaagttatttagtatgcgtataatatctatatctgcagaaactttgagaattttctcacctgttctggctgcccgcaaggtggtaactgagccctgtgaactgacgaacaaaaacggagtgagcgtgaaactgagacccggggatgtagtcatcattcctgtgaacgccttgcaccacgatccccaatactatgaggaacctcaatcgttcaagcccgagcgattcctgaacatcaatggcggagccaaaaagtacagagatcagggtctattctttgggtttggcgatggaccacgtatttgccccggtgggtaacatcatttttgaaacaattaaagttactaaaaaaaatctatgcataatttgtaggtatgcggttttcacttacccaaatcaaagctgccctggtggaaatcgtgcgaaacttcgacatcaaggttaatcccaaaactcgcaaggataatgaaattgatgatacctactttatgccagccttaaaaggcggcgtttggctggattttgttgaacgcaattagttattcaataatgttacgactttatattaaatatagtttatccagttgcatacatgttatatttccaaacactcttaatactttaattttgtaacttaaaaccacacttttagtctcgacttagggctagttgcactaggggcagcaccttgatagaggacaagtctgccagaatcgcttcgatgctatccaacgaggccacctgcatgatgctctcctttcgaaagctaagaatgatgatggcgaatagaggaaggatctccaagctatcaaagccaaggatctgaaaaggaagggataagtactgccaataagaacggaggtgtatttcgtaccagatcccagaggaccagcaattgatcgggaggcaaatgtccggaaaacgctcgcataagccatttgaagaccacccgcaggctaaggaaagatatgtcgtgaaatgggtgaaatagctgtctaacgaaaaacccaatcccaactcacggctgtatctgaagctctcggaaatgggaccataactgcggttcgtatgtctgcagcagcttctcgaagagcaggcacagactgacaatcccttgaggatgcgtgtttatggtggtcaagcgatggcagtaccggatatagaaggcccggaatgtatagtatagactcaccggcgagtcatacagataacaaaagggggcggcaaacatgcagatgccgtggaagggcaccacacccgatggaggaccttcgtaggtcttgcccttcaccggaaacgtctcgtattccacacatccaccgatatcggtgtcccgagaaaagcagagcagcacctggtagagcacgtcctcgaacacaaagtactggtcgtcgttggaggccgtcaactgaatgtccttgaagaccagtttgtcaacgatgtgatccgtagtccaaacggcattgcgcagcttttgccagtactcaatatccttcgggggtatagagatgtataatgaggttattgatcccaaaatcagtagttacgtagtcatgtagcttgctgtccagcaccgaagcccagagagctcccctataaggtgcg

SEQ ID NO: 22544 - DNA, 1598 bp, DROSOPHILA
ccgcgttggcgagaggttgtgccatgtgtccgatttccacggctctttttgtaattgcggccatcctggccttgatctatgtctttctaacatggaactttagctactggaagaagaggggcattccaacggccaagtcatggccctttgtgggcagttttcccagcgttttcacccagaaacggaacgtagtctacgacatcgatgagatctatgagcagtacaagaacaccgacagcattgtgggagtgtttcaaaccagaattccacaactaatggtcacaactccggaatatgcgcacaagatatatgttagtgacttccgcagcttccacgacaatgagatggctaagtttaccgacagcaaaacggatcccattttggcgaataatccgttcgtattgactggtgaggcctggaaagaaagacgcgccgaagttacacccggactttcggcaaatcgggtcaaagctgcctatcccgtctcgctgcgcgtttgtaaaaagtttgtggaatatataaggcgacagagcctgatggcccccgcccaaggactaaatgcgaaggatctctgcttgtgctacaccaccgaagtgatttccgattgtgtcctgggcatttccgcccagagtttcacggataatcccacacccatggtgggaatgaccaagcgcgtcttcgaacagtcttttggcttcattttctacacggtggtcgccaatctatggccaccaatcacgaaattctactccgtttcgctgttcgccaaggacgtggctgcgttcttctatgacctcatgcagaagtgcatccaagttcggcgggaaagtccggcggcacagcagcgagatgacttcctcaactacatgttgcagttgcaggagaaaaagggactgaatgcggcggagctgacctcgcacacaatgacatttttaacggacggattcgagaccaccgcacaagtgcttacccacacactccttttcctggcacgcaatcccaaggagcagatgaagttgagggaggagatcggtaccgccgagctgacctttgaacagataagtgagctgcccttcaccgaagcctgcatccatgaaactttgagaattttctcacctgttctggctgcccgcaaggtggtaactgagccctgtgaactgacgaacaaaaacggagtgagcgtgaaactgagacccggggatgtagtcatcattcctgtgaacgccttgcaccacgatccccaatactatgaggaacctcaatcgttcaagcccgagcgattcctgaacatcaatggcggagccaaaaagtacagagatcagggtctattctttgggtttggcgatggaccacgtatttgccccggtatgcggttttcacttacccaaatcaaagctgccctggtggaaatcgtgcgaaacttcgacatcaaggttaatcccaaaactcgcaaggataatgaaattgatgatacctactttatgccagccttaaaaggcggcgtttggctggattttgttgaacgcaattagttattcaataatgttacgactttatattaaatatagtttatccagttgcatacatgttatatttcc

SEQ ID NO: 22545 - protein, 502 aa, DROSOPHILA
MCPISTALFVIAAILALIYVFLTWNFSYWKKRGIPTAKSWPFVGSFPSVFTQKRNVVYDIDEIYEQYKNTDSIVGVFQTRIPQLMVTTPEYAHKIYVSDFRSFHDNEMAKFTDSKTDPILANNPFVLTGEAWKERRAEVTPGLSANRVKAAYPVSLRVCKKFVEYIRRQSLMAPAQGLNAKDLCLCYTTEVISDCVLGISAQSFTDNPTPMVGMTKRVFEQSFGFIFYTVVANLWPPITKFYSVSLFAKDVAAFFYDLMQKCIQVRRESPAAQQRDDFLNYMLQLQEKKGLNAAELTSHTMTFLTDGFETTAQVLTHTLLFLARNPKEQMKLREEIGTAELTFEQISELPFTEACIHETLRIFSPVLAARKVVTEPCELTNKNGVSVKLRPGDVVIIPVNALHHDPQYYEEPQSFKPERFLNINGGAKKYRDQGLFFGFGDGPRICPGMRFSLTQIKAALVEIVRNFDIKVNPKTRKDNEIDDTYFMPALKGGVWLDFVERN

SEQ ID NO: 22546 - DNA, 2294 bp, DROSOPHILA
aaacttcctcagttctaagatatgaacaagagagaatgctttagcaaaagtgtctttagtctggctgtaacttgtattgttaataatgtgttcatttgtgttctccaactcttggagcttttacatttttggataatatatttttatgtatttcgattatagctgtctctcttgttttatttatagtttcatcaaataaaaatataagttagtccgttagtcttgatatcttttaatttggtaatgaaatacgttaatatgacgttcggttatattgtataattgcaatcacccatggcaccgtctgatgtctgatgtctgctatatcgcatatcaatggaaaatttcaaagaaaataacaaaatagaaaatattattatataaacattttttggcatattgctagaaatgtaaggccaatagtaagatacagagtgaatgcacttttcaaagttgtgaacattacaggtttgttgtaatcttttggctctttctggccattttttataagcgatccggataccttatctagaccattgcagccaaagttcctgcggggtaaggacacggataaagtctgtaaaatcgccataatggtaatcaaagcaatgcaagtccggacaatatggccttccctccctaggaaaaagcaatgaatatgcaaacggcacagagtgagaacgtcgccgaataattaaaatcgagctggataccgtttttaagccagcgggagtgagatcttctttggccggattagagataccggcaaacactttacggcggacaattaagtgcggctcgtaatcggtctgtcgtaattatagcgacgcgccgcgtatttatctagagcaattaacgccaagccggggagggccaagtcgtatattttacatcaccaaagatgcgcaattggaccagacgctttctcaactttaattaaaactatataagggcaaatacattcagcgaaaaagaatattacatggcttaatacaatgatttaggtgcctggattttgcactacaataatgatgtagttctcggagggcagcacaatcacctcgtgaaccttggtgcgcagacgtattgtcaccagctcattgctggcatccaaattggtaatcattttggccgccttataagttaaggtgctgatcaaggccgcgtaatgcacggtcaaggtgtactccatggtggtcttgattggtatagcgaacgggtccaaaataattatgccagaaacattggggtagttttgatagcgtttcagcaaatcctcgatttccgcggacattatatataggacagtagtgtacttttaaatgtaatttatcgatatatatgtatatatgatatttgatgtgagtgttgataagtcgcacactaaggtaatcgattatacgactactttataaatacagctctaaggcagataaaataatatacataaatataaaaaattaattgatacggcgttttaaccgacgtatacaccacccatgaatctatgtaggtcaactatagctcaactatgatgggataaataccatcttaagtgtcctgaaataattttatctcatcagatttaagaacatctcactatgggaagttgtaccactttttctggccgaaattaataactcaagaacgggtagagatattaagataatttttgcaatggggtttattttttgtggcttataattccagaccggaaaaatatatttcattatttttttttgcatcgggttacactagccaatttcttttatgataccaaaagttgtgtccgcggcaccgccccttatatttaattaactaattttgtatagggatttccctaattccctatgctttttctagtccaagctaaaaaaaattaatctcgtggtagtgattgcatattaaattattttaccaataataaccacaaaaataataacaaattaattaaacaattcaacaacagccttgctcttatgctgaaattactctgaatttgaaaaggtagggttcatcataagcatttaaactccagtttaccgcgttttcgattgcatttacacgcatttggcttcggcagcaaatatcgtcagaataatccaatccaaattaattagacaaaagatgtagcctggaaacctttttatctggccacaaattgtccaagcccgcggcgctaacaccaataaaagccttagttatacgactaatgtatttgtaaaatcagttatacattctcagctacgatcacgatcatactattcattcttgatggattgtacatagatcaa

SEQ ID NO: 22547 - DNA, 294 bp, DROSOPHILA
atgtccgcggaaatcgaggatttgctgaaacgctatcaaaactaccccaatgtttctggcataattattttggacccgttcgctataccaatcaagaccaccatggagtacaccttgaccgtgcattacgcggccttgatcagcaccttaacttataaggcggccaaaatgattaccaatttggatgccagcaatgagctggtgacaatacgtctgcgcaccaaggttcacgaggtgattgtgctgccctccgagaactacatcattattgtagtgcaaaatccaggcacctaa

SEQ ID NO: 22548 - protein, 97 aa, DROSOPHILA
MSAEIEDLLKRYQNYPNVSGIIILDPFAIPIKTTMEYTLTVHYAALISTLTYKAAKMITNLDASNELVTIRLRTKVHEVIVLPSENYIIIVVQNPGT

SEQ ID NO: 22549 - DNA, 8136 bp, DROSOPHILA
agctgcgtaagcggttttgactttttggtgggaataacggattcggcagcggatgttaatgtttacatgagggcaggcaataacaaatttattgtcaccagaattggggttcttatgttatatctgaatttatgacttatatcctaaggcattctatgattttgtttatggctgttgctatgtggtaacgtatgtgtaagtatatgtagtcaagtgttatactatggcacatatgctactatatatatagttatatatataaggaagatacgaatacaacttccaaataactccctgcattcttgagattaattggtatcaagaaaaagcttcgactcttcagatcattcagtcaagtttattcaaatgaaattaattacaaagttttgttttttctaagctccgctccggtgctgaaatttgaccagcggccagagttttgccggccgcttgtaagctcagcgggccaacaacggctgcccaacacaggatttacaagctgtgactgatttatttccctcgtttcagcgcgatggggtgggaatgactacattaatatcgatatcgccagccaaacccaagcggttacgtacggaggtcgatcgaatgttaagtctaagggtaatcgaagaagctccaagttccgcaaggtcctcatcggctatcggaatttttgagaccccatacaaagcgtcagttacgtcgcttcttcggaatgactggctggtacgagagaattattccaaacttagcagtgactgaggctttctctgacctggaaaggaacagtctttgaataaactgaagctgcccaaaaatattttgaggcgattaaatccaaactgtgtttggcctttcttcgcgtcccaaataccacggaccatccatcacccaatgcgatacgtcttcgtatgttattcgttcgaggagggaaatgagctgccgatatgtcaaaaaaacttagcctagcccagcgaaactacaccgtgactgagttggaatgtttggcagtggtacaggcgatatagaattttcggatgtacccatcgatgtacacccgtttaatacatttacagactacaccagtcttaagagattaatgaaccaaaaggatcttagtgggcgtctactgcgatgggccatcaagtttcagggttacaatatttgtatagatcataggaaaggatcacaaaatatcgtggcagatgcgtccccacaagtacacgaagtagaaaccgatatctcaccaatcgagatcgaaaacgtccctgaaatcgaattagactctcccccgtatttagaagttggaagttatttgttcagaataacaatccgttttggaatctgcgcactgtcaaccagtatctgcccatcacgagattgctttttgattgattttgtttgcataggagtaccggaaaaattagaaagcgacaaagccactcaatttaaaagccattagttcgtttcattcctaatcacttatgaaccatgtgtttacttgagtttattcgcagcaaagtgacccctccaagcgagtcaattgatccgaaatcgcggtacgtacatccgaccaacaggattgggaccaatatataagcagcataaactgtggcttgcatacaccaatcgattggccggtccccggtatggtagtgtatggagaagaaatggtcactaatgaaaaggaatatacggttcttagaaacctctgcatatttaacatttcctaacctgagatcacccgaaatgcaactctgctgctgttaggagcttaccgccattatttccgacaacagttcagactcttgctatactgctctggaaaaagaaccatgtaaaagtctggatcatcgattctgacagaatatggtgatacttatattcaactgaaattggtatgtggattctgtacagttttggttatctctggacacaggaagaaaaacaaaaaattggccagattaagttcctatgttgtatctagccatcacgccgcacgctgccattatccacgggctgaacacccctagtggccgcttacccctaaaaatttgacgaacctggcctagccgctcggtccctcacaatagcaaagagtcacagtccggcgcattactttacctagcttccggtcagctcaaatgggacaccgaaatagttcaaaatgactaccacacctgccccgatgtcaatttaatttacgtagatggctcgggctttggttaaaggcgcttattcaaggtgctcgaaaacaggaaaaaaacgattgaccgtatcgaagagttcgtcaacggcgagattcaggtagtgcttagaaacggcactttccaaaatttgaagcccccctacaataacccagtatgtgttacgacacatactacggttaaaaagcacacttacgaatagggaaaaaggaaaatgcgtttgctatcagactttcaaaagatacggacggaatccgacaggtacaccatgccaaatatctcaatgattttggtcgatctggtcaagaccaaacactttacgacgctcaatctgaagtccggctaccataatatctcgatcgacgattgcgaacgcgacacaagtatgagttccgttgacttccatttcagttacgtctatgttaatgatgtaatcagcttttcaattgatgaggatgcccatattggcaagaccaaatactttacgaccctcgatctgaaatccggctaacataaaattatattgagtgtttctaaagttttcccaagtcaaataaacaaaaattgttcaaaagtgtgggcatggcttggggggcttgtaggcgttaaagtgaatgcagcaaaacgttttttggcagatcgatagaaacttttaagtctaatatgtatatgaaagaatttcaaattttgcaaaaatgtgggcgtggcaattttgggcagtttgtgggcgttagagtggaaattaacaagagcggtagtgtgactttgtcactagaatctgtatgcttattctcagctttcttctagctttgattatagtttatgagatctcgacgttcatatgaacggacagacagacggacagggtcagatcgactcggctattgatcccgatcagaaatatatattctttataaggtcgggaacgcttccttctacctttttcatacatttcaacgaacctagtgtaccactttattctacgaataacgggtataacaataaagtagaaaataaaaaaaataaaatgtaatatttgtacagtttattaataaaacgatacttacttccataataaaaagacaaatttaaaagcactcagaaaatattttggagacacaagaaaatactgacgaacctaacgattcaaaattgaaaatgcaggtaagagaaacgcaacaacaaaaatgcttgcgctagtttttctgcttgttttcgctttaccatttgcttatcgtaagtactgagtcagaacaagaaagaatgctatagtcgagttccccgactttcccaactcgctacttagctggtgtgaatgcgaaagcaaaatttcataatttttctgggatatcgatatggggtataaaatgagaaaaaattaaaaatcgatagaaatttacacgacttataaaactatgaaaaatatccaaaaatggttcaaaaatgtgggcgcggtaaagttttttggcaggtcgataaaaatttacacagctaataaaattatgaaaaaaatatcaaaaaaaaatttcaaaaatgtaggtgtggcagttttgggcggtttgtgcggttgttagagtgggcgtggcaaaatgtgtcgacaaactttcgcttcgtttatatctccagaaactgtatgctgaatcgcaaactttctagcttttatagttcctgagatctcgacgttctacggacagtcggacatggccatatcgactcggctattgatcctcatcaagaatgtacaaatgtactttatatggtcggaaacgcgtacttctgcctgttacatactttcaacgaacgtactttaagatactttattttcgagtataattttcaggaaatgaattcattttacaatcaacaatatagaagcaatcattaaaggtaacttgttgtaatacattggaagtggaattattccggaattctggatgcattcccataaatgcttctgtaagcattctctttttatattttattcaactagaagtatataaattgatcagtagccgtgttggtttattttgcttatttatactatgatagacgaaagacaaaaatctgtattgggaataattaatacaattaattaatataaattaattaattaattaattaaattaataatataaaagaagagagaattcaatagtcgagttctccgagtatcagatacccgttacttatgtactgggactgcgaacgcgaaatgtcataatttttctggaatttcgatatattattgttatatatgtatattgcttaaaagtgagagcgtgtcagttttgggacgttagtgggcgttagagtgggctctatgtctgtggaacctgtatactttatctcaactctttagcttctatagttgagagatcccgttgttgatacagtggacagacagacagacggacatggccagatcgactcggctattgatcctgattaagaatatacaggctactaaattttgtttgtaaaatttgaggtggggtcagaaataaatttttaataacataactaagtgggagaatgatattatggtgatgtggaataaacatcaaaagactactgagtaaactatttttatattttttgatataaaaaagatatttacttttcatttcggccagacaaaagtgccggttttacaaatcgaaaaattgttatcatttcaaaaacctcagcaccgatttttcgattgcaaatcgaaatcgtaagatacgttttttcttacttttcaacaaatctaatacaccattttactctaggagtaacgggtatatacatatagtacattgtaatttattgaaaaccatgcacgcgtttatgttatggaaacaaccttttttcttgttatgtggataaaatatcactacacaacaattatttctcacaaactcttccgaactttccactgggtcgcaaaaaatggaaagtggaataaggaacatcgccagcttagactgcaagttagattatgattaggctcataatatattgtcaaatgcaggagtttacaccactcaggccctattaaaagaaaatcattgtaagctgtactacaattgttgaaacgaactaattgctccacataatcatggaaattaattttggctttttgttaaagaactctatattcctacattccaacaaagctgccttgtgcagcgagtaggctattattaactatatttgaaaacaaaactaagtaatttatcgtgctaagaatttacatgatacaattttattttatattgtatgtattaaaatttgtttcatatttagaaaaaaaatattaacactaaggttcaaataaacaaatttttttactattcatatttagaaaacatttccgtactacggtacatagtcaatgttagccataaaaagcatacaaaaatgaacgaatttgaaagagagcgacaagtaactttgattaaaacatatacatacatagtaaattgtgtcttaatatttgagcttaaaataaaaacagaaaagtcatcaaactttactggaatattcaattttattctaagtatcggattttcacatatgtcaaaatttccaactgtttctttaggatgtgctctttgggttttgggtattaccagttgtcaaaatagtgcagttaagcccgaaataaatatcgataacgatataggaaaattgatttctctatttttgtgaattcggtaaattatcaaaattaaagattggaaacattggttgaaatggcgtccgcaggttagaaattttttttataatatctaagtttaaagtttaaattttttttattaattgtaaaaaggtagtaatttaattgtgagattgtgtggttccgcatggattttttcttgacacgtaatgtaaaaggaacacatgtccacctgcatgcatatgtgtaatcttgcttaacataatattttattgtatatattggttggtcatcatttctacttaagtatgtatttcaatttaatattttattttatttttcaggaaagaagggcaaaaagaataaaggaacagttatctccttgcaatcatttctatgtaattctgacgctccagtcggaacaacccaagtctcaaaaaaaatacgaaatttagatggcgatgatagcgatgatggaagtggtacattgccgttggtttatcagcttccaaccgctccgagggcaaatcggatattcgacgataattctattcctcataaagccccatttattgcttatatcaataatttaccatttgacgcaaatgaagatgacctctacgagttctttgaaggtattaatttaatatctctgagactaccaagagaagatggcgaaaatggtcgttccagaggctttggctatgtggagttggaaaatcgagaggatttaattcatgtacttagcttgccagacccctctattaaaggtcgccgcattcgcattgagctatcgaatgaaaacgaccagcaaagccgccaaaaaagtaataggcggtttgatggttttggaaataatggagataatagggattccggaaattggaggcgagacagccaaaacaacggcagtaactttggttattcttccaattttgaaagaagctttaatagagagagaaaatctttaccagatagagatgatgtgaacactcctggatcttggcgcacgagcgcaaggccgcaatctattgatacttcccctacacgcagagaagttgaacaagtatctgaaaaatatcgcgaaggtcgagtcaaaatagcagacagatattcccgagaagagacatccaaagttgaagaagaaaggccaaaattgaatttaaaaccaagaactttaccattgccagatgtaaagacaattgaattcgaaaaatgtgacgttgatgaatttaatttggataaacaaggcggaacttcatcattaaacgtgtttgggtctgcaaaaccggtagatacagcagcaagggagttggagattgagcaaagattggctctcgctcgaaaacaggataaggggcgcagagaacagggtttaaatgaaaaacttgccgagctccaggtggataaaaatgataatgaaagtctaagtgcaacagttagttggcgcacgaatcaggactacaaggaaagcgacaaaattaataagtgtccaggtaactaaaatctaaatatttgtctgaatgtagaagtgaattttatctgacttgagtttttaatctaatcaaaaagcataataataataaataatcagaggaggaggaaatatacaacgccacataaaatacaacaaattaacatttttcgaaaatgtgggagaagccgtaatttggcaaataatcaataacgtatctcctatatatttggttttcaccgtgcacctactttttgggtgccgacaaaaaatgcgatgtctgtaaattataccattgcttaaaacccaaaccacaaaaaatactgtatgcgggcttacttatgcgagaacacgattttcaagctggaaatattttatttaaaaaaaaatcataattaacttgtattattctattaataaaattcgagttgcacaaaattattcaaatagttggtattttcatatataatacttaatattagtaatgtgcacttcagatacatatgtattgtatataatgtgtgttctccatattaaatttttgatatgctacaggcagcataatttccttctttcagaactcaatataaactattgtgggcatcggaaaataattatttatttttataatttaggtaaatgtaaatgtagttccaaagtttttatttatatttttttgaagatgaaatctgataggtgacgtcccccattctccatacattgcgtaaaccgatttctggcgtttgtcgtgactcttgttagcatagcaggtgttatgatgatgatggttttca

SEQ ID NO: 22550 - DNA, 1522 bp, DROSOPHILA
atgtttggcagtggtacaggcgatatagaattttcggatgtacccatcgatgtacacccgtttaatacatttacagactacaccagtcttaagagattaatgaaccaaaaggatcttagtgggcgtctactgcgatgggccatcaagtttcagggttacaatatttgtatagatcataggaaaggatcacaaaatatcgtggcagatgcgtccccacaagtacacgaagtagaaaccgatatctcaccaatcgagatcgaaaacgtccctgaaatcgaattagactctcccccgtatttagaagttggaagttatttgttcagaataacaatccgttttggaatctgcgcactgtcaaccacgagtcaattgatccgaaatcgcggtacgtacatccgaccaacaggattgggaccaatatataagcagcataaactgtggcttgcatacaccaatcgattggccggtccccggcgcttattcaaggtgctcgaaaacaggaaaaaaacgattgaccgtatcgaagagttcgtcaacggcgagattcaggtagtgcttagaaacggcactttccaaaatttgaagcccccctacaataacccaaagggcaaaaagaataaaggaacagttatctccttgcaatcatttctatgtaattctgacgctccagtcggaacaacccaagtctcaaaaaaaatacgaaatttagatggcgatgatagcgatgatggaagtggtacattgccgttggtttatcagcttccaaccgctccgagggcaaatcggatattcgacgataattctattcctcataaagccccatttattgcttatatcaataatttaccatttgacgcaaatgaagatgacctctacgagttctttgaaggtattaatttaatatctctgagactaccaagagaagatggcgaaaatggtcgttccagaggctttggctatgtggagttggaaaatcgagaggatttaattcatgtacttagcttgccagacccctctattaaaggtcgccgcattcgcattgagctatcgaatgaaaacgaccagcaaagccgccaaaaaagtaataggcggtttgatggttttggaaataatggagataatagggattccggaaattggaggcgagacagccaaaacaacggcagtaactttggttattcttccaattttgaaagaagctttaatagagagagaaaatctttaccagatagagatgatgtgaacactcctggatcttggcgcacgagcgcaaggccgcaatctattgatacttcccctacacgcagagaagttgaacaagtatctgaaaaatatcgcgaaggtcgagtcaaaatagcagacagatattcccgagaagagacatccaaagttgaagaagaaaggccaaaattgaatttaaaaccaagaactttaccattgccagatgtaaagacaattgaattcgaaaaatgtgacgttgatgaatttaatttggataaacaaggcggaacttcatcattaa

SEQ ID NO: 22551 - protein, 507 aa, DROSOPHILA
MFGSGTGDIEFSDVPIDVHPFNTFTDYTSLKRLMNQKDLSGRLLRWAIKFQGYNICIDHRKGSQNIVADASPQVHEVETDISPIEIENVPEIELDSPPYLEVGSYLFRITIRFGICALSTTSQLIRNRGTYIRPTGLGPIYKQHKLWLAYTNRLAGPRRLFKVLENRKKTIDRIEEFVNGEIQVVLRNGTFQNLKPPYNNPKGKKNKGTVISLQSFLCNSDAPVGTTQVSKKIRNLDGDDSDDGSGTLPLVYQLPTAPRANRIFDDNSIPHKAPFIAYINNLPFDANEDDLYEFFEGINLISLRLPREDGENGRSRGFGYVELENREDLIHVLSLPDPSIKGRRIRIELSNENDQQSRQKSNRRFDGFGNNGDNRDSGNWRRDSQNNGSNFGYSSNFERSFNRERKSLPDRDDVNTPGSWRTSARPQSIDTSPTRREVEQVSEKYREGRVKIADRYSREETSKVEEERPKLNLKPRTLPLPDVKTIEFEKCDVDEFNLDKQGGTSSL

SEQ ID NO: 22552 - DNA, 2294 bp, DROSOPHILA
ccccatttaacgcagttagaagcgcattttccgcattttcaattctccggcattgcatgacaaattgcatttgaggtttttcacatggacattgatttaattaccaaatgaatttccttgccggccaaaagtcgaataagaagtttaatttcccccaagtctggccagcaatttgcatatacactggccaaatccttttacgtatctgtatgtccgcctgccctctgcccgtttgagtaatttcattatgagttttaagacttttaattaatttaaaaagtgaacaattttgcactctttttcataacaactccggccggagtccgcattgcattccgtagtcctcagtagtccggcttttgtctggcgtagtctggacgaaccggaagagtggcataatttccgcaccgcctcgaacttgatgcaaacatttcatctgcatctgcatttcgagtggtccggagagcaggagccagaacaggaacagaatcggaatcggaatccggatcaggagccaaggcaggggcactggcagcatcaacagcattcaattaattttccgtacttctgccatccacaaaagcgaaacttttgcagtccgacatccggcattgttgccaacttgaatgcttatttacggacacaacagcgccagaatctcccggattatgccgaacatcataaaacttgtatcgactcgttaaactggcaaatgaaatgaacccgacagatgacaaagcagcctcaattatacggatatcaaatggaaatatgcaaagttagttgtaatatggggaatatttcttagtattaaactattgtgaactatgctaacgagtagtctgattaaatttgaaaatatatttagtgaagtgagtgagttacttcaagtatgcccggagctttcattcatttgcatgtatggttgtattgtagtagcagaacgaacaccttctttgcatcgaaatttctctaataaggtaatcgaatagacgcaaggatgtccgccgaagtggaggaactattgaagcgctttcagtccatgaagaacgtcaccggcatagttgtggtggacaacgacggcattccgatcaaaacgaccctggactacactctgacactccactacgcggcactgatgcaaacggtgcgggagaaggctcgccaggtggtcctggatctggacgccaccaacgaattcaccttcctgcggctgcggactgagcagaatgaggtgatgctgtgcccgcaggaagattacttcatcatggtgatccagagcccgtgcgactagagcacaatattccaggcccaagctcattccgctggcaattattttcaggcagagtgttcagtaaatgttattaaaatactcggcatagtctcgatttcgcacaccagcatttcgtcattaatagcattcagttgcaaattatttgcattgggaatcgcaattgaattggaatgtcacttgcgtgcggagcactcttattcgatatgcatcctttggcccgcatgcatacatatacgatatgcatggatcctttaccccacgaaacccggcatcctgtccgggcaaactcatttacaataaatgaagactgactgaggcagccacgaaacaaataaacttttttgcggcctcgccaggatgcgagcatgtagggatacggatgccacggccaccgaagtggaggttcctcctctgggctttgctatttttcatttaattaaatattttacatgcaaagtgcattatgagcagtgggcgaggcaaaaaccaagcagataacttggtaaagtcacacgggcgcctctcgggaggccaggacatcgatgccaatccatctatccaccggtgcaggacgaaactattcactcgagataacttcatgaacagttgtggcaggatatagagcactactgtcgcagccatcaattcgagacaccgcaaaaggggggcagaaaagtggataagttatttttcacctcgatcctagagccttaacttcattagcctaatgactaaatgcactttaccatgatctacatcgatgtagctattttctgcagctgcttttcctgtttccttactgttagagatgttaattgattttttttataaacctgttcttatttatagttgtattaccttggattggatcctaggatcatgttttctttataaaatttccttttgacaattgtaaattaaatccgaatcaagccagtcgtctttcacctgtcagcatgtccggcgtaatcatatttctgtgtcttccaatcattgtttt

SEQ ID NO: 22553 - DNA, 294 bp, DROSOPHILA
atgtccgccgaagtggaggaactattgaagcgctttcagtccatgaagaacgtcaccggcatagttgtggtggacaacgacggcattccgatcaaaacgaccctggactacactctgacactccactacgcggcactgatgcaaacggtgcgggagaaggctcgccaggtggtcctggatctggacgccaccaacgaattcaccttcctgcggctgcggactgagcagaatgaggtgatgctgtgcccgcaggaagattacttcatcatggtgatccagagcccgtgcgactag

SEQ ID NO: 22554 - protein, 97 aa, DROSOPHILA
MSAEVEELLKRFQSMKNVTGIVVVDNDGIPIKTTLDYTLTLHYAALMQTVREKARQVVLDLDATNEFTFLRLRTEQNEVMLCPQEDYFIMVIQSPCD

SEQ ID NO: 22555 - DNA, 2549 bp, DROSOPHILA
cgctggtatgccttaggccaattcataaattagactttgcatgcaatttcgagtgattttccaacccacccacctcccacttcctgtgccaatctatatgtttttgttggtttccgttctgccgcattgaacatgcaatttatgggagcacaaattttatttgaattacaaaaaataaaaccgaaaatagcggaaagaaatcaaatatgtttttaccaatttctggacgattatcaagaaaatataaaaaatagtcggatggcccaatttaaacattttctctttgccgctattcggacaaataaattcaataatttattgccgaaaaatagcttgctgtgaccgagataacagctgtagcaaatatttaatcaaaatactgtgtacagtttaaagtggactacaaataaaacaggaggtctcgataaaaaaagcaaaacaaaaggatggccccttggggcgaaatgtgaactgtattatcacctcaaatgtgtgtaataaagtgccgaggaggcctctcacacaaaacagctggattctccctccacgactgccaacatgacgcaaaggaggcaaagtacgcgaagggtagtatatgacaaagggcagccccctcatcaaccaactcagactccaatttcgaccgggacaaaggacccggccaatgaagtaatcattgtgcgccaggccagacaagccaacatacagcgattggggagtggcgggcacatgcgcaaataaataaattacccttgggctcaaatcagctactcaacctaaaaggtggatcaagattgcatggtattgcattttctataagcaaaattttaaacttttaaagatactcttaaattgttgacaatatatgtgtgtatgtatgtattttataagaaataagtaaaatcgaaagaagtataagaaggcctagagaaataaagtacatttaattgaatttatttctctctttaaactaacattttgaatataaaattcatacatcatgtcgaagccgacaaccctaaaggacgcattggccaagtgggaggaccgcaataagcagccagccgccactgccacggaaattggacttcagtttcagtatccgccgatcgagaaaatggatccgattctcaattcccttaccgagtgccaaaagctcagcttgtcctcaaatatgattgagaagattactggaatttcgggaatgaagaacctgaaagtcctgagcctggcacgtaacaatcttaaaacgctcaacggcatagaaccactggccgatactctggaggaattgtgggtcagctacaacaacatcgagaagaccaagcccctggaatcgatgaaggccctgcgtgtgttttacatatcctttaatatgatcaaggactggacggagttcatgcgcatgggtgttccaccaaatctcagcgagatcacatttgtgggaaatcctttgaacgagaacatggaccagtctgccttcactgccgaggcagtccgtcgtctgcccaacatgaagaaactcgatggggagcctgtcattcgttaggaaaaaacaagctatcacggttgtgttgtatttcaaataaaggtgaatccaaagtcgagcagaccccttgaccttagtgttcgactaaatcacagacaacaaaacatggttagaatcctgaattccaccgacagctgaacgaatgtgataggcatttaagcagaaaacatgttccattgaatttgcttatatttgtgctttggcatagcacagaagtgttcttccgattttcaatgcgttcccaatgctgctgatgagctccattgttttgcctgtctcatgttaccttcgacttctaacccaagtctatttaaaaaagttgttttgtggaaaactgtagatactctgaacgcaacgggagtgtctattaagtcggatatcatatatgaatgtctttaatgcataatataatttaaaattgaaatgtaataatttaattaattaaataattgaattaattcaataatatttaatcaataatattaacttcatttactaatagagcattatttatacgaattgattttatcattcatttcaagaaacttgaacttctggtctggtgcactgcattgcttgcatattttaaagatgttaagtaataagctcgactgaaaattcaagaaaatatttaaaaagcttgtctcatgttttgaaaaatattccatcgcagtaatttaatgaaagccacttgctttatttctatcaacagcatgttattcatcagcaaataccatacaatttttacatggaaccacaagccaacaggagaatcaagaaatagccaagtcaattgaagcctgaagagacctttaatttcgactggatgtgctttctgtcggcacatggtatttgttttccgtgcataaataatcaagaatgtcaatggatggggatggcgggcagtcatagatttttggcaaacagacaactaaacaaaatatacgagaatgcgaatttctgtctgccaaaccgacagacaccagataaaaatgttgaa

SEQ ID NO: 22556 - DNA, 549 bp, DROSOPHILA
atgtcgaagccgacaaccctaaaggacgcattggccaagtgggaggaccgcaataagcagccagccgccactgccacggaaattggacttcagtttcagtatccgccgatcgagaaaatggatccgattctcaattcccttaccgagtgccaaaagctcagcttgtcctcaaatatgattgagaagattactggaatttcgggaatgaagaacctgaaagtcctgagcctggcacgtaacaatcttaaaacgctcaacggcatagaaccactggccgatactctggaggaattgtgggtcagctacaacaacatcgagaagaccaagcccctggaatcgatgaaggccctgcgtgtgttttacatatcctttaatatgatcaaggactggacggagttcatgcgcatgggtgttccaccaaatctcagcgagatcacatttgtgggaaatcctttgaacgagaacatggaccagtctgccttcactgccgaggcagtccgtcgtctgcccaacatgaagaaactcgatggggagcctgtcattcgttag

SEQ ID NO: 22557 - protein, 182 aa, DROSOPHILA
MSKPTTLKDALAKWEDRNKQPAATATEIGLQFQYPPIEKMDPILNSLTECQKLSLSSNMIEKITGISGMKNLKVLSLARNNLKTLNGIEPLADTLEELWVSYNNIEKTKPLESMKALRVFYISFNMIKDWTEFMRMGVPPNLSEITFVGNPLNENMDQSAFTAEAVRRLPNMKKLDGEPVIR

SEQ ID NO: 22558 - DNA, 5502 bp, DROSOPHILA
ccaatcacgcggatttaccttggttatcaagctgtggaccaaatatgtgagttccttaccggctttttgcaaatgcacagccggatttgctatttgtactcgtacttacaaatattcttaacgctgttgaattagtagatgcactgcactttgagttttaagagttcaatgggaaatagtcatagtattcgaaaaaactctcgagcaaaattttgagcacaaagcgtcttggcgaacttttaagtgtgaccggacttagcggcgtagaaaatatccttggctgtggtattttcttaaagtgtgtcaaattaaagcggtggaatatgaaacgtgaggaagttgcttatgtatttatattttccttatttaaaaaaagttctcaaaaataaaatgaaacaaaaatgtaaagtaaagaactcaagaaagtatataaaatatcggcagtccacatttaagtttttgtttttggaatttacctcctcacaaaaataatacacacgaagaacttgttcttattcttttatctttttttcaagagtacctgttagttatctgtcacttacatttaagaaataagcaatcaaattccaaaatatgccaaatatctttccgcaatccggaaagtttttcgagtatatgtgtaaaaaagtccatagatggtttctttctccataaataccctagtgatcgatattatttaagagtatgttcaatacttttcgcagttgaaataatttaccaattaggaaaaccaataaaaccaactgccctatgtctgatgagtaagaaactgagcaccagaggcgataaatggttcccgtaaacagcgcacgccagcgccgaggccgcgattctattgaaaaaggtgtatatatatttaatatatctttatgtacaactatagactcaaaacaaaaataccccgctcaactggatattacagggtataatcgataaccttagctcagccattgtgattttcagcaatccactcgcacggtcacactgcctgtccaaccctcccgcaccgtactactcgacaacgtgcttgtgtgcagaatttcctcggctaaataaaaccaaaaattggcaaagcgccgtgtcagatctagccgtcgattgcacaattccggagcaggacgtcgtcgctggagccaccgaagcggagtcaccatcagaagatcaccagcaccaggagaacccagtggacagtcctcctctttttcttggctgccgaggcgtcgcgtgtgcgtatctttcagcggtgaataacccacggctttttgttttcggccagaggaggagcgtgttgcagtcgcaaacgggaagatggttaaagctaaaaagggcaagaaagagatactgaccaaggtcgaaggcggttcctcggtggacgaaatgtgagtcttgtgcaagttcatgcccacctgccaacttggcaaactttctatcgcaaattattcaatcttacagctccgatgtggacagcgaccagttgagcctcaacaacaagcagaatcatgccctgaagggcaatcaagctggcgatgacgatgttaaagccgtgaccaagggggtcaagaagcttaatgtcaagggaaaaggcaaagcaggcaaaaatgacgactccgatgaggaggaggtggtgcccgccaagggcaaagcttctaagaagtcggcttttgagctgctaatggacgacgacgagcaggacgagccagctgcccaggaaagccagtctgagaaggaggaaaaggtagtggtctccaagccacagaagaacgaaaagaagggcaaaaaggccaaacgcaaggggaaggacgacgacgatgaagatctggacaaggttttagctgagcttcaagcggaatacgccggcgaggctgctcctgctgccactactgttgtttcccccgaagaattggccgatgagttctccaagaaaaaaaagaacaagaagcaggccaagcaggctgcagtggcagaaaacgccggagaggatgaggccagcgatgacgaggagggcggcagcactgtgaagtcggcagcccagaaaaagaaggaaaagaaggagcgccaaaagagggaggctgccctagccaagcaaaaggcagctactgaacccaaaccgaagcccgtggagaaacctgcgccagaacccgagcctgtggctacggaagaagtccagcccgccgccgaggaagaggaggaaaagtccagcaaaaacaagaagaagggcaagaaagacaaaaaggccgagcctgaggaggagaagaaggacgccaagaagaagggtatgtctgcctccatggtggcggccatgcaggagcagctaagaaagcgaaaggaggaggaggagcgcctggagcgggaggaggcagagcgaattcgcctggaggatgagcgcgaagaagcccgcctggaggcagtgcgtctggaggcagagaggaaggagaaaaagaagcagcgcgaggcagagcgcaaggctcgcttgaaggcggaaggaaaactgctcaccaagaagcagaaggaggatagggctagggcacaggctctcctggagtctctaaaggctcagggtctcgagattcccgatccgaacgacaagcgacccacgcggccaggtatgtaaatggctttcttcctaaatttgtatgccacgacctcagttttgtattgccttgtaacattattagcttattatctcaactaactgattcatgtctttcaggaactcgtatccgtccgaacaaaaagaagggccctaaggaagaggccgccgaagaggaggccaaggcagcggaagcggaagcccaatcggccgccgctgctgccgctgcagctgctgccgaaaaggccgaggaagagagggtcaaggagagttgggatgccaccgatagtgaggctgagccagagcccgaggaagaaacgtcgcaggccactaacaatggcaagaccgaggctgccgaggaagagaacgaagatacagatgacgatgaagatgacgacgatgatgaagatgacagcgatgactccgatggggatagtgacgattcccgtgaagtatcggtgttggccaatgatccagagtcacgacgactgcgtgcggaagccagaatcctaaaacggcaagcagaggcggaaaagaagcgctccaccgacgaactcagagctggagtggtttgcgtgctgggtcatgtagatacaggaaaaaccaagatcctggacaaactgcggcgcacacacgttcaggattccgaagcgggtggcatcactcagcagattggagccacaaacgttcccatcgaagcaattaaggagcagactaagtacgtaaaggcggccgctggatttgaacatcgcttgcctggtctattgatcatcgacacacccggccacgagtccttcagcaaccttaggaaccgaggatcatccctctgcgacatagccatcctggtggtggacattatgcacggcttggagccacaaaccatcgagtccattcagctgctcaagaagaagaaatgtccgttcattgtggccctgaacaagatcgatcgtttgtacgattggaagcagttggccagacgggatgtgagggatgttctcaaggagcagcagagcaacacacagctggagtttcagcagcgcacaaaggacgtgatcctgcagttcgccgagcagggcttgaatgctgctctattctacgaaaacaccgatccgaagacatacatttccctggtgcccaccagtgccatttcgggcgagggtatgggcaacctgctctttatgatcgccgacttctgtcagaatatgctggccaagcgcctgatgtactccgaggaactgcaggccaccgtgttggaggtgaaggcgctgccaggtcttggaaccaccatcgatgccattctgatcaatggaaagctccgcgagggtcagaccatggttgtggccggcactgatggtcccatagtcacccagatccgatccctgctgatgccgcagcccatgaaggagctgcgtgtgaagaacgcctatgtggagtacaaggaggttaaggctgcgcagggcgttaaaatcgccgccaaggatctggagaaggctattgcgggcatcaatctgctgattgcccataagcccgatgaagtcgagatttgcacgtaagttttaaagtctattataatctattagatatttgtgttataaactttctcatcattttagagaggaagttgcccgggagctcaagagtgcccttagtcatattaaactggctcagacaggcgttcatgtccaggcctccacgctgggttcgttggaggctcttctggagttcttgcgcacatctaagattcctgtaagtaatataaataggttcttaaatgtattctgtagttttaagtaaaccattttcaaaagatggcgccattcatactaggcaccatttctttatctattaggattcatagcatacttttcggcgacagaatgccaaatgctaacgaggaatctcatttgcatttaaaggtattaactaattggtttgataattgaaacgatattagcagatgcaatcaaagattgcagaatatatttgcagttagaaaaacaagcgttggatgtaaaccaggttttctcccattttctgctcagttgatttacgctttttcaaattcgtggaattcctaacacccctaactaataatgaagtacacgtgcgaaatgaataacaagcgaatcagagggatagaaaatctcccaggggaaatggaactcagacgatgcgctaacataatttcgcaccgtttgtttaaacaattagccaagagaatattttcgagccagttccctaaaacggagggagggataaccttttaataggtgggctctgcaatttatgtacacattatttatttctgcccatggcgggttatttctaacagctcgtatagtccgacgagataaacaaaatctcttttcggccgaccaaaaaaaaaaaagaagcaaaataagaaaacgcatagtacgcagtttggaaaatttgccattttcttggctacttttcgatatcgctggcaaattgaattcggtgcggcgacaaagttgtaaattttcgctggccaaaaaactatttcggattcgggaattatgagtgcgtgaggaggcgggggccccacgagattctctcctcctgtctgccagactacgccgtaaacataaaaatgcgtatttttgtaaactgcaaacccggccgttctggccaccaaaacgacgatgatgatgaggatgatgatgatcatggctatggcgatgttgaggatgattcatgctgaaagaaggcgaatggcgggcgcccagccaagtgaacacgcactgtaaccatttcatttcgctgtctgccccccagtctcgagaagattgaacacccaactaaaaatactggccgctctatataccatatagatagatagatagataggcaggcaaacgcatgtatatctg

SEQ ID NO: 22559 - DNA, 3128 bp, DROSOPHILA
tcacactgcctgtccaaccctcccgcaccgtactactcgacaacgtgcttgtgtgcagaatttcctcggctaaataaaaccaaaaattggcaaagcgccgtgtcagatctagccgtcgattgcacaattccggagcaggacgtcgtcgctggagccaccgaagcggagtcaccatcagaagatcaccagcaccaggagaacccagtggacagtcctcctctttttcttggctgccgaggcgtcgcgtgtgcgtatctttcagcggtgaataacccacggctttttgttttcggccagaggaggagcgtgttgcagtcgcaaacgggaagatggttaaagctaaaaagggcaagaaagagatactgaccaaggtcgaaggcggttcctcggtggacgaaatctccgatgtggacagcgaccagttgagcctcaacaacaagcagaatcatgccctgaagggcaatcaagctggcgatgacgatgttaaagccgtgaccaagggggtcaagaagcttaatgtcaagggaaaaggcaaagcaggcaaaaatgacgactccgatgaggaggaggtggtgcccgccaagggcaaagcttctaagaagtcggcttttgagctgctaatggacgacgacgagcaggacgagccagctgcccaggaaagccagtctgagaaggaggaaaaggtagtggtctccaagccacagaagaacgaaaagaagggcaaaaaggccaaacgcaaggggaaggacgacgacgatgaagatctggacaaggttttagctgagcttcaagcggaatacgccggcgaggctgctcctgctgccactactgttgtttcccccgaagaattggccgatgagttctccaagaaaaaaaagaacaagaagcaggccaagcaggctgcagtggcagaaaacgccggagaggatgaggccagcgatgacgaggagggcggcagcactgtgaagtcggcagcccagaaaaagaaggaaaagaaggagcgccaaaagagggaggctgccctagccaagcaaaaggcagctactgaacccaaaccgaagcccgtggagaaacctgcgccagaacccgagcctgtggctacggaagaagtccagcccgccgccgaggaagaggaggaaaagtccagcaaaaacaagaagaagggcaagaaagacaaaaaggccgagcctgaggaggagaagaaggacgccaagaagaagggtatgtctgcctccatggtggcggccatgcaggagcagctaagaaagcgaaaggaggaggaggagcgcctggagcgggaggaggcagagcgaattcgcctggaggatgagcgcgaagaagcccgcctggaggcagtgcgtctggaggcagagaggaaggagaaaaagaagcagcgcgaggcagagcgcaaggctcgcttgaaggcggaaggaaaactgctcaccaagaagcagaaggaggatagggctagggcacaggctctcctggagtctctaaaggctcagggtctcgagattcccgatccgaacgacaagcgacccacgcggccaggaactcgtatccgtccgaacaaaaagaagggccctaaggaagaggccgccgaagaggaggccaaggcagcggaagcggaagcccaatcggccgccgctgctgccgctgcagctgctgccgaaaaggccgaggaagagagggtcaaggagagttgggatgccaccgatagtgaggctgagccagagcccgaggaagaaacgtcgcaggccactaacaatggcaagaccgaggctgccgaggaagagaacgaagatacagatgacgatgaagatgacgacgatgatgaagatgacagcgatgactccgatggggatagtgacgattcccgtgaagtatcggtgttggccaatgatccagagtcacgacgactgcgtgcggaagccagaatcctaaaacggcaagcagaggcggaaaagaagcgctccaccgacgaactcagagctggagtggtttgcgtgctgggtcatgtagatacaggaaaaaccaagatcctggacaaactgcggcgcacacacgttcaggattccgaagcgggtggcatcactcagcagattggagccacaaacgttcccatcgaagcaattaaggagcagactaagtacgtaaaggcggccgctggatttgaacatcgcttgcctggtctattgatcatcgacacacccggccacgagtccttcagcaaccttaggaaccgaggatcatccctctgcgacatagccatcctggtggtggacattatgcacggcttggagccacaaaccatcgagtccattcagctgctcaagaagaagaaatgtccgttcattgtggccctgaacaagatcgatcgtttgtacgattggaagcagttggccagacgggatgtgagggatgttctcaaggagcagcagagcaacacacagctggagtttcagcagcgcacaaaggacgtgatcctgcagttcgccgagcagggcttgaatgctgctctattctacgaaaacaccgatccgaagacatacatttccctggtgcccaccagtgccatttcgggcgagggtatgggcaacctgctctttatgatcgccgacttctgtcagaatatgctggccaagcgcctgatgtactccgaggaactgcaggccaccgtgttggaggtgaaggcgctgccaggtcttggaaccaccatcgatgccattctgatcaatggaaagctccgcgagggtcagaccatggttgtggccggcactgatggtcccatagtcacccagatccgatccctgctgatgccgcagcccatgaaggagctgcgtgtgaagaacgcctatgtggagtacaaggaggttaaggctgcgcagggcgttaaaatcgccgccaaggatctggagaaggctattgcgggcatcaatctgctgattgcccataagcccgatgaagtcgagatttgcacagaggaagttgcccgggagctcaagagtgcccttagtcatattaaactggctcagacaggcgttcatgtccaggcctccacgctgggttcgttggaggctcttctggagttcttgcgcacatctaagattcctaatgccaaatgctaa

SEQ ID NO: 22560 - protein, 932 aa, DROSOPHILA
MVKAKKGKKEILTKVEGGSSVDEISDVDSDQLSLNNKQNHALKGNQAGDDDVKAVTKGVKKLNVKGKGKAGKNDDSDEEEVVPAKGKASKKSAFELLMDDDEQDEPAAQESQSEKEEKVVVSKPQKNEKKGKKAKRKGKDDDDEDLDKVLAELQAEYAGEAAPAATTVVSPEELADEFSKKKKNKKQAKQAAVAENAGEDEASDDEEGGSTVKSAAQKKKEKKERQKREAALAKQKAATEPKPKPVEKPAPEPEPVATEEVQPAAEEEEEKSSKNKKKGKKDKKAEPEEEKKDAKKKGMSASMVAAMQEQLRKRKEEEERLEREEAERIRLEDEREEARLEAVRLEAERKEKKKQREAERKARLKAEGKLLTKKQKEDRARAQALLESLKAQGLEIPDPNDKRPTRPGTRIRPNKKKGPKEEAAEEEAKAAEAEAQSAAAAAAAAAAEKAEEERVKESWDATDSEAEPEPEEETSQATNNGKTEAAEEENEDTDDDEDDDDDEDDSDDSDGDSDDSREVSVLANDPESRRLRAEARILKRQAEAEKKRSTDELRAGVVCVLGHVDTGKTKILDKLRRTHVQDSEAGGITQQIGATNVPIEAIKEQTKYVKAAAGFEHRLPGLLIIDTPGHESFSNLRNRGSSLCDIAILVVDIMHGLEPQTIESIQLLKKKKCPFIVALNKIDRLYDWKQLARRDVRDVLKEQQSNTQLEFQQRTKDVILQFAEQGLNAALFYENTDPKTYISLVPTSAISGEGMGNLLFMIADFCQNMLAKRLMYSEELQATVLEVKALPGLGTTIDAILINGKLREGQTMVVAGTDGPIVTQIRSLLMPQPMKELRVKNAYVEYKEVKAAQGVKIAAKDLEKAIAGINLLIAHKPDEVEICTEEVARELKSALSHIKLAQTGVHVQASTLGSLEALLEFLRTSKIPNAKC

SEQ ID NO: 22561 - DNA, 24236 bp, DROSOPHILA
caatctgacgagcatcgacaacgccgagtttttccgcctgaaaaagcgactcgattactgatactttgccgccatcttcattgtcttgatgttgtactactttcagctgtacaacttccgctagtcaatcgccccagccgtcggaacaaccccccacatatatttatttttatctatcggcccccagcagctgggctatagttgtgaaagctttagtcaaatatacatacatatacatatatatgcagacatatatgtatttgcatatatgtgcacttaaatttacactaaccgcgcacgttagattagcaaaattacaagtctcgattgtaatgcaattaaattttcgtacgtaacgtttgtccgcattcaactgtgattttttgtaaggtacgaatcgtatgataagtgtacacgattgtaaattatgtgatcggttgccaaaattaaagttgtttgtttgattgttgagtatttaacttgatttgattcgttagtagttattaaatagttgaaaatttgttaattcagtttaggagaaaaacccaaaaatgaagtttttgaaaacacattgtggttataattacaacaagtcactgtcacttcttataagctttatacgattaaatcgttaactgaactcaactgacttaagtggttaatgtatttgtaaataaagatcaaaaattaaaataattactgagtaacttaatgagtgtctagtaaatcgtacagttagttaaatttatatttgaagaacaatatgcgaggtataaactaaatacatgttaatcaaatgactgtttttacattatggaaaggtattccgaaaatttacaagcttttgctctattcttgtaaataattcgactaaccagccttgatatttgagatgacaagtcttaatgttcgaaagtaattaaatatttacccaaaacaaaatttgttcttcttgacgatctaaacgggaataaataaaatatcgaagaccaaaggggttcgttcaaaatgaatagatttatttcaaaatgagttaagaacatttgttgttatacgtgctagaatcgtcatcaatatttcagtttggaaacaggtcgtactcctctacgtacataaaaacgattgtgtaggatattgcttaaaatacattgctaaagttgactaggtaaaaattccagatgttgtcaaactaccgatacaaaattggatcccgagagtccttggaccgtctagtgccagtgtgattgtgcccagaaatcagacgcggcgaatccgcagtcatttagccgccgccgcctccgccggaaagctcatcctcgtattgcttgcggaagcagtctcccactgggaagaagtcccagctgcgctgctggtacatgttccacacgtacgtctcctggccggtatactccgtgtccggcttgttaatcaaatgcatcaggaagaacatgtagttggctaagttgtgctccttctggacgtgcgtgtcgaagccgtgcggtactatgtcgaagaagtccttgcccatcccgcagatgaagcagttggactccatgttgtccttcaccgactccagttggtcacgcagctcgccgaaggcgtcgatgatcagaccctggataatggccagcagaataataataacgaagaagaagaacgtgatatcgaagatgatgcggtagacctcgtagtcgtctccatctggatccccgatctcgtcgcctattccaccgcccgctctcacacccttgtacagatggaacacgaagcaggtcaacatgtcgtggcactttttgtccacctcctcgtcctcctcctggatgtagaacttcctgaagaagttgaacgcgatcacagtgtagatgtacactatgatggtaagcagcatcacggtgagcaccagttgcttgccgttgtgggtcacagactgcaggatggtgcgcagggtcttgaagcccacggccacatcgagcagatgggcggcgaagaagaagttgttgaagttacccatcaccgagaagctgaagtaccacagcgagtagaggaaggcgttgtccgtgaaggtgacgccagccttccacacctgatagcgccagtcgatgttcatgatgtacttgaagatgcccgtttcctcgctctcctgagccgcgaacgtgctcttctccatgcccagcagattagagatcgaatcaaagtcgtaggtctcgctgtacttttggcgcaccttcttcttcacgaacttgtcccagtagttcaccgggaaacttttcgccgaaattaccagcttgtcccagtgcgacttgaagtcgtcatcctccggctgctctgcaatgaacaatccctcgaactccagccggcgggcaatctctttttcccgcttgaagatggccaatggaaccttgaggtggtagtaggcaatcaacatggccagggagacaagtgagtgcagacatgccgcaatgcggagaacgtgttccatgtagaagaagtcttcgtccacgtgcacaagttccggtatctcgtcctccatttcgccatcgcccgatcctccgtcccctgatccgccaaacccagagcccgtgatgtccgcacctcctcccgacccggagcccaggatgagctcctcttcggcagagctgtctgcttcttcggtaaacgaggtgactttgtagaagagcagcatgaagttaatgctgaaagccagcaccaaggccacatacttgaggttgtagaagtttctggcgaggaagctaacggcgcgatgggtgtactgagaaaagtcgatctggtgaacagctggagtctcctgaggcgcagatgacgacttcttggcttccgcctcgatggaggccatagcggcctcctgagccttttgcgcctcctgccgctcctgtgccgccttctttgcagcctctccacccagcagatccacaatggaaatgggctcctggtgtggttcaccttcgaccaattcgccgctggcagctgctccgtcctcgggactggattctccgccctcctccatcgaggaattggctggagattcgtgcaccaccaccttgtacatgccgttctcctccttgttgatgtccagcccaaaggcttgcaccgtgcccggtggttcttcaagcggcagcggtggcagtgctcttccaaacgtttcctcctccactaccggttcctcctcctgctctggagcaggtcctcgcatcaggttcagtaggatgccgaatatgtaacgcaccacgcagaagtgtgcatatccggtatagtaaaatatatagaagatgatcttgaaaaagccgactatgagttctggtatggatttggtctgcatcactccgatctgatgcttgatgttcgccggactaagcatgtgcactccgaacttgagtccttctttgacggcggtgatggtgcggcggatgggatcacgagcggctcgctcctcctcttcctcgctcatataggaactataggcagtgtcccgcttcacattgccaccgccatcatcggtggccataagtcccgaggcgtgggtcatctcaaagatggcgtcctcgcagaagttcacaaaggcctccagtttctccttgtcgccaccttcggtgacgatggaataaaagaaggcacgcttggactcgcgaatctggggcttctcccactgttcgatgttcgagtccttgatctcaaagtaaacgcgctcgatgcgcttggagctgccgagaatctcgatgcggcccaggaagggctcgaagtagttgagcaccgagccggcggtctccaggaagcgcgccaggcgcggttcgtttggcatgtgttcgctgaggttggtcaggagcacagccaggttgaaaccgatctcctttgatggttcgtggaagtgctccacgaaggcccggtaatcgatcttgccctcgtggttgcgctcgcagcaggccaaaaggaaatccatttcttccctgtaaaacggagcgttatagtctgtgataccctgtgattggccatactttatcttcacttacggtgtgtagttcttggattgctccatcttttccctaaagtctttgggggtcacccaaccctcgttcttcatgtccacttcgtggaagctgggcgattcgataaggtcggcgagcttcaggaacatgtcgaagtacttaagaatcagctccacattgctggcagactccaccagcgtgtccaccatctgcttgccaatagtgcctgttaattcggatattcgaatattaatctgcattagtcatccaatgttgatatgccagttcccataccgttaacaacatttccttccagcatggaaagcatcatggtgatcatgtccttttgcagattcagcagttccttgagcagatcaacttggctggagtgctttgacagcttgtcctgcatgtgggaaaacaggaagaggaagccaccaactgcatcccacaacctcgagtgtgccaaggcctgctgattgagggtacacggaccctggatgacttcagtgagggtgttaaatacttggctagccacttcgatggccttgaagaagttggcctttccagcgggatcgatgatctctttgctggagtagtgccagtagaagtccatgatggactcttgcagacgaagcaaataatccacagtacagatgaccacgttcacggtggtggtgttacccgcctgggtcctcaaatagttttgccattctgtaagggataggctcagaggtcacatgttctcaactctctccttctataactcacccaagttgtggccctcgcaggtcagctggatgaaccggaacagcgcacaggtgaactccgcgtcgtgcatgttcttctcgcccgcggcgccttcggaacctacaccaagacctgcacccgcactcggaatatactctttgttcgtgtgacaaatttgggtggattggtacaacgatagcgggaatcacgtacacgggattggtgggttggtggttggtggttggttggtggtaatggcatgcgaggcatggtggtgttgggtggttgggaaatcagttggaaggaagtagacacaaatcaatagagtaatcgaacttagaagtattcgaaccaaagatgacgggcacggcaaatcaaagctggaggaggtgggtgcgtgggatcacggggcggatggacttaccctctgctttggtgtttcgctcaaaggcgtccaggtccagtacactgcaggagttcatcagtccggcgatggaggtaaagaagccaacgtccttcttttccttcaagtggttcagcatgcccatttggatgtcgatgttgccgccgcgcaaaatggcgatgccgagattgagtgtcgtcattaccatctccgaaggtatacctttggaggcggaaatgtgcaacagcaccatttcggcaacgccacgattggagagacgtgcctgatggaagagcagcttctgcttctccatctcttgttcctgtggaggtattagtgaatggtttttaaggttctaataatatatataagattgggtcttatagctgtgtatgggatatataaaattataaagccattgtttagtaatttcagccgaaggaatagttaccattaactgcctcatccgacactgaatcagacatgtcgggttttggggtttaagctgttgttagtgggtctatgttagttggcatcgacttacatggatgctggtgccttcgccctcttcgccaccctcaccgccttcctcgtcgccgccttcctcctcctccttgcccgtggacttggccgcgatctgggcataggacatgtagagcagatcctcctggagggcaccgctgcgttccgtcatggcgccgcggcagaaagtggtaaccagttgggttagcggatccggcttgctgtccgtctcctcgccctccttcttggatttctcggagtcctcgaacgtctgcgtcagatcttcgaccatcacctcttggcccacgttctcctcctgcagccactgctcgtagtacgatcgtgcgaagatgttgcaggcccgatgtctggataggaatgcgttcaaaagttagtgatatgtgccaagacagctaataatagttagaaaaaaaaaacaatttggcatgcatatggttaatcaaatcaagttagagagcaacaaaaagttgaaataagaactgatgctgatccttggggtggaaaattaaagaaacttagaaggcgatgaaccaatcgatgcgactacgagaacgagtaccacctgctcatgcgataaagatgcttggcgcgtaagcttgaaatgactgcctggcgacgcgccaccgagatctttgaaccccaccgcttggatctgttcttggagctggctgcctaagggattcggaatcggattggcaagtggcaagcaagcgtgcggcaagtccataaaaatatacaataatacaaatggcgtttagaacacggcgctcacattagtgcattagctattagtggggattcagtatcaaaaaaaaaaaaaaagatcggattagattgatgccatattgaggacgatgataaaatgggcgttaggacagataaactttatagaacactagtatggttagttggttcccacagagctaatcaatcggcaatctgcaatctgtaagatgcaatctgttaactgcaatcggtaataacctgggtagagaatgcagcgatgtctgacggaagcatgcgattacggcacgcttcctttggatcgacacaacgctcctgtagacattcttgctctgctgttgtggatggtcgatctgtaaatgtttcgttcacgggacggtcagcatttcagtcaacaattgtcggggtgaatgaagagttggcgatgtgggtgcatgtcgatgtcgattttggtgttgatcatgttgttgatgtttcgagaggaaaagaaagatcgagtgattaacagattaaagttgaaagattgaaagagttgttgcacagatagttaagctcgtacagtttcaatagtgatgagttactcgaactgatggcatcagagttgtgcattttgaaatattacaatttagacagatcgagatagagattggtatgcatccgtacatcccatcccgtttggttcggagttgatccggcacttaccatgtgcaggccaaacagaaccttggccatcgccacgatgcgatccactgtctcctgggttttgtccttgcccttctcgttggagttaacattggccttctccagcgcctgttcgtccaccggttcctccgtcttgcccagctttgagtaaaggtaatgctgccaggacatctcgtccgacgggtccagcttatccggcagggtcagctggttgcgggcgaactcgatcacatcgtactcgggcatcttcttcaggtaccgatccttgcagtgctgcaccagttcctgctctcgacccgcgaacagattcagtccaacgggtaggaggcgtttcaggcaggccaccatcagactggcctgcacctccttgtccttgtcgcgcttcttgtccctgttcttcttcttcttctttaccttgccacccacagcaggagcaccttccgagatggccgacctcctggttgcagttggcatgatcaaggccatgttgtcgatctcattggcagagatgaagttctgctcctccttaaggaagtactggctcttagaccatatattgaagatctctgccacatggttgtagagctcctcggcctccggtatgttgtccttcagccagtggtttcgctgcagatccacgtacttgatgagcaggggatagaacgagtatatgtctcgcactagcagattccagtcctcctgcagctgggtctccacctgcgaagtgtcgtccgtggccgacttgatgaatcctcgcatgctgtcctccttgtgcagcatgttctcagtgcgcttcttcacccgctccgccagcggcaagaacggatccttgagcagctcctccgacgtattgatgataatctgctgcgtataggcggcaatgcgagtcatccaaggggcgttatcgttgccaatgttcttcttgatcattttaagcacatttcgcagcaacggattcatgtgatcggctgtgaccatggtcacgtggttgccactggtgggactgacattatccggtccctgggaccaccaaaacggtagataggcgcaaagcagcggcaggatcacgtcgataatatgaggcgcatcattgtatgtcttgtccgactccacaaactggtcgacctcggcgagaatggtctctagatttggcatacagctctccatcttgaccataatgtcctgcgcctccagtgagtgatccgcaatacggttgagcagcgagtactggttgtgcttgttaaggtggggctccaagaaggccaccggaaagcaggagctgtaagctcccagacaggagcccagagcgggtctatgcctctcaatctcggtcttaagatacttcctgtcatgcgtcagggtgccatcggtacccaaatgatacagtgcagcgaggatcttgtaggaagccacctgaatctcgtccagaagcaaatcgctgccatagtcgcaggctgccagatgatcaaacatggcagtaagcaccggcaaaaccacctggtttacatatcccaacgatgtggaggttttcaggtgagtgcctctcaggtgactgtacttgccatcctgcaggttaaggatcgtgttacccaagtcatcggatgtctggttgaagaaggtcagcatggaggtgcgaataaactcgggacaattcttggtcagggtgcgtgcatcaatgcccttgaccaggacctggaggcaccgtactgtgatgcggacatccggtccaaatgcactcagccggttacgcagtagagcggccagcttgcagaagatcgaggccaccatttccttctccttgagcgaggctgctccaatattattggttgccgtggcaatggcgatgaagtagttgcgatgcgttgagaagtacttctccattagaggcagcaccaccttcgagaagaacttgatgtcccgggtggccgtcttaaaggatgagcgtcgactgaacgtggtcgatggctttagcagtttcatgttgatggtggctctatccagatactgtatgagcttttccagtagggagtacgagaaacgcagttcaacggcagcctgggtggcgccgccctcctccacagctcctccctttgatggcctaaagtcggcaatatgtcggcatgaattcggaaatcgtttagtcttcgttcattactcacttgtgcagcttgtaaccctggtattgcatgtacttaaggaactcctgcgagcgctcgcgatccttcttcttctctttgtcggtcagaagatcatatggcaccagttgcggatggataacgccaccgcagccgttgagctcctcgttcttcttcttggcccagatgtcgtgggaattctccgccaggcgctcagccatgttctgcatctccctgctcagggtcaggttgctcatgtccaccgggtgcgggttatagttgaacgggctgccctcgttctggaattcgttctatcggtgttaggggacggcaaagtgtagggcgtggacgtgggcgtgtcacaaagatagaaaagccaattggaaaacggatagaaaatttggaacgtgtgttagaggattttcgaaatggggattagtaaaaggctcttggctgctacatacaatttgaggcttcgactgacgccgcgttgatccgcgatgattcagcgccacctccacctcggagtgctccacggtccatccgatggccagcagacccttcaggcactctcgcaccggatcccggtaccgctcgcgttcctgccaatgagatttcagtagttagttggctttccatcagaagagttttggttaaacagaaaattacttgaacgattttgagttagctgtttaattactttgtaatgattaatcatgaagttagcacaattaagaattcaattatttaactttagtgtcacagaaaagaagcttcatctttcaattatgtgagtccgtctaagaacggtaataggaaagttgttatttaaccaatttactcaatcttttcaaatttaattaaggattaggaaataccgattaagtcttaaagtatctgtgacaccaaaataacctaaaataaaatagaaaatcgttgttaggaaacgtaagaaataattaaatcaataaaaatcattatttaagaatggtaaccaaataattaagtgatttagcttatgctaaatctaaaaactgaaagcagaataaatgatcgataatgaaaggattttgattaaatgttaattgatcgttataaaatgctagaaaactaaaacagaatggttaatggtaaatggatttagatattattttagatttagatattatttcagatttacatattattttagatttactcacgtattcactgagcatgttgtagggcttcaggcgaggatgcttgcgatcattatcggatcggatgtctccgtaggtccagccaccctccaaccgccgactggcccacgcatcgtggtagtgctcgctgaacttctggaccagcgagttgaggtcgttgtccagatgcacgttgttggtgtcgatcggattgggcatgtactgcggctgatccggtgcgcccatctggcggccgtagtagtcctcgtccgtgttcttggacaggctgtagtccggtggcagggcgcagccgatggcgatcagacagggcagtgccttaccgaacagttccgggtcatagtccatgttgctgagcgagtcaaaaatgttcgagaacagcagcatcgtcaggcgcttctcctcgtccgatgaggctccataggagccctggccttgagttgagccgtagtatttggcgcagcgatcgaagtgcagggtgagaagctatcggaggtcaagggaaatgacattaatatggggaaactaacttggttgtccattagattaatatgtgcaaatatcagcttgctcttgatctttttaattaattaacttttaattgaattatttgttaaagtcttttaaatgattagaaaattggaaacaacaataataaatactcaatattattagtttgttatttaggtaaataaactggacttcacaaatcaataattaatataaaactctatttgtagaatatgacatattgttaaaatagcgacgttttaattttaaaatgagattaaatgcgattagtttatgaattcttgtgaagaacattaatttaacatgaattttttttttaagaagacagacagattactgtctaaatatatctgtaaaaatgattatatttcaatataatactaccaaagaaattttttgccagattaaaattaaacatcttagaatggttctgaaaaacatttaaatggttgttaatgctcacccggagggccacggtggtgtactcggacagcttggacacatccacagtcaacttgcgcagcagcttgagcagcatggcaggttgcatttgggatgtgagggccaccaggaagtcggaaacagcctcgcgttgccccttggtcagcatacggttcttggacagccggtagaccgtgtgcaaagtggcatccaagaggctcgcgtagttctcggcctcgttgtaaaacttggagtgcttgatgagcagcggcaggatcgagttgcctatgtagcggttcatggccagcgccatgtcgctctcggatccatcgctcttgtccagaatggtggcggtgcggagatccggaaggaaggcgtcctccagcaggcggtagaagaggtcctgtgcctcgatgccgtagacgcgctccaggaagagcacgatgctctgcttattgttgggtagcaggccggacggcatgtccgatttgggcttctcctcgccgggcgccgtctgtgagagggtgaatttcaggctgagcaccccctgcaaatcctccagtggcaccagagatctcagaatagctctagccctcagggactcgttcttgccctgctcgatgaccgaagcgtccggagcgcagcggcccagtaggtccacaagggtgcagtagaagttcagaatggcggcaccggtatcgatatagtcctcgtcctcctcgccttccggcagaggatgtgtgaagtttagaccggcaatggtgccctcggcctcgtcctgcatcttgcagcggtccgagatgcgctccgacatgcgattagcctcgacgatggcgcggaacagaccttctccttctcctcttagagccggtcccaagcattccggacgacggataagaagtcgaatgacaaggttcgcattctcctcgacgctctcgccgttgacccaaacgcaatagcgcaggaagtccaggtaacgctcaccttcgacgggatcccaacccagatccggatagcccttctccacgagctccgagttgctctgtagtccgcatcgcgagaggtagacggcgatcttttctagatagtgttccctcagggccagagccaattctgtgttctccatcaaactcgagtatgccacatcgaggggcgtggatcctcgcaggcttggccgtgccagcaggatgttggcgttgtccagcagaaagtcgaagtgatcaaacatggccttttggttttggcgaccagtgcgacagaagtagcagaggaatcggcagcaagctaccaccatttcgtgggaggtgtccttctccttggacggagctccttcggctacctccgactgggtgggcgcatcgctttgtgcctgtgccctccgtccgagtgtgttcatcatcactgccatcacgttctcgtggacacgcaggatgcgtatgaggtccgggtgctgaaagaaggtggcgttgttaaccagcttccacagccgcttgcgcatcagttcctcctcttcctggctcatctggacgggcagcagggcgcgaatctggctgaggcccacccacatctctgccacgtcgtcgcgggctcgggtgtttatcacgtacgtcttctccagggcacgaaccaattctccgacggtgtcgtactgccgcagcagcagactaaacatctcgcgcaccagtttgggattctcgatctgtgactcctcggcccagctgacgatcgtcttaatgagaactttgcggaacacctcctctggtgtcttcttctccggctcctccacctccttggggccctcctccagctccttgacggtgttaataaagttgtagatcttcgtgatgggtcctgtctttacctcctcgatcgctgtgccctcgacgccatccggctcctggagagcattgagcgacactttttgcatgagggaatcgtggaaatcgcccaagcgtccgcgcaactcaaggccacaggtgcagttgtcctggtcatcgggttcgaggttcttgaagcagagaatctggttcatctgctcccgtggcggacagcggaactctttagtctttttggccgcaacagcactgggcaaatcggattgcttgatctcgatataacgtcgcaactgatcggtctgcaggtcgccaacgaagtcgtgggagaacgcgatgatgctctccactcgatggcgcagctgggtgtcgtagagatggtgcagcaggtagcacatctgcagcttggcgccctcggccatcttcatggtgagcaagcccttgcggtgctcatccttaccctctgaaataggggattattctattagaatgcgttcggttttctagacattggaagcggtggtctgccggtaaagtagttaatttctattttggagtattagaagatattttaactttgaaattcttttttttccttttttcattattctacatctataaaaaggattcttttaaatcctttcattacattgcatcatcctattgtattaataaagaattgattaaacatctaccatataagaaattagtttgaaacgctagtgttcttttaccagccgacctaagctgtgagcaattgcctactcacctctttcgaaggcttggtcccaggtctccgggtcgatcatgaccaatagccgctggacatcttcgtcagtcaggacgccgaccaagagtagccggtctgtgagcttgattagagggctacacggcggatgggaatggggctatcactaaaggacgttctatggccttacgggttaaggtgctactcacaggaagaggttctcgttggtccagccgatgggatcgcggttgtgcacctgattgatctcgacggcatccttcagcgcctccatgacaaactgcctgactacttctagggggaacttcggggagtacaattggtcgatgtcggggatcggttcgctggaaacacttggcatactagatgttgcaatcacagggggtctggacgggtgtagttgttgttgttgtgtcggtgcaggaggttcgatggatcaggtgttgtgttggatcagatgcaggaccgggagattcgaaacagaatgggatgtgaacaaaatcgaaaggataatcagaatgccatgcccccagcccgagcagtgatcgggaaatctgtgcattgtgggtagggcgaagagccgtaaatggtcaactcacgtgatctccgtcatccgcagctgcggacgcactgactccgtaaccagggatctcagtgagtgctgcatctcctcatcggagtacagttccttgagctcggctcccagcggtgtgatgtactcgttcttgcacacctccatggttgtggcatgcgactccagatgcagggcgatcagcaggtcgtagaagccctgccgcagtggtccgctcatgtactccgaccggatggcgtagagcagctgcttctggtccacatgctggcacagggcatgggcagctctgtaattggattggtaacaaagagccgcatagagcgttagactgtgggcatggaaggacaaaagcttgtccatctcgatgagctccagaatatctatacagcgatcctcctctgggatgtgcagggccagcatggacacggggtcctcgcacaacatggaccaacccctcacgtcggagagtttcagcgcatgcacctggagcgcagtatttggaactctagcccactgatgcggacgcaggcactggaccttcagacgcggcggggactgtggatttatatgcttgtcactggtgggcagtaccgccgccgaaaggggcaatgtggtaggggtacgtcccaactcgatctgaaggatctccttgctggtggcttccacgaaaatggccgggaagagcttggtgtctggctccatcatccagcggtgagaggtgtccttgccctcgcaagtgaagcggatgatgccggtggctgtgtccacgaagcagccaacgaacatgccctgtgaggctcccttgcctgaggcatcctgggtaacctcgttgaagagctcgtccgctcgaactacatagcaactctggcggtcgatccgttcaatggccatctcgtagtcatcctcgatgtagactgatccacggcgaaccttgttcttgttaaactcacggctgtgcaggtgatactgcgtagtgacccaaccgacgtacacgtgcgtgggatcctgaccgggaaagattcttactccatagaaatactcgttgatcaacttgaggcactcggcatcgaacatctcgtcacccgaagtttccaccggctgttggccaagatttgagccactcaactgctttggtccctggggcacagggctgggagggatttcggcctaagatagtttttggaatccaataatcattataatgtaactaaaaaattacaacttacattatttaaccgcagagttggagctcgtgtggtcatctgctggttaaccacgttccgaccatgagccaccgtatttcggcgctccagagaggtgtccagggtgcgagcacccatcttttcgcggctctgatcacgcgacttcttcgagaagaacttaaaggggctgcggccgcgcttcttcttgtcatccatctcttcgcccagcccgttcatgtcaagcaccgacgtggaacgctgcatctcgtccaaggcggcggacatgtctgtttcgaaggttatgttgcgggtgagcgatcccttgcgaggcggacggttgggtccgcgcatcatgtgatctgcctcagcatccgcgtgctcatcgaaattacgggtcaagcccttgatgtcgttcatattgaagccacctttcaacatgtggtccatgtgggcggcctgtgtctggacctgcatttgggcagcgatctccgcctcgcgcatcagtcggtactgccggttcttaatctcgtcccagcgtctggccttctcctgttcgctgataaactcacccatgcaggtcacgggcagggaaagacgcaggaactcccagttggccttctccatggtctcgaaggtgttgtgcgagatctttaagtgcggcggggtgtcggcgccgccgggaatccgggtgacatcgatgcggcagtcgggcatctcctcggtgttctcaaaaatgggctggtccttggtgtaccagtgggtaaccgggcggcgcatgttcctgcaggtaaaatttaaattaaatttaattatataatgtattccgagtacttacacgcagaacggctcgtatccctcttgcaggccacaagtggtgaagaacttgagtgagtccacgtcctggccgtagatgaggcgcgccttctggcccactcccagggtgcaggcgggcacgaagcccaccccctcggcggttacgtcggcaaaggtcgtctcgccgcccagcgcgtccatcaggagttctccgttcaacgagaagcctgcacaacgattgattacggttaatggggtcggggcttgggggtggctggacggttgctaatgatgagcatattgataataaccaagaaccaagcagcttctcaatgaattccgaacgggccttggcctgagaaccgtatccgtatccggaattgtatcgttcgtccggaatccattaagcaattttaattcctctaggaaatgcgtgcgtattaattggcgtttgattcgccttgcagcatacttgcattggactacataatattgttatcatgtctggactagagtagtgtttaactggttgggtttcgagttaggaggcaaagctaggattatattgtcaagcaagctattaagtacttatggttagctctcatgctaaatattgtacaactggattgaattgctattggttaagtaagttaggtacgtgtcgttagtaattacaggcagttacgagagagtaaaaagcttggggatgagctgatgtgtcacctgctcctcaggcacccaggtcgctaaccaggcgcctcgctccttgttaggcgttcaaggtgttcaaagtaacaatagttggacattagagcatgggaattggatagtctggatcgaaagtgagagtctacgagaagctggcattgatggacttatgcttttgtcggacgattctatgcgttggtccagtttggattctgtcgtgtctaaaatgactgatctactggctttgattacttaaatgtatgtccagttcaagttctaacaaaagttctaaggctggaatcgataagagtaaccattttgaaaacaaaaatgatttttattgataaatgattaaagatgcgaatattgttacaagcaatactaaacgctgtttttaaatagtaacccctttataaattccaaattatgctaactagttgagaaatgatttatcaatttcgaatgcgattaaattgacctaaagttgactgtatgaggttcggtctttatgggtagctatgggtcgcttttgcagggtatctatattgaggtgaatgcgtggataccacatggccttcgcatcgctggacttgcggcactcggttatccggtgactctggttcacatttagtagatatcaaaagcacggaggtggacattccttggggcagcttagaggatttgacattacaacaggggagcgagcagttcttactaattgtgtggtcggccaggtctaaaaagacgccgactatgtccccggggccgcactgtttaccaaaggattcactgacgccaccgtagactttctcttcctaaaaattgagtggcaagtgccgagatttagtcgcgattcgatcgatcaaaaaggccctactctttactctgctggtagcttgttaatgatcgtataaatgagagagtgtcgctaaattaacaaatcaaagaagaacgaaatcgttgattaagttgagagttgagttaaaacaaaatgcgttcgatcaaagtaaataaaatcaacgttgaggcacgctgctagggcgtctaggtccttactgatcgtttgctccttgacatcgatgaaacaaccaatgacatcgccagcctcataccgcactccgaagtgctcaatggatccggcgtgcattttggtcacctataatcacggggttgtgggttttggtttgagtcgatctggcattaggcgttaccgcagtcccttccaaccctccctagcctacatcgaatggatgaccctcggcatggagacccctgccttcctcatactcacattgtgtccatcgaaggcccaactggtgtcctcgctgcccagcatcgctcccggatagcaatcggcccgtgcccaacccactcgcattggtccggacgtgaggacctcgaattcgaagtaccacttgcccgatgtcacggcgtagttgcgctccaccctgtaagtccggaatccggcgaacttgaggcgttgtgcctcggccagaagtgcctccgttccttcgccagtcggaggatccaagacatatccgtaaaccaggagcgttcgcactgtctccgacgctgtgtccctgttggccttcttgatagcctcgtccactttggcatatggcaccaagtgtggactcctgtggttttcactatcctcgttcagaccataagtccaaccctgctggatgcgctcccgtgcccacagattgtgagtgttctcggccagctggtccacaagctcctccaacttgggggtgagtgtcacggcgcttaggtcaagtggagccggcttgtagccattgccctgcatgaagatctcgttgggcaggcgcactgggcgaatgcgtgctggtggcttgtccatggttatgtagtatcccagcgagataatcgtcctatagaggtaagaaggtcagtatagttaatttccttaagagtaagccaacttacttcagcgtttgcacagctagttgattgtcgtatcgcttttccgccgccggaagcttctcgaaatgggtgaggcaaggatggatgcggtggtagtcatctcggtgctcgccccacgaccagcccgcctcgattttgtttagagcccacatctcgtggatattctccgccagcttctccttgatttggtccacagaacttggcaatgtcacacccgtggtatcaacgggcttcggaacaaaagcagtgtcgtcctcaataagccatggtccggccaaaacattcttggcaagattaccaaagtagaagcaaggatccagactgaggatctgctgcggcatgagacactgcacgagggcagagaatcccatgggcggggcaaactttaaacgaccatgatcacctccgaaaaggaagcgacagcttagttttgatgagcaactcatcacgggaaagaacattccgtccaggttaaagtccctaaagctaccgcgcacttttactccgttaaaagtaaacgtgatgatgggcacagaaaggtcaatggcaacgccaataacatcgcctttacggataaagggctcctcgggcagcgcgtccaccactagtgttttgcgacctcccgtccaaagaaaggcaccatcaaatccaaaggagtacaggtcatcgcctactccattgccaccccacttcttgccgcctccgggatacggtacatacccggaagtattagcccagccaatgcgcaggtggggcatcatgtgcgtggtctgttcgatgtgatccatggtcacctcgaagtaccacttctggtacatggaagaaccgtccacgcgacccacgaagatgttcggtcggatgctggccacatggtccaccaggagcgtctgtagcaacagattcttgcccggtagcaaaaagtcgcaaatgttgttctgggaggatcgcaccgccactccattacccacgcacaaggaacacagaacgtctaggactttcgggtccctgccgtgcttctccagcagggagatgatcaccttgatgtgctcatcccgcatcatgtttagtgcctctggcgaatcgatcagcacgcagtgaagtacgtccaacatgccggaaccctcgctggaggcctgggaaccgaggcgggagaatagccagttgagtcggttactgttcgcgaactgggcgcagttcgtgtggttgcccttgatgatggcggccaagagttggtacaaataggtggagatgagatcccagctctggccggtctcgtcgccggccaggaagctggctaggaagccctgcgaggtgattatgttgatcttgtcaatggcctccaggatcagattgagcacgccctcctcctggaacagatcctgtcggttgcgcagggcacggaatcggttctgtttctcctcgtgctctgaaaattagttatagattttattgaacatcttagggtcatattttgaatgaccttacccatatcgtcttcgggttgcgaaaagtagttaatcaagtcctcaaggcacatgaccatctcgttgaggttgaccttttggaagaaaatggagtgtcggcgatttgactgcagtgtttccaaggctctgaaatgagtgtgaatacgataagaaaatcactcgtaaaggacttccaagtcacctacgtaataaactgggtgaagaggctgctgcacttgcggatgacacgagctgtcttggactcctcctcctgggagcgcgagaagtcgagacaatcgtccatcttgccctcctcgtgcaggatcgcttgcttctcctccacctttcctacgcccttctttttcgtctcataactcttgtagctgagccacaagctagtctcgcagtgctgaacgatgacggtagtgtcgccgtacttgatgatcggcgagccgatcacctccaggtccttgtcctccagcacctttttctcgtcgtccttttcctgccgcaggcagaaagtcgtcgtggcaatcgaagcctcctccttcttaactagaatcagttcgttgctgtcgttgacgcccaagtagcgtccagtggttatgtggcgtatgcgcatcgggtggtaccagttgataaagccaccagtccacttggttcgagcgagttccaggcgccacagggacctcgcctgtgccatgaccacgccgccctcgtaaataacaatactgtcaggggattgaaagggtactttagtatagtgacttaagtcatttcgagtgataaacttacttttgtcccgcctcacgaccccatgtactcggtatggtcaggcactcgtcgccaccatggaagaaacgcagcacatcgccgccaaagacatagcccacgtacttcatcctggagatgcccgtgccgtagggctgcacggaccagtgggtcacatggaagctggcatttacaatagactgttcgttctccttggtcgtatgcaaataacgttcggtggccacggacaccaggatcagatcatctccgacgcgcaccttctcgccctcagagcgctgcttgctcgccggatgaaccgtccaccaacaagcctctccctggctgtgctcctgcaggcccacgtcgaaggacagcttgtcgttcgacgaggaggtggacagacatgccaagtactgcaaagtgtaagattgttagatttattcttgctggccaagtggaagcgatcaagtactcaccatatcactgttgtggtgacgcagcaaaatggcattgccatagagcaatgtcctgtgtcccgatccggtgcctttgccctaggagtttgtgggaaagccattaaaaaattgttagctctgtctgcagacagctggttctagggattggtaagactacaatctacaaactactgcataacagtggaaagagttacgtatttacgaagttaggatgcaagtgctcgtggttgctgatggttagatcaatggagtacagtcaagcaaagaagaaactgaaccattttttaattgtgaaggaagtgtagacttcattataatctgtattacaatatttatattctttcgaataataatactctttcataaaattaaagaatatttcagtttgtgaggccttgatttcttctttgtgttgaagagggctaagataatcgtacaatccgtagtccaagtgtactcaattttaatcactgctgagttaggagctgcaagatccaggcttgtgagcctaggcttacgcgacttgaatctctggtcggggaaaatagatgagcacaagctcagttttaggggattatttcccgcagagatgtgacaaagaaagcaatagcagagcgagacagaacgagcgctactttacacagacagagtgagaaagatagagagtagaagagagatagaagcgcgatacgagtaaagaagaagaattgaaaggtatacttacaagtcgactatcctgttttgtgggtatttagaaaaattttgaaaaataacgaaaaatttataggttacaaatgtgtagaagaagagaaaaacgggaagatcacacagagaggggcatgcaagaacctaactatcgggggaacttatatgaccttaatctatggacattgaagcgatagggatcacaacacagaaatggcgggacagactactacatggcatgaatgctggggattcccttggtttcgaaatgaaaagacatacatccgagttgacctttttccaggctttatacttacagtctcggatcctgccgccgtcaccaactcctgcaatgctcgcacggacagcgcctgctcgatgacgaagacacactgcgaaagatccggcggcacgttcttgtcggcaatattctcgagaaagcagtgccggttgccaaatccttcggcggccaagcagacacgctcccccgtcgccgtgcaggagagcgtgaccatgtcctcctacaatggcagccgcaaaaggaataatatttagttattaatattatgttatacatacacgttaattaacagtgtatgaaatgtgtagctgacatcggaaagccgaagaaagtagcttgtttcatgcttattaaaggttaagaaacttaatcgtaaaactggaactcaaattggtgtgtgcaagtatttatttttaagatcaaaatcaatagtatatctcaaatcgtatcttaaataaacgatactgagctaaccaaatatagatcgaaataaaattatttatttatctacgaataacgacgtcattgttaaattctgtcaaaatgtagcctgtaaattccgagatctcgtaattttgacgaatggacagacaaagctggaatcgtcggttggacacgcctattaatcctgatcaagaacttaagttcttaattaatcctggtcagaacttctgactcagaagatcttcatttatctgcaacaaactcttaaacgagtctagattactcatttatcctatgagtattggaagtacacttcaaaacatatgcctgcgatttatatctgttactctttgaataaaaggaataaaaggtatgtttaaaaatgtgcaacataaagagggaacgtttcccagcctttaaaagttttttaaacatacctataaggaatacatctaaaaagtttaggcacacaaattttagagacatatacttagtacgtttcaaaatattgccaaaaattgactctttcccccaaaaacggttcgttttactctttaaatagaaattaagagatcttggaaacaaagtaacgaaatggacaaaatggaatttttgttggttattcgtcgaattgacatttatacaacagatgctagctggcgcttgtgtgcttagagatcttcaacatccttgtacttcctttatagagaattgggtactgtactgcagcgacttcactttgttcttgaaaaacggctacccaaggtgat

SEQ ID NO: 22562 - DNA, 15606 bp, DROSOPHILA
atggtcacgctctcctgcacggcgacgggggagcgtgtctgcttggccgccgaaggatttggcaaccggcactgctttctcgagaatattgccgacaagaacgtgccgccggatctttcgcagtgtgtcttcgtcatcgagcaggcgctgtccgtgcgagcattgcaggagttggtgacggcggcaggatccgagactggcaaaggcaccggatcgggacacaggacattgctctatggcaatgccattttgctgcgtcaccacaacagtgatatgtacttggcatgtctgtccacctcctcgtcgaacgacaagctgtccttcgacgtgggcctgcaggagcacagccagggagaggcttgttggtggacggttcatccggcgagcaagcagcgctctgagggcgagaaggtgcgcgtcggagatgatctgatcctggtgtccgtggccaccgaacgttatttgcatacgaccaaggagaacgaacagtctattgtaaatgccagcttccatgtgacccactggtccgtgcagccctacggcacgggcatctccaggatgaagtacgtgggctatgtctttggcggcgatgtgctgcgtttcttccatggtggcgacgagtgcctgaccataccgagtacatggggtcgtgaggcgggacaaaatattgttatttacgagggcggcgtggtcatggcacaggcgaggtccctgtggcgcctggaactcgctcgaaccaagtggactggtggctttatcaactggtaccacccgatgcgcatacgccacataaccactggacgctacttgggcgtcaacgacagcaacgaactgattctagttaagaaggaggaggcttcgattgccacgacgactttctgcctgcggcaggaaaaggacgacgagaaaaaggtgctggaggacaaggacctggaggtgatcggctcgccgatcatcaagtacggcgacactaccgtcatcgttcagcactgcgagactagcttgtggctcagctacaagagttatgagacgaaaaagaagggcgtaggaaaggtggaggagaagcaagcgatcctgcacgaggagggcaagatggacgattgtctcgacttctcgcgctcccaggaggaggagtccaagacagctcgtgtcatccgcaagtgcagcagcctcttcacccagtttattacagccttggaaacactgcagtcaaatcgccgacactccattttcttccaaaaggtcaacctcaacgagatggtcatgtgccttgaggacttgattaactacttttcgcaacccgaagacgatatggagcacgaggagaaacagaaccgattccgtgccctgcgcaaccgacaggatctgttccaggaggagggcgtgctcaatctgatcctggaggccattgacaagatcaacataatcacctcgcagggcttcctagccagcttcctggccggcgacgagaccggccagagctgggatctcatctccacctatttgtaccaactcttggccgccatcatcaagggcaaccacacgaactgcgcccagttcgcgaacagtaaccgactcaactggctattctcccgcctcggttcccaggcctccagcgagggttccggcatgttggacgtacttcactgcgtgctgatcgattcgccagaggcactaaacatgatgcgggatgagcacatcaaggtgatcatctccctgctggagaagcacggcagggacccgaaagtcctagacgttctgtgttccttgtgcgtgggtaatggagtggcggtgcgatcctcccagaacaacatttgcgactttttgctaccgggcaagaatctgttgctacagacgctcctggtggaccatgtggccagcatccgaccgaacatcttcgtgggtcgcgtggacggttcttccatgtaccagaagtggtacttcgaggtgaccatggatcacatcgaacagaccacgcacatgatgccccacctgcgcattggctgggctaatacttccgggtatgtaccgtatcccggaggcggcaagaagtggggtggcaatggagtaggcgatgacctgtactcctttggatttgatggtgcctttctttggacgggaggtcgcaaaacactagtggtggacgcgctgcccgaggagccctttatccgtaaaggcgatgttattggcgttgccattgacctttctgtgcccatcatcacgtttacttttaacggagtaaaagtgcgcggtagctttagggactttaacctggacggaatgttctttcccgtgatgagttgctcatcaaaactaagctgtcgcttccttttcggaggtgatcatggtcgtttaaagtttgccccgcccatgggattctctgccctcgtgcagtgtctcatgccgcagcagatcctcagtctggatccttgcttctactttggtaatcttgccaagaatgttttggccggaccatggcttattgaggacgacactgcttttgttccgaagcccgttgataccacgggtgtgacattgccaagttctgtggaccaaatcaaggagaagctggcggagaatatccacgagatgtgggctctaaacaaaatcgaggcgggctggtcgtggggcgagcaccgagatgactaccaccgcatccatccttgcctcacccatttcgagaagcttccggcggcggaaaagcgatacgacaatcaactagctgtgcaaacgctgaagacgattatctcgctgggatactacataaccatggacaagccaccagcacgcattcgcccagtgcgcctgcccaacgagatcttcatgcagggcaatggctacaagccggctccacttgacctaagcgccgtgacactcacccccaagttggaggagcttgtggaccagctggccgagaacactcacaatctgtgggcacgggagcgcatccagcagggttggacttatggtctgaacgaggatagtgaaaaccacaggagtccacacttggtgccatatgccaaagtggacgaggctatcaagaaggccaacagggacacagcgtcggagacagtgcgaacgctcctggtttacggatatgtcttggatcctccgactggcgaaggaacggaggcacttctggccgaggcacaacgcctcaagttcgccggattccggacttacagggtggagcgcaactacgccgtgacatcgggcaagtggtacttcgaattcgaggtcctcacgtccggaccaatgcgagtgggttgggcacgggccgattgctatccgggagcgatgctgggcagcgaggacaccagttgggccttcgatggacacaatgtgaccaaaatgcacgccggatccattgagcacttcggagtgcggtatgaggctggcgatgtcattggttgtttcatcgatgtcaaggagcaaacgatcagcttctcgttgaacggagaactcctgatggacgcgctgggcggcgagacgacctttgccgacgtaaccgccgagggggtgggcttcgtgcccgcctgcaccctgggagtgggccagaaggcgcgcctcatctacggccaggacgtggactcactcaagttcttcaccacttgtggcctgcaagagggatacgagccgttctgcgtgaacatgcgccgcccggttacccactggtacaccaaggaccagcccatttttgagaacaccgaggagatgcccgactgccgcatcgatgtcacccggattcccggcggcgccgacaccccgccgcacttaaagatctcgcacaacaccttcgagaccatggagaaggccaactgggagttcctgcgtctttccctgcccgtgacctgcatgggtgagtttatcagcgaacaggagaaggccagacgctgggacgagattaagaaccggcagtaccgactgatgcgcgaggcggagatcgctgcccaaatgcaggtccagacacaggccgcccacatggaccacatgttgaaaggtggcttcaatatgaacgacatcaagggcttgacccgtaatttcgatgagcacgcggatgctgaggcagatcacatgatgcgcggacccaaccgtccgcctcgcaagggatcgctcacccgcaacataaccttcgaaacagacatgtccgccgccttggacgagatgcagcgttccacgtcggtgcttgacatgaacgggctgggcgaagagatggatgacaagaagaagcgcggccgcagcccctttaagttcttctcgaagaagtcgcgtgatcagagccgcgaaaagatgggtgctcgcaccctggacacctctctggagcgccgaaatacggtggctcatggtcggaacgtggttaaccagcagatgaccacacgagctccaactctgcggttaaataatgccgaaatccctcccagccctgtgccccagggaccaaagcagttgagtggctcaaatcttggccaacagccggtggaaacttcgggtgacgagatgttcgatgccgagtgcctcaagttgatcaacgagtatttctatggagtaagaatctttcccggtcaggatcccacgcacgtgtacgtcggttgggtcactacgcagtatcacctgcacagccgtgagtttaacaagaacaaggttcgccgtggatcagtctacatcgaggatgactacgagatggccattgaacggatcgaccgccagagttgctatgtagttcgagcggacgagctcttcaacgaggttacccaggatgcctcaggcaagggagcctcacagggcatgttcgttggctgcttcgtggacacagccaccggcatcatccgcttcacttgcgagggcaaggacacctctcaccgctggatgatggagccagacaccaagctcttcccggccattttcgtggaagccaccagcaaggagatccttcagatcgagttgggacgtacccctaccacattgcccctttcggcggcggtactgcccaccagtgacaagcatataaatccacagtccccgccgcgtctgaaggtccagtgcctgcgtccgcatcagtgggctagagttccaaatactgcgctccaggtgcatgcgctgaaactctccgacgtgaggggttggtccatgttgtgcgaggaccccgtgtccatgctggccctgcacatcccagaggaggatcgctgtatagatattctggagctcatcgagatggacaagcttttgtccttccatgcccacagtctaacgctctatgcggctctttgttaccaatccaattacagagctgcccatgccctgtgccagcatgtggaccagaagcagctgctctacgccatccggtcggagtacatgagcggaccactgcggcagggcttctacgacctgctgatcgccctgcatctggagtcgcatgccacaaccatggaggtgtgcaagaacgagtacatcacaccgctgggagccgagctcaaggaactgtactccgatgaggagatgcagcactcactgagatccctggttacggagtcagtgcgtccgcagctgcggatgacggagatcacaccccctgtgattgcaacatctagtatgccaagtgtttccagcgaaccgatccccgacatcgaccaattgtactccccgaagttccccctagaagtagtcaggcagtttgtcatggaggcgctgaaggatgccgtcgagatcaatcaggtgcacaaccgcgatcccatcggctggaccaacgagaacctcttcctccctctaatcaagctcacagaccggctactcttggtcggcgtcctgactgacgaagatgtccagcggctattggtcatgatcgacccggagacctgggaccaagccttcgaaagagagggtaaggatgagcaccgcaagggcttgctcaccatgaagatggccgagggcgccaagctgcagatgtgctacctgctgcaccatctctacgacacccagctgcgccatcgagtggagagcatcatcgcgttctcccacgacttcgttggcgacctgcagaccgatcagttgcgacgttatatcgagatcaagcaatccgatttgcccagtgctgttgcggccaaaaagactaaagagttccgctgtccgccacgggagcagatgaaccagattctctgcttcaagaacctcgaacccgatgaccaggacaactgcacctgtggccttgagttgcgcggacgcttgggcgatttccacgattccctcatgcaaaaagtgtcgctcaatgctctccaggagccggatggcgtcgagggcacagcgatcgaggaggtaaagacaggacccatcacgaagatctacaactttattaacaccgtcaaggagctggaggagggccccaaggaggtggaggagccggagaagaagacaccagaggaggtgttccgcaaagttctcattaagacgatcgtcagctgggccgaggagtcacagatcgagaatcccaaactggtgcgcgagatgtttagtctgctgctgcggcagtacgacaccgtcggagaattggttcgtgccctggagaagacgtacgtgataaacacccgagcccgcgacgacgtggcagagatgtgggtgggcctcagccagattcgcgccctgctgcccgtccagatgagccaggaagaggaggaactgatgcgcaagcggctgtggaagctggttaacaacgccaccttctttcagcacccggacctcatacgcatcctgcgtgtccacgagaacgtgatggcagtgatgatgaacacactcggacggagggcacaggcacaaagcgatgcgcccacccagtcggaggtagccgaaggagctccgtccaaggagaaggacacctcccacgaaatggtggtagcttgctgccgattcctctgctacttctgtcgcactggtcgccaaaaccaaaaggccatgtttgatcacttcgactttctgctggacaacgccaacatcctgctggcacggccaagcctgcgaggatccacgcccctcgatgtggcatactcgagtttgatggagaacacagaattggctctggccctgagggaacactatctagaaaagatcgccgtctacctctcgcgatgcggactacagagcaactcggagctcgtggagaagggctatccggatctgggttgggatcccgtcgaaggtgagcgttacctggacttcctgcgctattgcgtttgggtcaacggcgagagcgtcgaggagaatgcgaaccttgtcattcgacttcttatccgtcgtccggaatgcttgggaccggctctaagaggagaaggagaaggtctgttccgcgccatcgtcgaggctaatcgcatgtcggagcgcatctcggaccgctgcaagatgcaggacgaggccgagggcaccattgccggtctaaacttcacacatcctctgccggaaggcgaggaggacgaggactatatcgataccggtgccgccattctgaacttctactgcacccttgtggacctactgggccgctgcgctccggacgcttcggtcatcgagcagggcaagaacgagtccctgagggctagagctattctgagatctctggtgccactggaggatttgcagggggtgctcagcctgaaattcaccctctcacagacggcgcccggcgaggagaagcccaaatcggacatgccgtccggcctgctacccaacaataagcagagcatcgtgctcttcctggagcgcgtctacggcatcgaggcacaggacctcttctaccgcctgctggaggacgccttccttccggatctccgcaccgccaccattctggacaagagcgatggatccgagagcgacatggcgctggccatgaaccgctacataggcaactcgatcctgccgctgctcatcaagcactccaagttttacaacgaggccgagaactacgcgagcctcttggatgccactttgcacacggtctaccggctgtccaagaaccgtatgctgaccaaggggcaacgcgaggctgtttccgacttcctggtggccctcacatcccaaatgcaacctgccatgctgctcaagctgctgcgcaagttgactgtggatgtgtccaagctgtccgagtacaccaccgtggccctccggcttctcaccctgcacttcgatcgctgcgccaaatactacggctcaactcaaggccagggctcctatggagcctcatcggacgaggagaagcgcctgacgatgctgctgttctcgaacatttttgactcgctcagcaacatggactatgacccggaactgttcggtaaggcactgccctgtctgatcgccatcggctgcgccctgccaccggactacagcctgtccaagaacacggacgaggactactacggccgccagatgggcgcaccggatcagccgcagtacatgcccaatccgatcgacaccaacaacgtgcatctggacaacgacctcaactcgctggtccagaagttcagcgagcactaccacgatgcgtgggccagtcggcggttggagggtggctggacctacggagacatccgatccgataatgatcgcaagcatcctcgcctgaagccctacaacatgctcagtgaatacgaacgcgagcggtaccgggatccggtgcgagagtgcctgaagggtctgctggccatcggatggaccgtggagcactccgaggtggaggtggcgctgaatcatcgcggatcaacgcggcgtcagtcgaagcctcaaattaacgaattccagaacgagggcagcccgttcaactataacccgcacccggtggacatgagcaacctgaccctgagcagggagatgcagaacatggctgagcgcctggcggagaattcccacgacatctgggccaagaagaagaacgaggagctcaacggctgcggtggcgttatccatccgcaactggtgccatatgatcttctgaccgacaaagagaagaagaaggatcgcgagcgctcgcaggagttccttaagtacatgcaataccagggttacaagctgcacaagccatcaaagggaggagctgtggaggagggcggcgccacccaggctgccgttgaactgcgtttctcgtactccctactggaaaagctcatacagtatctggatagagccaccatcaacatgaaactgctaaagccatcgaccacgttcagtcgacgctcatcctttaagacggccacccgggacatcaagttcttctcgaaggtggtgctgcctctaatggagaagtacttctcaacgcatcgcaactacttcatcgccattgccacggcaaccaataatattggagcagcctcgctcaaggagaaggaaatggtggcctcgatcttctgcaagctggccgctctactgcgtaaccggctgagtgcatttggaccggatgtccgcatcacagtacggtgcctccaggtcctggtcaagggcattgatgcacgcaccctgaccaagaattgtcccgagtttattcgcacctccatgctgaccttcttcaaccagacatccgatgacttgggtaacacgatccttaacctgcaggatggcaagtacagtcacctgagaggcactcacctgaaaacctccacatcgttgggatatgtaaaccaggtggttttgccggtgcttactgccatgtttgatcatctggcagcctgcgactatggcagcgatttgcttctggacgagattcaggtggcttcctacaagatcctcgctgcactgtatcatttgggtaccgatggcaccctgacgcatgacaggaagtatcttaagaccgagattgagaggcatagacccgctctgggctcctgtctgggagcttacagctcctgctttccggtggccttcttggagccccaccttaacaagcacaaccagtactcgctgctcaaccgtattgcggatcactcactggaggcgcaggacattatggtcaagatggagagctgtatgccaaatctagagaccattctcgccgaggtcgaccagtttgtggagtcggacaagacatacaatgatgcgcctcatattatcgacgtgatcctgccgctgctttgcgcctatctaccgttttggtggtcccagggaccggataatgtcagtcccaccagtggcaaccacgtgaccatggtcacagccgatcacatgaatccgttgctgcgaaatgtgcttaaaatgatcaagaagaacattggcaacgataacgccccttggatgactcgcattgccgcctatacgcagcagattatcatcaatacgtcggaggagctgctcaaggatccgttcttgccgctggcggagcgggtgaagaagcgcactgagaacatgctgcacaaggaggacagcatgcgaggattcatcaagtcggccacggacgacacttcgcaggtggagacccagctgcaggaggactggaatctgctagtgcgagacatatactcgttctatcccctgctcatcaagtacgtggatctgcagcgaaaccactggctgaaggacaacataccggaggccgaggagctctacaaccatgtggcagagatcttcaatatatggtctaagagccagtacttccttaaggaggagcagaacttcatctctgccaatgagatcgacaacatggccttgatcatgccaactgcaaccaggaggtcggccatctcggaaggtgctcctgctgtgggtggcaaggtaaagaagaagaagaagaacagggacaagaagcgcgacaaggacaaggaggtgcaggccagtctgatggtggcctgcctgaaacgcctcctacccgttggactgaatctgttcgcgggtcgagagcaggaactggtgcagcactgcaaggatcggtacctgaagaagatgcccgagtacgatgtgatcgagttcgcccgcaaccagctgaccctgccggataagctggacccgtcggacgagatgtcctggcagcattacctttactcaaagctgggcaagacggaggaaccggtggacgaacaggcgctggagaaggccaatgttaactccaacgagaagggcaaggacaaaacccaggagacagtggatcgcatcgtggcgatggccaaggttctgtttggcctgcacatgatcgaccatccacaacagcagagcaagaatgtctacaggagcgttgtgtcgatccaaaggaagcgtgccgtaatcgcatgcttccgtcagacatcgctgcattctctacccagacatcgggcctgcaacatcttcgcacgatcgtactacgagcagtggctgcaggaggagaacgtgggccaagaggtgatggtcgaagatctgacgcagacgttcgaggactccgagaaatccaagaaggagggcgaggagacggacagcaagccggatccgctaacccaactggttaccactttctgccgcggcgccatgacggaacgcagcggtgccctccaggaggatctgctctacatgtcctatgcccagatcgcggccaagtccacgggcaaggaggaggaggaaggcggcgacgaggaaggcggtgagggtggcgaagagggcgaaggcaccagcatccatgaacaagagatggagaagcagaagctgctcttccatcaggcacgtctctccaatcgtggcgttgccgaaatggtgctgttgcacatttccgcctccaaaggtataccttcggagatggtaatgacgacactcaatctcggcatcgccattttgcgcggcggcaacatcgacatccaaatgggcatgctgaaccacttgaaggaaaagaaggacgttggcttctttacctccatcgccggactgatgaactcctgcagtgtactggacctggacgcctttgagcgaaacaccaaagcagagggtcttggtgtaggttccgaaggcgccgcgggcgagaagaacatgcacgacgcggagttcacctgtgcgctgttccggttcatccagctgacctgcgagggccacaacttggaatggcaaaactatttgaggacccaggcgggtaacaccaccaccgtgaacgtggtcatctgtactgtggattatttgcttcgtctgcaagagtccatcatggacttctactggcactactccagcaaagagatcatcgatcccgctggaaaggccaacttcttcaaggccatcgaagtggctagccaagtatttaacaccctcactgaagtcatccagggtccgtgtaccctcaatcagcaggccttggcacactcgaggttgtgggatgcagttggtggcttcctcttcctgttttcccacatgcaggacaagctgtcaaagcactccagccaagttgatctgctcaaggaactgctgaatctgcaaaaggacatgatcaccatgatgctttccatgctggaaggaaatgttgttaacggcactattggcaagcagatggtggacacgctggtggagtctgccagcaatgtggagctgattcttaagtacttcgacatgttcctgaagctcgccgaccttatcgaatcgcccagcttccacgaagtggacatgaagaacgagggttgggtgacccccaaagactttagggaaaagatggagcaatccaagaactacacaccggaagaaatggatttccttttggcctgctgcgagcgcaaccacgagggcaagatcgattaccgggccttcgtggagcacttccacgaaccatcaaaggagatcggtttcaacctggctgtgctcctgaccaacctcagcgaacacatgccaaacgaaccgcgcctggcgcgcttcctggagaccgccggctcggtgctcaactacttcgagcccttcctgggccgcatcgagattctcggcagctccaagcgcatcgagcgcgtttactttgagatcaaggactcgaacatcgaacagtgggagaagccccagattcgcgagtccaagcgtgccttcttttattccatcgtcaccgaaggtggcgacaaggagaaactggaggcctttgtgaacttctgcgaggacgccatctttgagatgacccacgcctcgggacttatggccaccgatgatggcggtggcaatgtgaagcgggacactgcctatagttcctatatgagcgaggaagaggaggagcgagccgctcgtgatcccatccgccgcaccatcaccgccgtcaaagaaggactcaagttcggagtgcacatgcttagtccggcgaacatcaagcatcagatcggagtgatgcagaccaaatccataccagaactcatagtcggctttttcaagatcatcttctatatattttactataccggatatgcacacttctgcgtggtgcgttacatattcggcatcctactgaacctgatgcgaggacctgctccagagcaggaggaggaaccggtagtggaggaggaaacgtttggaagagcactgccaccgctgccgcttgaagaaccaccgggcacggtgcaagcctttgggctggacatcaacaaggaggagaacggcatgtacaaggtggtggtgcacgaatctccagccaattcctcgatggaggagggcggagaatccagtcccgaggacggagcagctgccagcggcgaattggtcgaaggtgaaccacaccaggagcccatttccattgtggatctgctgggtggagaggctgcaaagaaggcggcacaggagcggcaggaggcgcaaaaggctcaggaggccgctatggcctccatcgaggcggaagccaagaagtcgtcatctgcgcctcaggagactccagctgttcaccagatcgacttttctcagtacacccatcgcgccgttagcttcctcgccagaaacttctacaacctcaagtatgtggccttggtgctggctttcagcattaacttcatgctgctcttctacaaagtcacctcgtttaccgaagaagcagacagctctgccgaagaggagctcatcctgggctccgggtcgggaggaggtgcggacatcacgggctctgggtttggcggatcaggggacggaggatcgggcgatggcgaaatggaggacgagataccggaacttgtgcacgtggacgaagacttcttctacatggaacacgttctccgcattgcggcatgtctgcactcacttgtctccctggccatgttgattgcctactaccacctcaaggttccattggccatcttcaagcgggaaaaagagattgcccgccggctggagttcgagggattgttcattgcagagcagccggaggatgacgacttcaagtcgcactgggacaagctggtaatttcggcgaaaagtttcccggtgaactactgggacaagttcgtgaagaagaaggtgcgccaaaagtacagcgagacctacgactttgattcgatctctaatctgctgggcatggagaagagcacgttcgcggctcaggagagcgaggaaacgggcatcttcaagtacatcatgaacatcgactggcgctatcaggtgtggaaggctggcgtcaccttcacggacaacgccttcctctactcgctgtggtacttcagcttctcggtgatgggtaacttcaacaacttcttcttcgccgcccatctgctcgatgtggccgtgggcttcaagaccctgcgcaccatcctgcagtctgtgacccacaacggcaagcaactggtgctcaccgtgatgctgcttaccatcatagtgtacatctacactgtgatcgcgttcaacttcttcaggaagttctacatccaggaggaggacgaggaggtggacaaaaagtgccacgacatgttgacctgcttcgtgttccatctgtacaagggtgtgagagcgggcggtggaataggcgacgagatcggggatccagatggagacgactacgaggtctaccgcatcatcttcgatatcacgttcttcttcttcgttattattattctgctggccattatccagggtctgatcatcgacgccttcggcgagctgcgtgaccaactggagtcggtgaaggacaacatggagtccaactgcttcatctgcgggatgggcaaggacttcttcgacatagtaccgcacggcttcgacacgcacgtccagaaggagcacaacttagccaactacatgttcttcctgatgcatttgattaacaagccggacacggagtataccggccaggagacgtacgtgtggaacatgtaccagcagcgcagctgggacttcttcccagtgggagactgcttccgcaagcaatacgaggatgagctttccggcggaggcggcggcggctaaatgactgcggattcgccgcgtctgatttctgggcacaatcacactggcactagacggtccaaggactctcgggatccaattttgtatcggtagtttgacaacatctggaatttttacctagtcaactttagcaatgtattttaagcaatatcctacacaatcgtttttatgtacgtagaggagtacgacctgtttccaaactgaaatattgatgacgattctagcacgtataacaacaaatgttcttaactcattttgaaataaatctattcattttgaacg

SEQ ID NO: 22563 - protein, 5107 aa, DROSOPHILA
MVTLSCTATGERVCLAAEGFGNRHCFLENIADKNVPPDLSQCVFVIEQALSVRALQELVTAAGSETGKGTGSGHRTLLYGNAILLRHHNSDMYLACLSTSSSNDKLSFDVGLQEHSQGEACWWTVHPASKQRSEGEKVRVGDDLILVSVATERYLHTTKENEQSIVNASFHVTHWSVQPYGTGISRMKYVGYVFGGDVLRFFHGGDECLTIPSTWGREAGQNIVIYEGGVVMAQARSLWRLELARTKWTGGFINWYHPMRIRHITTGRYLGVNDSNELILVKKEEASIATTTFCLRQEKDDEKKVLEDKDLEVIGSPIIKYGDTTVIVQHCETSLWLSYKSYETKKKGVGKVEEKQAILHEEGKMDDCLDFSRSQEEESKTARVIRKCSSLFTQFITALETLQSNRRHSIFFQKVNLNEMVMCLEDLINYFSQPEDDMEHEEKQNRFRALRNRQDLFQEEGVLNLILEAIDKINIITSQGFLASFLAGDETGQSWDLISTYLYQLLAAIIKGNHTNCAQFANSNRLNWLFSRLGSQASSEGSGMLDVLHCVLIDSPEALNMMRDEHIKVIISLLEKHGRDPKVLDVLCSLCVGNGVAVRSSQNNICDFLLPGKNLLLQTLLVDHVASIRPNIFVGRVDGSSMYQKWYFEVTMDHIEQTTHMMPHLRIGWANTSGYVPYPGGGKKWGGNGVGDDLYSFGFDGAFLWTGGRKTLVVDALPEEPFIRKGDVIGVAIDLSVPIITFTFNGVKVRGSFRDFNLDGMFFPVMSCSSKLSCRFLFGGDHGRLKFAPPMGFSALVQCLMPQQILSLDPCFYFGNLAKNVLAGPWLIEDDTAFVPKPVDTTGVTLPSSVDQIKEKLAENIHEMWALNKIEAGWSWGEHRDDYHRIHPCLTHFEKLPAAEKRYDNQLAVQTLKTIISLGYYITMDKPPARIRPVRLPNEIFMQGNGYKPAPLDLSAVTLTPKLEELVDQLAENTHNLWARERIQQGWTYGLNEDSENHRSPHLVPYAKVDEAIKKANRDTASETVRTLLVYGYVLDPPTGEGTEALLAEAQRLKFAGFRTYRVERNYAVTSGKWYFEFEVLTSGPMRVGWARADCYPGAMLGSEDTSWAFDGHNVTKMHAGSIEHFGVRYEAGDVIGCFIDVKEQTISFSLNGELLMDALGGETTFADVTAEGVGFVPACTLGVGQKARLIYGQDVDSLKFFTTCGLQEGYEPFCVNMRRPVTHWYTKDQPIFENTEEMPDCRIDVTRIPGGADTPPHLKISHNTFETMEKANWEFLRLSLPVTCMGEFISEQEKARRWDEIKNRQYRLMREAEIAAQMQVQTQAAHMDHMLKGGFNMNDIKGLTRNFDEHADAEADHMMRGPNRPPRKGSLTRNITFETDMSAALDEMQRSTSVLDMNGLGEEMDDKKKRGRSPFKFFSKKSRDQSREKMGARTLDTSLERRNTVAHGRNVVNQQMTTRAPTLRLNNAEIPPSPVPQGPKQLSGSNLGQQPVETSGDEMFDAECLKLINEYFYGVRIFPGQDPTHVYVGWVTTQYHLHSREFNKNKVRRGSVYIEDDYEMAIERIDRQSCYVVRADELFNEVTQDASGKGASQGMFVGCFVDTATGIIRFTCEGKDTSHRWMMEPDTKLFPAIFVEATSKEILQIELGRTPTTLPLSAAVLPTSDKHINPQSPPRLKVQCLRPHQWARVPNTALQVHALKLSDVRGWSMLCEDPVSMLALHIPEEDRCIDILELIEMDKLLSFHAHSLTLYAALCYQSNYRAAHALCQHVDQKQLLYAIRSEYMSGPLRQGFYDLLIALHLESHATTMEVCKNEYITPLGAELKELYSDEEMQHSLRSLVTESVRPQLRMTEITPPVIATSSMPSVSSEPIPDIDQLYSPKFPLEVVRQFVMEALKDAVEINQVHNRDPIGWTNENLFLPLIKLTDRLLLVGVLTDEDVQRLLVMIDPETWDQAFEREGKDEHRKGLLTMKMAEGAKLQMCYLLHHLYDTQLRHRVESIIAFSHDFVGDLQTDQLRRYIEIKQSDLPSAVAAKKTKEFRCPPREQMNQILCFKNLEPDDQDNCTCGLELRGRLGDFHDSLMQKVSLNALQEPDGVEGTAIEEVKTGPITKIYNFINTVKELEEGPKEVEEPEKKTPEEVFRKVLIKTIVSWAEESQIENPKLVREMFSLLLRQYDTVGELVRALEKTYVINTRARDDVAEMWVGLSQIRALLPVQMSQEEEELMRKRLWKLVNNATFFQHPDLIRILRVHENVMAVMMNTLGRRAQAQSDAPTQSEVAEGAPSKEKDTSHEMVVACCRFLCYFCRTGRQNQKAMFDHFDFLLDNANILLARPSLRGSTPLDVAYSSLMENTELALALREHYLEKIAVYLSRCGLQSNSELVEKGYPDLGWDPVEGERYLDFLRYCVWVNGESVEENANLVIRLLIRRPECLGPALRGEGEGLFRAIVEANRMSERISDRCKMQDEAEGTIAGLNFTHPLPEGEEDEDYIDTGAAILNFYCTLVDLLGRCAPDASVIEQGKNESLRARAILRSLVPLEDLQGVLSLKFTLSQTAPGEEKPKSDMPSGLLPNNKQSIVLFLERVYGIEAQDLFYRLLEDAFLPDLRTATILDKSDGSESDMALAMNRYIGNSILPLLIKHSKFYNEAENYASLLDATLHTVYRLSKNRMLTKGQREAVSDFLVALTSQMQPAMLLKLLRKLTVDVSKLSEYTTVALRLLTLHFDRCAKYYGSTQGQGSYGASSDEEKRLTMLLFSNIFDSLSNMDYDPELFGKALPCLIAIGCALPPDYSLSKNTDEDYYGRQMGAPDQPQYMPNPIDTNNVHLDNDLNSLVQKFSEHYHDAWASRRLEGGWTYGDIRSDNDRKHPRLKPYNMLSEYERERYRDPVRECLKGLLAIGWTVEHSEVEVALNHRGSTRRQSKPQINEFQNEGSPFNYNPHPVDMSNLTLSREMQNMAERLAENSHDIWAKKKNEELNGCGGVIHPQLVPYDLLTDKEKKKDRERSQEFLKYMQYQGYKLHKPSKGGAVEEGGATQAAVELRFSYSLLEKLIQYLDRATINMKLLKPSTTFSRRSSFKTATRDIKFFSKVVLPLMEKYFSTHRNYFIAIATATNNIGAASLKEKEMVASIFCKLAALLRNRLSAFGPDVRITVRCLQVLVKGIDARTLTKNCPEFIRTSMLTFFNQTSDDLGNTILNLQDGKYSHLRGTHLKTSTSLGYVNQVVLPVLTAMFDHLAACDYGSDLLLDEIQVASYKILAALYHLGTDGTLTHDRKYLKTEIERHRPALGSCLGAYSSCFPVAFLEPHLNKHNQYSLLNRIADHSLEAQDIMVKMESCMPNLETILAEVDQFVESDKTYNDAPHIIDVILPLLCAYLPFWWSQGPDNVSPTSGNHVTMVTADHMNPLLRNVLKMIKKNIGNDNAPWMTRIAAYTQQIIINTSEELLKDPFLPLAERVKKRTENMLHKEDSMRGFIKSATDDTSQVETQLQEDWNLLVRDIYSFYPLLIKYVDLQRNHWLKDNIPEAEELYNHVAEIFNIWSKSQYFLKEEQNFISANEIDNMALIMPTATRRSAISEGAPAVGGKVKKKKKNRDKKRDKDKEVQASLMVACLKRLLPVGLNLFAGREQELVQHCKDRYLKKMPEYDVIEFARNQLTLPDKLDPSDEMSWQHYLYSKLGKTEEPVDEQALEKANVNSNEKGKDKTQETVDRIVAMAKVLFGLHMIDHPQQQSKNVYRSVVSIQRKRAVIACFRQTSLHSLPRHRACNIFARSYYEQWLQEENVGQEVMVEDLTQTFEDSEKSKKEGEETDSKPDPLTQLVTTFCRGAMTERSGALQEDLLYMSYAQIAAKSTGKEEEEGGDEEGGEGGEEGEGTSIHEQEMEKQKLLFHQARLSNRGVAEMVLLHISASKGIPSEMVMTTLNLGIAILRGGNIDIQMGMLNHLKEKKDVGFFTSIAGLMNSCSVLDLDAFERNTKAEGLGVGSEGAAGEKNMHDAEFTCALFRFIQLTCEGHNLEWQNYLRTQAGNTTTVNVVICTVDYLLRLQESIMDFYWHYSSKEIIDPAGKANFFKAIEVASQVFNTLTEVIQGPCTLNQQALAHSRLWDAVGGFLFLFSHMQDKLSKHSSQVDLLKELLNLQKDMITMMLSMLEGNVVNGTIGKQMVDTLVESASNVELILKYFDMFLKLADLIESPSFHEVDMKNEGWVTPKDFREKMEQSKNYTPEEMDFLLACCERNHEGKIDYRAFVEHFHEPSKEIGFNLAVLLTNLSEHMPNEPRLARFLETAGSVLNYFEPFLGRIEILGSSKRIERVYFEIKDSNIEQWEKPQIRESKRAFFYSIVTEGGDKEKLEAFVNFCEDAIFEMTHASGLMATDDGGGNVKRDTAYSSYMSEEEEERAARDPIRRTITAVKEGLKFGVHMLSPANIKHQIGVMQTKSIPELIVGFFKIIFYIFYYTGYAHFCVVRYIFGILLNLMRGPAPEQEEEPVVEEETFGRALPPLPLEEPPGTVQAFGLDINKEENGMYKVVVHESPANSSMEEGGESSPEDGAAASGELVEGEPHQEPISIVDLLGGEAAKKAAQERQEAQKAQEAAMASIEAEAKKSSSAPQETPAVHQIDFSQYTHRAVSFLARNFYNLKYVALVLAFSINFMLLFYKVTSFTEEADSSAEEELILGSGSGGGADITGSGFGGSGDGGSGDGEMEDEIPELVHVDEDFFYMEHVLRIAACLHSLVSLAMLIAYYHLKVPLAIFKREKEIARRLEFEGLFIAEQPEDDDFKSHWDKLVISAKSFPVNYWDKFVKKKVRQKYSETYDFDSISNLLGMEKSTFAAQESEETGIFKYIMNIDWRYQVWKAGVTFTDNAFLYSLWYFSFSVMGNFNNFFFAAHLLDVAVGFKTLRTILQSVTHNGKQLVLTVMLLTIIVYIYTVIAFNFFRKFYIQEEDEEVDKKCHDMLTCFVFHLYKGVRAGGGIGDEIGDPDGDDYEVYRIIFDITFFFFVIIILLAIIQGLIIDAFGELRDQLESVKDNMESNCFICGMGKDFFDIVPHGFDTHVQKEHNLANYMFFLMHLINKPDTEYTGQETYVWNMYQQRSWDFFPVGDCFRKQYEDELSGGGGGG

SEQ ID NO: 22564 - DNA, 4062 bp, DROSOPHILA
ggaatgacttcgtttaacgagatgattgcctcatcattgcctttgaattgctctaggaacttcagactctccgttctagtaaagttcattttttttttttttgaatagttactacgttagaaatccaaactcacataaaaatttcctgaaactgatttaagatattgaaatggaatgttggggaaagcatcttgcgtcgtgcatgccatttttttcctaaaaagcgtgatagcgttgtaaaacaaatgaagcatgtgctaatccaaactcacccgtggatgtcaacagtccagttctcagaaatggatgaagaaaatcgtaaattgttcccttgtttattagatttggatcattaagcacacgttccgcactatctgcgtctataacattgtagatggccgttcccattgcatattccgcgtagcttttgcccagtttttttgcacagtcacgcgagtgttcaaaaacaccagctgattgtataataagaataacagccatgatatgatgtcattagcatagataagccagcaaagctccccccaaataacttacagtgatctttgccgtacaaatcgaagctgttggcaaatatggtactgcccttcactaatggagcaatgctctccggattctgtccattcttggttcgaatcctcttggcaaagaatccgagaatgcagtagtccctgttcagcctatagatccactgaattagaacaataaaagctcccacgagccacagaattaacatttttagagaaccgcatccgcagatttgtcttaccaaactgatcgctgagatcactagcagccggttttatgaacaaacaattccggtataaaaagcgaaactgattagattgtctcacacaatttcagttcacaagcgaatgctatgatatgagtttggttatctaggtacactgaggaatacattgtgctagtacatgcaataaatattttataaatatacaagttagctgtttattgatatgggtgtaattaagtgattcagatcttcatgagtaacatctagttagaccgaactttaacaaatgattaaataagtcacgttcgcctcacaagctttacgcgaatcttgtcttgggtgcgcagagttatacccgtatggaagacaatcttctgcggatcgatagccttcaaaaccttgaactgcttcagaaggaccaccatcagcgttttcatctcctgcatggcatactttttacctgcaaaataaaagcaatcattagaaagtcattggatagagaaaaacgtgaccttcgcttaccaatacaatttctttgtccagcactgaagggaacataagcgtacgtatgacgatcctgcacattttcgggtaggaatctctcaggacggaactcttcaggcgaatcccagtacttggcgttgcgatggatgtcaaagacatgaatggttatctgggcgccctttggcaggatcagtccattggccagttcagtctcctggacggcttcacgacccataatcggtaccgagggaaacaggcgcgtagtttccttcatgaagtactccagatacttgagcttattcaactggccaacatctaagttgctcaggtcatctgaaaacgatctcataagaggtttctttttagtgctaagtgcagtgggcttaccatctatgtgctcttgaatctcctggtaacataactcttgcttgtctgggtttagggacatgttcattagaccaaaaatgagcccaattgaggtagtatcgtagccctcaaacatcagagtgtccacctcctcacaaatcccaatgtgatcgatgaggccatccttctcagcataaattagggtgtccagcatggcgaaacgcttctttgagacaaatctagtgttacgtgtataagtatatattcaacttgcaaattatttccccaatttacgtacccatcatcatcagcggtgcttgaacttttgtccagctcatcctttagcaagtccctccttttggcaataatctcgctcgaaaatctatgaaccacatcgagtgcggaagcgaaatccttggcagcaaacatttcgaaaagcttgtcgccccataaaagtgggttactcaagcgacgaatgaagcattcttcaatctgactgaagttctcccggtatcgatcccccttctcggccatctcgtcgagcttaacacccatggcggtttctgaagatttgaaatacacaagaatttatagggtgaatctatgaacttaaggtattgacaacccaccacaaatactgtttagagtaaatcttggaataacatcgtgtaacgttatggttacctcatcttgaccctcaaattgtagcaggaacttttgactctccgttctaaaaacgaaagccattggtttcttaagataataaatagaatggaggtatcttacttaaagatctcctggaactggttcaatatgttgaaatggaatgtcggagtgagcatcttgcggcgagcatgccattttttgcctgtaaaaggagtacggtagtatgaagaatagcgccgagtgatgaatccacagtccaactcaccagtcgatgtcagcaagcccgtccttaggaatggatgtaggaagttgtagacgagccccttggttatgagattcggatgattcagcacattttccgcgctatccgcatcgataatgttgtaaatcgcctttccaaagacatattctatgtagctagtacccatttccttagcacgctcacgcgagtaattgaaaacaccagctagacagtcattacatcagccaaatggggtccagcgttcggcttttgctattactcaccgtgatctcgcccatacaagtcaagggtgttgccgaatattgtttttcccttggctatgggagcgatgatctccacaggggttccatcctttaatcgaattcttttggtgaagaaggacaggatgtggtaatccttgttggctctgtggagccagtagagcagggcacttagggccagaatcagccacaagataatcattttggcacaaccgcgttgacggaactctcgtttcacactgattgcacctatcgcagatttctatataaacagctcatactatcagccggttttgtagcaaaaattacacctaaaagctgcttgaactgattagattgcacggtggcgttcccgctgttggcgttcgactagctacgatttgtggttgaattcatctaacaaaaacaatgaatgacttgctagtttgtttgaatgaaagcttgtttcatttgaatgtgggataaccggttttattgttaacaatattcgtccaatgtatggctccaagctacgacgattagcactggagagtcagggttaattagtcatctaatatcaacaacgcacttaaatcaatttagcacttagtaagcatgaataaggaatatcctaaaatcgataaacactaaacgcaattccgcctcacaagcttgacttttattttatttttgaagcgcaaggttatgcccacttggaagacaatggacttgggatcgataacaggcagaatcttgaaatgcttgaggatgaccaccatcagggtcttcatctcctgcatggcgtacttctggcctttgtggttaaaagagatagataatacacatatgtatgagaaccgtatattttgaagacttgtactcttacctatgcagttcctttgtccagcactgaagggaatgtaggcgtaaggatgccttttcaggcagttctgaggtaggaatcgctctgggcggaattcttcgggcgattcccaatacttgggattgcgatggatgtcaaagacgtgtatattaatctgagagcgcttcggcaggattaggccattctctagttccgtttcctggagtgtctgacgacccatgatgggaatcgaaggatacaggcgcatggtttcctttataaagtagcccagataatttagtttacttagttgacttaggttcaggttgctcaggtcgtctagaacggtacgaagaataaaatttatgattctcacgattacgattgcagc

SEQ ID NO: 22565 - DNA, 1643 bp, DROSOPHILA
cgagagttccgtcaacgcggttgtgccaaaatgattatcttgtggctgattctggccctaagtgccctgctctactggctccacagagccaacaaggattaccacatcctgtccttcttcaccaaaagaattcgattaaaggatggaacccctgtggagatcatcgctcccatagccaagggaaaaacaatattcggcaacacccttgacttgtatgggcgagatcacgctggtgttttcaattactcgcgtgagcgtgctaaggaaatgggtactagctacatagaatatgtctttggaaaggcgatttacaacattatcgatgcggatagcgcggaaaatgtgctgaatcatccgaatctcataaccaaggggctcgtctacaacttcctacatccattcctaaggacgggcttgctgacatcgactggcaaaaaatggcatgctcgccgcaagatgctcactccgacattccatttcaacatattgaaccagttccaggagatctttaaaacggagagtcaaaagttcctgctacaatttgagggtcaagatgaggtaaccataacgttacacgatgttattccaagatttactctaaacagtatttgtgaaaccgccatgggtgttaagctcgacgagatggccgagaagggggatcgataccgggagaacttcagtcagattgaagaatgcttcattcgtcgcttgagtaacccacttttatggggcgacaagcttttcgaaatgtttgctgccaaggatttcgcttccgcactcgatgtggttcatagattttcgagcgagattattgccaaaaggagggacttgctaaaggatgagctggacaaaagttcaagcaccgctgatgatgatggatttgtctcaaagaagcgtttcgccatgctggacaccctaatttatgctgagaaggatggcctcatcgatcacattgggatttgtgaggaggtggacactctgatgtttgagggctacgatactacctcaattgggctcatttttggtctaatgaacatgtccctaaacccagacaagcaagagttatgttaccaggagattcaagagcacatagatgatgacctgagcaacttagatgttggccagttgaataagctcaagtatctggagtacttcatgaaggaaactacgcgcctgtttccctcggtaccgattatgggtcgtgaagccgtccaggagactgaactggccaatggactgatcctgccaaagggcgcccagataaccattcatgtctttgacatccatcgcaacgccaagtactgggattcgcctgaagagttccgtcctgagagattcctacccgaaaatgtgcaggatcgtcatacgtacgcttatgttcccttcagtgctggacaaagaaattgtattggtaaaaagtatgccatgcaggagatgaaaacgctgatggtggtccttctgaagcagttcaaggttttgaaggctatcgatccgcagaagattgtcttccatacgggtataactctgcgcacccaagacaagattcgcgtaaagcttgtgaggcgaacgtgacttatttaatcatttgttaaagttcggtctaactagatgttactcatgaagatctgaatcacttaattaca

SEQ ID NO: 22566 - protein, 513 aa, DROSOPHILA
MIILWLILALSALLYWLHRANKDYHILSFFTKRIRLKDGTPVEIIAPIAKGKTIFGNTLDLYGRDHAGVFNYSRERAKEMGTSYIEYVFGKAIYNIIDADSAENVLNHPNLITKGLVYNFLHPFLRTGLLTSTGKKWHARRKMLTPTFHFNILNQFQEIFKTESQKFLLQFEGQDEVTITLHDVIPRFTLNSICETAMGVKLDEMAEKGDRYRENFSQIEECFIRRLSNPLLWGDKLFEMFAAKDFASALDVVHRFSSEIIAKRRDLLKDELDKSSSTADDDGFVSKKRFAMLDTLIYAEKDGLIDHIGICEEVDTLMFEGYDTTSIGLIFGLMNMSLNPDKQELCYQEIQEHIDDDLSNLDVGQLNKLKYLEYFMKETTRLFPSVPIMGREAVQETELANGLILPKGAQITIHVFDIHRNAKYWDSPEEFRPERFLPENVQDRHTYAYVPFSAGQRNCIGKKYAMQEMKTLMVVLLKQFKVLKAIDPQKIVFHTGITLRTQDKIRVKLVRRT

SEQ ID NO: 22567 - DNA, 3961 bp, DROSOPHILA
cttagattttctgagatccaaacgttcgcttgacacatgtgaaagcgagggaaatttaatttacatgactcacaaatggaatccatttaatgttgacttatggcgacgaagcactagcgcacagagcactaatgaaatatgcagtagccgagtagcagctaaaaccagagctgcctttcacccatttccatgtgctgtcccataaatcctgggtccccaggatggatgatgatgttggaacgagttgggcgcacactaaaaaatatgcgtttacgataattattttcaatagtagagtagtagtaagccacatataaaagagaagctaactaaaaatatcccttcgaaacatgatataaatatttcataaaataaataggaagccaaagatagatggaacttatttcagtgcaccacacacagtgcattttgcgagcccatggtcacccatgtctttttgccacattttatgtgcttagaacaaagctgagtctgcattatgcatgcaaatggtataactgagtaacgaactgtcaaaatcgcagttaaagcaaaaaggagtcgttgggaaagggatgtagcctcggcaggaggaggaaaaccaaatgacaaaaagtcgccagcgcattatgcatttgcattcccatatatgtgagctaaaggacagagattacttgacttttcctgggctgcctcaaaaataataggaggggtaggaaatgacagggagctcccactgtgtgggaaatgggagttggaattgtaatagctgctggaaaagaagaagagaagtgcttctacccgccagggcatgaatgatttatagggcggcagctgtcgagatgccaacgattatcggccataagctagtcacaggacatttttgcaccaagagaaagaagaaaggagtctttggatgaaactattgttcactgtgcactttatgactaacagagttccgtgaacaattccattccgttaaagctgcctcattttcttctcacgagcttcacgtgaatctggttcttggtccgcagtgttagtccagtttgaaaaacaatagttttcggatcgatttctggtagaatttggaactgcttcagtagggccaccattagggttttcatctcctgcatggcaaatttttgacctacaaagaaaatgatatgtttatccaatcattccatgagagtaagcaatattacatacctatgcaattcctctgaccagcactgaatggaatatatgcgtaggtgtgacgattctgcgagttttcgggcagaaatctctccgggcgaaactcttcgggagaatcccagtactcgggattgcgatggatgtcgaagacatggacaaaaatctgggagccctttggcaagatgagaccgttgctcagctcagtttcccgcgtagtttccctacccatggcgggaacagaaggaaacaggcgcatggtttccttgataaagtattccagattcttcaatttgttcaactgcccgatgttcaagatgttaagctcatctgaaagattttatatgcttatgaaatcgtaagtttactaatttcagctcatttcaccatctatgttagcttggatctcttggtagcatttttcttgctcctcgggatataaagacatgttcattagtccaaacatgagcccaattgaggtagtatcgtagccctcaaacatcaaagtgtccacctcctcacaaattccaatgtgatcgatgaggccatccttttcggcaagaataagggtgtccagcatggcaaagcgctttttactggtaaatctaaagtaatcggtattgttatggacttatggacgactgtcaaatgccttacaattcatcttcagcggtctgagtgtttcctctgctatctatctcatcattcagctgatctctcctcttggcaataatctcgctggaaaatccgtggaccacatcgagtgcagacgcgtaatccttttcggcaaacatcttgaatagtgtatcgctccatagaagtgggttgctcatgcgacgaatgaagcattcttcgatctgacggaagttctcccggtaccgatcccccttctcggccatctcgtccagcttcacacccatggccgtctctgcagatatgtttgtggttttataattaacaaaacttttaaaacgtattgcatctcaccacaaatgctattcagggtaaatctgggaatgacttcgtttaacgagatgattgcctcatcattgcctttgaattgctctaggaacttcagactctccgttctagtaaagttcattttttttttttttgaatagttactacgttagaaatccaaactcacataaaaatttcctgaaactgatttaagatattgaaatggaatgttggggaaagcatcttgcgtcgtgcatgccatttttttcctaaaaagcgtgatagcgttgtaaaacaaatgaagcatgtgctaatccaaactcacccgtggatgtcaacagtccagttctcagaaatggatgaagaaaatcgtaaattgttcccttgtttattagatttggatcattaagcacacgttccgcactatctgcgtctataacattgtagatggccgttcccattgcatattccgcgtagcttttgcccagtttttttgcacagtcacgcgagtgttcaaaaacaccagctgattgtataataagaataacagccatgatatgatgtcattagcatagataagccagcaaagctccccccaaataacttacagtgatctttgccgtacaaatcgaagctgttggcaaatatggtactgcccttcactaatggagcaatgctctccggattctgtccattcttggttcgaatcctcttggcaaagaatccgagaatgcagtagtccctgttcagcctatagatccactgaattagaacaataaaagctcccacgagccacagaattaacatttttagagaaccgcatccgcagatttgtcttaccaaactgatcgctgagatcactagcagccggttttatgaacaaacaattccggtataaaaagcgaaactgattagattgtctcacacaatttcagttcacaagcgaatgctatgatatgagtttggttatctaggtacactgaggaatacattgtgctagtacatgcaataaatattttataaatatacaagttagctgtttattgatatgggtgtaattaagtgattcagatcttcatgagtaacatctagttagaccgaactttaacaaatgattaaataagtcacgttcgcctcacaagctttacgcgaatcttgtcttgggtgcgcagagttatacccgtatggaagacaatcttctgcggatcgatagccttcaaaaccttgaactgcttcagaaggaccaccatcagcgttttcatctcctgcatggcatactttttacctgcaaaataaaagcaatcattagaaagtcattggatagagaaaaacgtgaccttcgcttaccaatacaatttctttgtccagcactgaagggaacataagcgtacgtatgacgatcctgcacattttcgggtaggaatctctcaggacggaactcttcaggcgaatcccagtacttggcgttgcgatggatgtcaaagacatgaatggttatctgggcgccctttggcaggatcagtccattggccagttcagtctcctggacggcttcacgacccataatcggtaccgagggaaacaggcgcgtagtttccttcatgaagtactccagatacttgagcttattcaactggccaacatctaagttgctcaggtcatctgaaaacgatctcataagaggtttctttttagtgctaagtgcagtgggcttaccatctatgtgctcttgaatctcctggtaacataactcttgcttgtctgggtttagggacatgttcattagaccaaaaatgagcccaattga

SEQ ID NO: 22568 - DNA, 1537 bp, DROSOPHILA
atgttaattctgtggctcgtgggagcttttattgttctaattcagtggatctataggctgaacagggactactgcattctcggattctttgccaagaggattcgaaccaagaatggacagaatccggagagcattgctccattagtgaagggcagtaccatatttgccaacagcttcgatttgtacggcaaagatcactctggtgtttttgaacactcgcgtgactgtgcaaaaaaactgggcaaaagctacgcggaatatgcaatgggaacggccatctacaatgttatagacgcagatagtgcggaacgtgtgcttaatgatccaaatctaataaacaagggaacaatttacgattttcttcatccatttctgagaactggactgttgacatccacgggaaaaaaatggcatgcacgacgcaagatgctttccccaacattccatttcaatatcttaaatcagtttcaggaaatttttataacggagagtctgaagttcctagagcaattcaaaggcaatgatgaggcaatcatctcgttaaacgaagtcattcccagatttaccctgaatagcatttgtgagacggccatgggtgtgaagctggacgagatggccgagaagggggatcggtaccgggagaacttccgtcagatcgaagaatgcttcattcgtcgcatgagcaacccacttctatggagcgatacactattcaagatgtttgccgaaaaggattacgcgtctgcactcgatgtggtccacggattttccagcgagattattgccaagaggagagatcagctgaatgatgagatagatagcagaggaaacactcagaccgctgaagatgaattatttaccagtaaaaagcgctttgccatgctggacacccttattcttgccgaaaaggatggcctcatcgatcacattggaatttgtgaggaggtggacactttgatgtttgagggctacgatactacctcaattgggctcatgtttggactaatgaacatgtctttatatcccgaggagcaagaaaaatgctaccaagagatccaagctaacatagatgatgagcttaacatcttgaacatcgggcagttgaacaaattgaagaatctggaatactttatcaaggaaaccatgcgcctgtttccttctgttcccgccatgggtagggaaactacgcgggaaactgagctgagcaacggtctcatcttgccaaagggctcccagatttttgtccatgtcttcgacatccatcgcaatcccgagtactgggattctcccgaagagtttcgcccggagagatttctgcccgaaaactcgcagaatcgtcacacctacgcatatattccattcagtgctggtcagaggaattgcataggtcaaaaatttgccatgcaggagatgaaaaccctaatggtggccctactgaagcagttccaaattctaccagaaatcgatccgaaaactattgtttttcaaactggactaacactgcggaccaagaaccagattcacgtgaagctcgtga

SEQ ID NO: 22569 - protein, 512 aa, DROSOPHILA
MLILWLVGAFIVLIQWIYRLNRDYCILGFFAKRIRTKNGQNPESIAPLVKGSTIFANSFDLYGKDHSGVFEHSRDCAKKLGKSYAEYAMGTAIYNVIDADSAERVLNDPNLINKGTIYDFLHPFLRTGLLTSTGKKWHARRKMLSPTFHFNILNQFQEIFITESLKFLEQFKGNDEAIISLNEVIPRFTLNSICETAMGVKLDEMAEKGDRYRENFRQIEECFIRRMSNPLLWSDTLFKMFAEKDYASALDVVHGFSSEIIAKRRDQLNDEIDSRGNTQTAEDELFTSKKRFAMLDTLILAEKDGLIDHIGICEEVDTLMFEGYDTTSIGLMFGLMNMSLYPEEQEKCYQEIQANIDDELNILNIGQLNKLKNLEYFIKETMRLFPSVPAMGRETTRETELSNGLILPKGSQIFVHVFDIHRNPEYWDSPEEFRPERFLPENSQNRHTYAYIPFSAGQRNCIGQKFAMQEMKTLMVALLKQFQILPEIDPKTIVFQTGLTLRTKNQIHVKLV

SEQ ID NO: 22570 - DNA, 3392 bp, DROSOPHILA
ggcccgaaggtcacttgaccaccagggcaccaggcaccatcaccagcagcatcgtctcgatcggcaccagcatctgttcccactaaatacccattcgactcgattctggccccacttgaggtgccgtttgaagagcagacctaaccggatcacgatttctgacttctttatattgtttccactcttgcagcaacgacactttgcagtggatacggatacgcgcaggcccagttgctcgacgaggacgacgacctggccttcggaaggccctggcccacctacagcctacagaacatgcccaagacgcagttcacctgccacgacaagatcctgggtggctactatgccgatccggagacccagtgccagatgttccacgtctgcgtcaagctgcccggagtgggggtgagtaatgttgtgcccaggtgcaagtgcttctggttgagatcaaggcagcagtggctcatgtagcaaacgacattggcatagaaatgatatatttaatatgggtactaaatactacctttttttgacaataatattttctacagaatcaaaatgaaaatactttacaaatttcaatatatggtttattgatcaaaaattaccacctaaatgacaaacttacattaacctacaattttaagattttataaagagatacgcacagattaagcagacaatatagaatttttgatgtaggcaaatttgatagtgcgaattttttgatgcaacctatcacagcgtaaaactggcgggaaaaacgaaagacttaggcaacaaacttgccgacagccattggctcggttccgtcgcgccagctaaatggcaaagtggcacagtcagatgcgatgcactgcggaatgtgtgagatggctccaaatggttcgtgactggtccggatagccggatggctttggtgctggcaaaacctgaagaagaagacggttgactggctgacctttaagcgggggtttcgctgggagccgagtgcaaagtactacaaactagggtcttccaccggattcgtctgcgaatggagctcatctgcatccttctgcggaagacgcgatgttttccggtgcaaccatcgttgagttgcctggcatagggaatcgaacaatttggtcagctggcgaagctgtctttgctcattatactggatatccaacctttgacgttcccacatttcctggaacttgtccgtgtactcggcgattttgtcctggaattttcgcgtttgatctctcaattccatgtgaatggatagcatgagattgctctgcatattcagttgactgttcttttggtcaagttgctgctccaagtggcagtttctctccgtcaaataatctatgtccatctgaaggccctttagctttttaatggacatttctgcttctgagcgaattgccagcattttctgttcaactttttgctcaaaatctccatccgaaatgtcctcctcagagctatcactcgcttcaaggctttccagaaatcgctctagctcttccttgtccacaactattcctaaagccttgttccttagacagcgatatttagcccgctcctgccttaacagtcgtctccacacttcgtcgggcaaactggcattggagttggacgagggagtgggagccggtgtcaccgggtcgtcttttccctccggtggatctgcgtagttgattatcaccgtcctgctcccgttgcccattagttgattgagtagccttgtcagtcgaatgttatagtaccgtatgtgcgtcttcgggctgttggccagtacctggaacaaactgataagcgtgtccaggggcgtgtccgattcgagtggcggcgaatcctccgtcagttgctgcaggtggaccagctgcagtctaccgcaacatttccgcaactgatcgccattcgtctgcttcacatggacggtgaagatcaggtgtgggcaatcgccgccctcagccaccttgtccatgaccctcgcgatataggcgtgtaccccgtgggacgtggccacaaagtgatctcgggtcgtccggcgattgcaacccttgaggttcaccaccaggtcgttcgtctccccgttcagttggacgtaacgcaccgaaacgtgaacttccatgttcgtctccaactcgtagatgcgggtgaagagctcgttcaaaatgcggctgaccacatccgacggatcggctccatggttaaatggtatcctgccacagctgaagactgtgctgatgcgtccaccgaggacctgatcaagcacttcgctgattgcctccgcgcttacttccagttgcaagtcagtgggagatgtcaagagtttgcggaacagatagaccctcatctcaccgggatgagggcactttatctccgggctgcataacataaaaggaaaaggaacaatcaaacggaataagataaacgagttttgtgcgcggctgtgatgtgtatgtttttactatttttttttttaagatagaatggacgctagcctgtcaattagcctactgttcacagtactggcaccgtagatccatcgagaaccagatcgagaacgttcacttctcgctgcctgcgacgcttccctgcggccaagccaaatgccaagtgccaagtggaaatgccaaagtttgcggcaggccaccgatcgcttctggttactgtggcattcaagtcgcctcacaaggaagccactgattggatatgtgcatctacactgctgatcaataaaagaaacttttcaattaatttgttactatttcagcgggttacagtatgtcaacgtctctgaaattggaaaacgtaaagttttttatgatttattggtatctttagtgctgttgaaatatttcttatttttatatcaatgattcttttttttcaattgcaatgttttcgagttttggcccagtttagactgacttggtttaaagttaacaagctgcagctgctgcctagttcttggccttaatgctttattttttggcttaatcgaattcactttaacattgaattttgcatgttgctctgccaatctaatggtgctgtttttggtgcttttgatgctttcgctgtattttgcgcagctccttcatcgaagagctaatccgtttgtccaacaggtgcaggactatcgattcctctgtcccaacacaacggccttcgaccaggagctgcaaatctgcgccaattggttggatgtggactgcgacaaggcaacctccttctacgacaatggccacctcaacgatctatatcgcaacggagacgagagcaaatctgccaacgaagaggaggcaaccttccaccttcaacgcgccgaaacgggtaagtgctagatttataccaaacaaaaattaagttaaataggtatcgaatagtatagt

SEQ ID NO: 22571 - DNA, 1392 bp, DROSOPHILA
atgttatgcagcccggagataaagtgccctcatcccggtgagatgagggtctatctgttccgcaaactcttgacatctcccactgacttgcaactggaagtaagcgcggaggcaatcagcgaagtgcttgatcaggtcctcggtggacgcatcagcacagtcttcagctgtggcaggataccatttaaccatggagccgatccgtcggatgtggtcagccgcattttgaacgagctcttcacccgcatctacgagttggagacgaacatggaagttcacgtttcggtgcgttacgtccaactgaacggggagacgaacgacctggtggtgaacctcaagggttgcaatcgccggacgacccgagatcactttgtggccacgtcccacggggtacacgcctatatcgcgagggtcatggacaaggtggctgagggcggcgattgcccacacctgatcttcaccgtccatgtgaagcagacgaatggcgatcagttgcggaaatgttgcggtagactgcagctggtccacctgcagcaactgacggaggattcgccgccactcgaatcggacacgcccctggacacgcttatcagtttgttccaggtactggccaacagcccgaagacgcacatacggtactataacattcgactgacaaggctactcaatcaactaatgggcaacgggagcaggacggtgataatcaactacgcagatccaccggagggaaaagacgacccggtgacaccggctcccactccctcgtccaactccaatgccagtttgcccgacgaagtgtggagacgactgttaaggcaggagcgggctaaatatcgctgtctaaggaacaaggctttaggaatagttgtggacaaggaagagctagagcgatttctggaaagccttgaagcgagtgatagctctgaggaggacatttcggatggagattttgagcaaaaagttgaacagaaaatgctggcaattcgctcagaagcagaaatgtccattaaaaagctaaagggccttcagatggacatagattatttgacggagagaaactgccacttggagcagcaacttgaccaaaagaacagtcaactgaatatgcagagcaatctcatgctatccattcacatggaattgagagatcaaacgcgaaaattccaggacaaaatcgccgagtacacggacaagttccaggaaatgtgggaacgtcaaaggttggatatccagtataatgagcaaagacagcttcgccagctgaccaaattgttcgattccctatgccaggcaactcaacgatggttgcaccggaaaacatcgcgtcttccgcagaaggatgcagatgagctccattcgcagacgaatccggtggaagaccctagtttgtag

SEQ ID NO: 22572 - protein, 463 aa, DROSOPHILA
MLCSPEIKCPHPGEMRVYLFRKLLTSPTDLQLEVSAEAISEVLDQVLGGRISTVFSCGRIPFNHGADPSDVVSRILNELFTRIYELETNMEVHVSVRYVQLNGETNDLVVNLKGCNRRTTRDHFVATSHGVHAYIARVMDKVAEGGDCPHLIFTVHVKQTNGDQLRKCCGRLQLVHLQQLTEDSPPLESDTPLDTLISLFQVLANSPKTHIRYYNIRLTRLLNQLMGNGSRTVIINYADPPEGKDDPVTPAPTPSSNSNASLPDEVWRRLLRQERAKYRCLRNKALGIVVDKEELERFLESLEASDSSEEDISDGDFEQKVEQKMLAIRSEAEMSIKKLKGLQMDIDYLTERNCHLEQQLDQKNSQLNMQSNLMLSIHMELRDQTRKFQDKIAEYTDKFQEMWERQRLDIQYNEQRQLRQLTKLFDSLCQATQRWLHRKTSRLPQKDADELHSQTNPVEDPSL

SEQ ID NO: 22573 - DNA, 2865 bp, DROSOPHILA
acaaaagatttctgcgctaacaaatttcgttactatttctccatgtttagttaatattttcgtaaaatctgttaaagaatgtatggaaaatgattaaaaaaaaacaagagagtcgagttctctgactattagataccctttactcagccttctagcttttatctcaaatagcttttatagttcctgcgatctctacgttcaaacggacagatcctgatcaagaatatatatactttatttagtcggaaacccttgcttctacctgttacatattatttaacgaatctagtataccctttcaactttacatagtcttctttattgtttaattgacattctttaagcgtagttaaatcatatatggaaaagcccgcaaatccatagctttgcttacttctgcaaaatgtggagagccaaacgaagaaaatagtaatgaaaacataaacaaattaaaatgctgccagagctgccgccgcttgaggcattcgagcgtgccccgcgaaggttaagccaatgggctgggtctcgcgattattaaggagcgcattaattggaacttcgttggagcgtcggacagcgggaagttaaaagttttggaaggtcggtgcgtcaatgggaggcggcggagcttactgcgctttcagccaacagctgtgtgagttcaattatgcacattcttttcgttctgccagcagatttgcgcctgaagagcagctgtctagatgtgcatcgtgatttgagaattatggctaaaagttcagggtcaaagtgggttaaacacctgggttttctatgcacccgccaaggcagcttgtaatttgtaaaacttcgcgtgtgtctaattaataattagatgtaatgccaagctcttcaatggaaaatcaatggaatgcaacgaatttgaattcaaatttggcgccaagctaatgtggtttaggtcttgacttaacgcgttacatttggtattttaccaactatacactgcgaccacacacatcagctggtcgaaatattttcgcaagtgcagtttcactattttatttactttacttaaaaatagtttttaaaactgctgattaatcatggaaattccggatacctactacagcaaagatgaatacgtagagacggcaagtattcgcactgacttccgctttgggattccatttaagcactaagagatgacctcatcatgaccaaaaaactgattgtttacaggcttcgggtaacaaagttagtcgccacacggtgctctgtggttcccaaaacattattttgaacggcaaggtgatcgtacagagcggcgccatcattcgcggcgatctggccaatgtccggacgggaagatattgtgtgattggcaagaactccgtcatccgaccgccgtacaaacaattcagcaagggaatcgccttctttcccatgcacgtcggtgagcatgttttcgttggcgaaggagcagtcgtctcggcggccaccattggatcctatgtgtacatcggcaagaatgccatcatagtaagctattacttattgttatacccttgtaatccatttacttttaccatctttcagggccgtcgctgtgttttgaaagactgctgtgtaattgaggatggggctgtcctgccgccagaaactaccgtgtccagctacatgcgttacacggcgaggggaaccatcgagggtggccagggcaatccgtattttgtgcccgccgccatgcaggacgagatgatcaactacactaagtcattctacgagcatttcgtgagggctccagcgccagccagctgaaaatcgtggtgtctaccaattccatcgacagaaaacattatttatgaaataaacatattatattagttattctataagtatgcgcatagtttgactattaagtgattaatctatcagtcccgtttcgcagtcgtaggcttcctcgccggactcgaaaatgggaaaactcatgccagtacgacgggcaatcaccgaggccagttcctcggagttgttctccttgcgcggctggatgtatcggtccagcagaaggaccgtggccgtattccgacaattggacacagtggcggttatgtgaagcggcgtctgcttgccgtccgattccgcatttacatcggcgccaaactgcagcagcaaatgggcgcaatccgcattgttccacttgcaggcggagtgcaatggcgtccatcccagctccgtgcgggcgttgggattggcatggtactgcagcagcaacttggccatatccacaaagttattataggcagctcggtgcagcggcgtgtatccgtcgttatccttggcgttcacggtgtctgcgtccagttttaggatttcccgcacctcgctgatgcggttctcgttcaccgcccacagaatcatgcgttcaatgctgcctatgatgatgtttaattaaactatttctctaaaatgtattctacttactttgtgggttcttgtcctcttcgatcagttcgtcggcatcgtcgtcccagccgctcacgaacattccgcgcggcactttggcgtggcgcagcttctccacctgtgatttttcatcatcggaatcgtagtcccccattttgtggtaatatattaataataagccggaatttaaacagctcaactttttgttttctatttctcaaagtgaccgttgcttagccgcttaagtacacttaaaaaaatactaaacacttaaaaatatactaaacgaagagtggagttttaaaaagaacagtacatttggtttttcaaataaaaaaaaaaaaactatttatataaataatggtaggaattataaaaaaattattcttttatttgaaaagtctgccatttaaaaaaagg

SEQ ID NO: 22574 - DNA, 720 bp, DROSOPHILA
ctggtcgaaatattttcgcaagtgcagtttcactattttatttactttacttaaaaatagtttttaaaactgctgattaatcatggaaattccggatacctactacagcaaagatgaatacgtagagacggcttcgggtaacaaagttagtcgccacacggtgctctgtggttcccaaaacattattttgaacggcaaggtgatcgtacagagcggcgccatcattcgcggcgatctggccaatgtccggacgggaagatattgtgtgattggcaagaactccgtcatccgaccgccgtacaaacaattcagcaagggaatcgccttctttcccatgcacgtcggtgagcatgttttcgttggcgaaggagcagtcgtctcggcggccaccattggatcctatgtgtacatcggcaagaatgccatcataggccgtcgctgtgttttgaaagactgctgtgtaattgaggatggggctgtcctgccgccagaaactaccgtgtccagctacatgcgttacacggcgaggggaaccatcgagggtggccagggcaatccgtattttgtgcccgccgccatgcaggacgagatgatcaactacactaagtcattctacgagcatttcgtgagggctccagcgccagccagctgaaaatcgtggtgtctaccaattccatcgacagaaaacattatttatgaaataaacatattatattagtt

SEQ ID NO: 22575 - protein, 189 aa, DROSOPHILA
MEIPDTYYSKDEYVETASGNKVSRHTVLCGSQNIILNGKVIVQSGAIIRGDLANVRTGRYCVIGKNSVIRPPYKQFSKGIAFFPMHVGEHVFVGEGAVVSAATIGSYVYIGKNAIIGRRCVLKDCCVIEDGAVLPPETTVSSYMRYTARGTIEGGQGNPYFVPAAMQDEMINYTKSFYEHFVRAPAPAS

SEQ ID NO: 22576 - DNA, 12099 bp, DROSOPHILA
atccaaactatatagacaaccagatggaaatatctcaataaacataaacaaacaaagaaacaagtaacaaaaccgaggaaaaggaaaaatcagcgagagaaataatcacaaacaaaccgaaagaaagaaagctttaactaaaatatttttaactatacaatatacatacatatataaattaattatagaaatagcaacctaagtgtttagtgcgtaaacgaattaaattttaaacaaaataattgggaaaatcgagcaagtgtacagaccaaaaagtgtgggcagcttctgattttcggtgatatggtgtaaatgtgataaacaacgttctaaagaaaacaacaaacaaacaaccaaatcgttttaaaactcaattaccacaataacaaaacaaaataccttaaactagtgttttatttttcctcccttcgcaaagttttttgccacgaaaatccaatacaataactatttatctacaaaaaatactaagccttgcatcttataaacaaacttaactaattgtaaactattctaagtcgcacaaaaccaatgcaaatcgagtgaaaacaacagcgtcagagatttttggttcaaccttttttataaaaaaatattctctcaaccgcactgccgcaacttttcgacaaatatgattttttcctgaaagaattaaaaccaaaatattcgtacaaatataaactaaagaaagaactaagcaaaaattcttatgagccgcagacaacaaacaaagaattaaaagacaaaactaaccaataacgaaaatttgttaacaaatttttggagctacataaaaccctgtaaacaaaatgcaatagtttaactcacatattgaggtaatcatgatgggatttcaaaatttttaaaaatattttctttatgtattaatatttgtttctttcaaaaccaataagtcaattaattgtttatttattttttgcgcatcttttccgtttcagtacacttgacataaactgtgattatgagttccacaaaatctcaagtagccctagctacgaatattccaaccaatttatcctccgccgcttctgcctcaacagcggccgctgcggccgccgttgttgttgttgccagtgccaacgccgccgttgcctcaagcgccaactcatcgggagtgggttcaggatcgggaccgggaccgggatcgggagcaggagtatcaggaccagtagccgcaggcacagccactgccgtagcaacaggatcaacagtcacagcagcaacatccgtcgcggcaacaacctccacttccgttgccacaatctcaaccagctgcagcagcagcagcatcaacaacatcaacaacaactgcggcgaggagtgccagtcggcggccggatcctccaacttgggtcgacagaacagcttcggcaatagacgagtaagtattgccgaagaaactcgaggttttgatctatagcatcttaaggatatataaagggatataatctgtatagataataattaatttcgaaaaggattccttgtgcattaaagttcttaagatacataaactgtagctatcgtaagcataaccattgtttaagaatatgcattacataggaaaccatttagaatgccttatatgccatgttaaataggttactactatatggttcaaaaaggcgaatgcagggattatagaacagctctatataggtcagatctggtcaggtgtcgcgttgcagttgggttctcctcttcccactcaacatcctttcggccctgctctcgattttcgcagctctctcttgcagtgcccgtgatatctcttcgtgtctctcgcaggatgcacacacataagtgcagccatgaactgaactctcgagctaaggatacacgcccaaaaaacgtctagtaaactgggtcaggtcagtggctgtccaagagggggtggtgatggcttatgacgggggcgtggggattatggttctgcgaatagcatttgctggaaattccccaatcgaccccgaacggctaaagtgttgcaattggtaatcgtgtttctgattgctcctgcagcagttcgtcgctggcacacaatcgtagacatttccaaacgctttttgccagcagagttcaaggtttttgtgtgagttggtgggtggttggtcggtcgctcggtcggttagttggttggttggtttgacgttccgtcggccggttgccttggttaactgctcatgcaggatttatcgtcaatcattgtttatgtgctgggcgatagagtggttttcatggcccccctcatttcacccactccccaaattatggagcactcactggcaaatgctgctgctgcgaggctccaaggtcgatttattgatttttcccacaacgaaaattaaatgggtgtaccagattcctggaaatcgctttgaatgcccgtttcaagaactggaaaattagctgcgcgcctgaaggttagggaccaaagtttttcattcaaacaatctgtcagtttccacaaacctggcttgcttttaagtagtaagtgtggaaaaattgtaagaaatttccggaactcttgtggtgcggaagatggttaaaaaccatctaagttaaggttaagtccctagttccttcttattgaaacatgaagtgctaacatagcctgttggccacgtcaagtgacttcaacagctgattaatgaggtcagttagttttcgtccagcggaaaatcaatgggggaaaacaaatagcaagggaacgtaattaatgtgcctgatgactaaacttgaacgatcggccgacagactgaacgcctgactgcgcttatgctttggtttttatcctgcccttcaacgcgcgaaaaatgtcaaaaggcaatcctgggcggactccatgaggtatacatatcgtgtataatattagcctagcacggcaaccaagcggagtatacttcccggtaacctttacggaatttcccgtgtgtgggtcgtttgtttttttaccttatgccttttgtaagtatattctaagtatattttatgtaccgttcagtaccaaaatgaagttaaacggaattcaaaactagtttctgtttattcaaaatatttgacaatcgaaaatctaaaaatcagtttggatattcaacatttgttctcagaaaatccaggggcattacagtttccgggctttgaacgtttgactgcttactcatctctggtcaactttgacattcgttctttactaattcgaaactaatcacttcacctgtcgcctgcttttgctttcagggcaacatgaagggcaaacatctgacgcgcagccatgccatgcgtgagtccacttcgccacctcgcacgccaacgccgcgggctgcctccgagcagcagcaacagcagctccagggggaacaacacgagcataacaataataacaatatcaacagcagcagcaaagcacaatcagctggaaggggcaactcgccgttgatggagacgccagccgtgattgtcactagtcagcaaccgcaacagcagcagcaacagcagcagcaacagcagcagagtgtgccaccaaagccgcagcagaatgtgccactcagcaatgaagcggagttcccaaagctatcgcctccaaagaaatccggcggtcagcacaatcgcaccaacagcaacggcagcggcatggagtttaataacaataataacagtagtaacaagaaattcgtcgttgatatgaaggccaatggtttggacaacaagccacacaacaactcgtctacgggtgtgatcttcaactccgggatgaactacaaggcggcggagcggcatgatcgtcacgagcgccacgagatgtccagccagaacagcaatctgagcaacaaccacgacgaggagccgtatcactatgagcccagaggtggaggaggcggcaagaagcatcgtgccaacaccaatgccaaaggtaataaaccacggttgaagaatctcggtggaagctcatctggcagcattgatttaggaggcggcggtggaaacggaaattgcaacaacatgtccaacaatggccaatccaacaactcgagcaacaacacctcgggctttatatcgcgcggtaagtggcgaattttcgtcaatggcccatatccaggctcatcactcactgattctagtctttcatcaatcagagaactcgagcgagcagtacacggactatggcgggaccgatctactggttttcttccgggacaccctcaacaagaaccccaaggatcgcaatatcctcttgaagattgagaaggacctaatagactttgtccaggaaaataggtgagtcggtggaggataggtgatttaacctgctctaaacggcaaatagtaaaatttaaaaatatctaatcattgttgtcccttttttctcttgcagtcgtggctgtgagtaccgttttccgccagcttcctcgtacaatcgtatgctgatccatcgcactgccgcattcttcggcatggagcacaatgtggacacggagacgcagcagtgtgtgattgtggccgtggccaagaacactcgcataccggaggtacttagtcgcacatgaagcgcattcaatatacactaattacttaatcaatactttttcagatccgcttccagtcgctggtgcgcgacgatgcacgcaagtcaattctgaagcgggacacgcacagcttcgatgaggtgcgtcagtcaccgtacttgtgccctctttctctggatcgaaaggccaagagcttcgaggagcgggaagaggactacgatagagcgcgcagccgcatcttcagtcgaacagggggcaatcatgacggttactccggaggtggtggcgacgaggaatgctacggtggttgggagcagcagcaacaacagcagaagcagtctcagccacccagacccaagaggcccaatggaaagatgttgcagatgcaaaatgtatgattttccatagagtagcacaagacaacaagtaacttatatcctaacttatagtccacggaatctcgcgatggcatgcgatccggtggagccgtgcccaagtcgcacaactttggcaactacggaggtccgcccagctcaggaggtcctggcaacaattccttgcctcgtggcgactcaacaaactcgatcaaaagcggacgcggcggcttcgtcaagcaggactcaactggcagcactccatggcgcctgtctccttccagcagtgggtgagtagtcccgaagtctgtctctttaaaatcattaaaagttaccggcttcactgagacaagaatcaagcaatttcttattttgttttacgagtagcgaaacttctcttagtaattattacagtataattcgcttagctgcatcgatagttagctgcatcggcaagatatctgcattatttttccatttttttgtgtgaatagaaaatagaaaatagaaaaaaaaaaattaagttagctgcatttttaagttacctgcatcgaggcattgtgcaaagtactcgaggcagctaagcgaattatactgtataatagcttatttatgtgttccacttaattatttaaaattctctgaaaatttcatttgtaagcaaaagaagtgaagccggttagcacagataccatgcccatgtacccaaactcaaagtcgctctcgctccatttcttaaattatgaataattttaaattgacaaacttaaaatacccaaaaaaaaaaaaaaaacgaaacaaaaatcatttttgtatgcaatcccaacaacaataacaacaacaaatgaaccaaccaacatataaaccaactcgaactccccaccgtccagctacaagacgcgcacccagtcggtgcgctccgactccgtaactccatcgcccacgggttacggcagcgacaggcagacgccggagttaaaccatccatccatgatgagccacagccgggtggcaccacccatgtcatcgggtggtggtggtgttgtcggcggcggaggatcaggagcagtcaccgtgtcctccgtggaaatgggaacagaagccaccggggctgatccgtcgtccacttccaattgctcgtcgggaacgtcgggaattgtctgggccgttacagacatttcgaatgtgccaattggcagcctcctcattgatccgcaaaccctccaaccaattgtcaatgcagacgggtaatttacaaaaactaaaccaagaaaattaaaccacacaaacaactaaaaaatataatacagaaatcgctgcaaaattatcgcattcgtttactgcaattgcttttggtataacagtttatttaatttttcctcaatttacacatattctaactaaacaattaacaaagcgacaagtgcggctttaagacacagttacatagtatacatatatatactgttcttcaatatttgaagaacttttttaaaacgttttatctttcaattaaatctaattattgttaaagagcaaaatttagtagtgccatattctatttgattttttatgcaaacaataataataactattttgaatacaaagtatcttaacgtaacatttattaaatatacttaaaaaaatattttaatttgccaactcgccagagttttgataaataatatatccgtgtagtttaaacaaatatgtgttcaataatcaaaagttatttgcttgaagctcatatttaaattatccttatataactttagccttgttacttaatattatttatcataaatattaatacgttattatatgtgaaatatgcaatattcttagcttttcatttttcgtaaggacgacttatcgatgttgtttttgtaaattatctgcctaaactcgaactaaattacccgacaccacagcgcaacaccagctgctatcgaatacaattattcgcctcacctgtctatacatctcttgatctgtgccttttctaccatgctcattgacaccatatttacacaaaatcgagtgttattccactatataagccaaagtactccacctttcatgctctaaaataaaatcacaaagcttgcctcttcagcgttgattgaaagtttaagattttaaggtatcgaatgaatgagttgaatgtaaccgtgtgttgtcgtctatcgtctgccagtgttgtcgtcatattctaagtgtttgttcaatttgcatatcgcattgtatcaattcaatcaatcgagccatttgttgttgttgttttttcaattactcttatataatactccttgtctgtcgctgccgtcgcgtcgctaatacactgcaaatacaaatatagaaaaaccacaaaactgtggaaactctatccagcagccgcttgtatcgactgtactttccttttatgtaactgcgattaaaatagtaggagtctacatttcattcctaatcgtgctaaatattattttaatcgcagtcctctactctttattcttaaatttcctattcgaacgttgcatgttgccgagcgagaaaaaaatacccaaataacacactcaatcctatcagtaaaactatgttcaaatatacataaaaagcttataattacattcgatttttgcagttccatttaccactacgacccgtccaacctgccgcccaaccaggcgctccagcactcgggcaatcaataccagtcacagaaccagggcaactcctcatccggcggctataacaactatcgcaagtcgtcgccacatcaacagcaacagtcgcagcagcagcaacagtcacagcagcatcatcagcagcaattgcagcagccacagcagctgcatcagcagtcatcacagcaatatgccaccactgagctgtcctgcagctccaccgagagctatgcggaggaggaggcgcagtccccaggaatggagtgttctgagggatacgagagctacgagcagcagtcgttgcctgttcagcagcagctttccggcaacggggattcggccagcaccaagggagatgattgtgatagcctggccagtgctaccgcctgcctcagcatcaccacctccacatccacaaagaactacgaccgcatcgaggtgcagaagtacaagaaccaggccactagtccgaacatacccgcctgctgcgccgtgggcgaaaagcttgaactggaggctggcttgccgcaggagcaggaacaggaacctatggctggaccctcctcttccggttccgccacctcctcggtgggcattaccgagctcccatccagccagacaccgctcccaatggtgaatcaggtgaactgtgacctccaatcggtctcgcccagcaccacgccctacagccagtgcgaggtgaaaactcctagccagaaccatgcacccagtgccgccgtcgaggagcccaagaccaccacctggacgtacacgcagagctaccaggcgccagacggctctaccgtctttcacactaccactacgcccaatggggctgcgccctactgcgccaccacatatcagcagggggtgagtctatctagggataccataccattatattctcaatctgacgttttgattatccatttagcccgatggcagcatctatgcggttccgcagggcatggtttatgccgcctacccgcaaccaggcgtaggcactgccggtggtgcctctcagccgctcttccaacttaccaccagcagtcacccgcccgctcagacaatttttgcatccccggaggcaggcgcagagattcctggaggcacctacatgatacctgtctttgatccggctcagcagccgcgtgagggactcatcccggcgcaggccatataccagacggggccgggcggaccgggagccaccaccgtgatgccaatggcgacggcggctgcctatccaacggcccagttcgccacagcggctccaaatggcgcgccgatataccaggcgccgcttatctactccagtgaaccgggaggtggagcacagctgcaacagcttcccatggcaccgtatccgattcaatactcttacccgtactaccatcccatctcgtactatgtgccccagcaggcagtggccgccgcaccgatggtagcctcccagccgcaggtgggtcaggctccgatgcaacagcaggcgccgcacacgggagctggaacaaccacaggtccaccaacggtggtttcaggtaaatataatcaatctcatcataaatcgtacaattgatagaatttccccttttagtttcaggccaacaacaccaccagccgcatcagcagcaccatcagcagcagcagcactcgagcaatggatccgtggtcacatccagtgcctatggcactcgggttaagcgcacaccaggcggtggctcgatccactacaacccaagctacacaccaagttctgtggctcatgccggtggtgcccatcatccgtcagcgggctctgcccagataatcgctgcgcctgcggccagcacaaccacatatcatgcgctgcctacgctgacgctagcccacggtggtccagcgactggcacggatctcagtggagcgggtggtgcccatgtttatgctctccccgcccaacacgcgctgatcccaacgaatatcttcccttatgcagcggcggcggcggcagccgccggagggccagggggtcctccaacgactccccaggtggtgcagcaggcaccaccaccaccgccacagagtgctccccatcatgctcttatcacagcggctccgttttatcctgcaaatggcggtaacatggatcagggtgcctctcagtcggctcctagcactccagcggctcctggaagacaagcgccgttgttcagcacaccaccggcaccaaacaatggaagcagtggcagcagcagtgcgggaggcggtggaaacagcggtggctatcacagcaacagctccacgccgcactactaccagggccagaacagcaacgagggttacacctcgccttatgagaagagaaatcatggaggtggagcctcaggagcacactcggtgggagtgcgtaagccttaccacccaggtggctacaacccaagacattcggtaccactagggggcatcccctctggagcaaagactcccttgctgaactccaacaacgagcccacgccgcgtgcctctcccagcagcgtaagtctgggtggtgcttcttcatccggtggggccaattcctacccacatcgtgggccaccaccacacacgatgggtgtgaaacgagataacaagcccaaccaactgccgctgatcagtggaccaccgcctagttatgcagctaactcgagccctggagtttccagctacgagtccaagccaccggtgcgcctaaatgccggagctgctagtttccggagtcagaagtccatgaaccaggactaccgacgcagtgtctcccaacgtaactcgcccagcgccaatggaggtggaagtggcagccacgagagcagcaacaactcgcccaacagtattgtgggcagccagagcaacagtgctgccaacacgcccaacgcagcagccccaccaccaccgcagccacagcctacgctggttagccactctggaggatttgtggtgctggatcagaccaccggagccgccatgaatgcctcgccgccgtcgctctatggtggcggtggaggtccaaatgcaggaataagtggaggagcaggcgcttcgggagcggcaggctcgaatggtggccatcagccgggtggcggcggtggcgcccgctcgcacattcccactgcccagctgcatcacagtgccgccgctgccgccgccgcagctgctggcagccaacaggcaacggcggcggtgctgagcggcgtggccgctgctgccgccctcggcggctacaatccaaatggggcgtccggtgtctacttcaagtatggccagacgtactttgcccatgtgagtgttcgctgaaaaacataaatggtcacttttactaataaagttatattatattgtagccctcggtggccttgcccaacagtcgacgatctccgtcgaacgatatccggcctcaaatggcgcaagtggccggcatgtatcccacaatgatgatacaaggtgaggacatctcctaagaaaacccctctctgctcttataatgccagaaaattgattaataaattttgaaataaaaacaaagctaacgacttgcatgcatcacttccagcgcgtcatccgagtcgccatccgaacccgaactacaaaggttcgcgtccgcggtaaagccagccggtaaaccgatataggatacccaaacaaagcaaaaactacatacacataacggcatacctaagataaatataaatagcatcctaatctagtggaacataacgtagttgacaacataaaaccagagaaagtggaccggacaaacggatggaaatggaagagcagcgcaggaggagaatagaactcgtcgagtgctggccgcagagttgtcgggcaccattggtagcagctggagaggaagggggtgtgtcagggacttagtcaccaattcaccagaaaaccaaaccaaactatccacacaccatgaaaacaacttaagagccggggaacgaacagagcaaagccatcactgttatctgttatcttccgcagcaagcgattggaaaggggggaaccgacaaagcatagcatatagcctctatagttaaggagcattgtacggatataggtacaataactgaaccgctacagaaagaaagaattaaatgctgtatattttgtgccattacaaatagtctttaataaaacaacaaaatcgagtacccggagaagcaataaatgatcacacacacacacacacaaacacaacgacaccccccaaaaacggactttcgaactgaacacttgacggatacgtaacttccactccccttctcaaacgtaacataggatattcaggtagactttagtttcgagaagataagtttctagagatggaatggaaaacctcagtttgcacgctaaagcaagagaatctcctggaattctagaatactatttaaacctctcacttactatagagctgctaccaaaaaaaaaaaccaacagttgttttccaaatttcaa

SEQ ID NO: 22577 - DNA, 5418 bp, DROSOPHILA
atgagttccacaaaatctcaagtagccctagctacgaatattccaaccaatttatcctccgccgcttctgcctcaacagcggccgctgcggccgccgttgttgttgttgccagtgccaacgccgccgttgcctcaagcgccaactcatcgggagtgggttcaggatcgggaccgggaccgggatcgggagcaggagtatcaggaccagtagccgcaggcacagccactgccgtagcaacaggatcaacagtcacagcagcaacatccgtcgcggcaacaacctccacttccgttgccacaatctcaaccagctgcagcagcagcagcatcaacaacatcaacaacaactgcggcgaggagtgccagtcggcggccggatcctccaacttgggtcgacagaacagcttcggcaatagacgaggcaacatgaagggcaaacatctgacgcgcagccatgccatgcgtgagtccacttcgccacctcgcacgccaacgccgcgggctgcctccgagcagcagcaacagcagctccagggggaacaacacgagcataacaataataacaatatcaacagcagcagcaaagcacaatcagctggaaggggcaactcgccgttgatggagacgccagccgtgattgtcactagtcagcaaccgcaacagcagcagcaacagcagcagcaacagcagcagagtgtgccaccaaagccgcagcagaatgtgccactcagcaatgaagcggagttcccaaagctatcgcctccaaagaaatccggcggtcagcacaatcgcaccaacagcaacggcagcggcatggagtttaataacaataataacagtagtaacaagaaattcgtcgttgatatgaaggccaatggtttggacaacaagccacacaacaactcgtctacgggtgtgatcttcaactccgggatgaactacaaggcggcggagcggcatgatcgtcacgagcgccacgagatgtccagccagaacagcaatctgagcaacaaccacgacgaggagccgtatcactatgagcccagaggtggaggaggcggcaagaagcatcgtgccaacaccaatgccaaaggtaataaaccacggttgaagaatctcggtggaagctcatctggcagcattgatttaggaggcggcggtggaaacggaaattgcaacaacatgtccaacaatggccaatccaacaactcgagcaacaacacctcgggctttatatcgcgcgagaactcgagcgagcagtacacggactatggcgggaccgatctactggttttcttccgggacaccctcaacaagaaccccaaggatcgcaatatcctcttgaagattgagaaggacctaatagactttgtccaggaaaatagtcgtggctgtgagtaccgttttccgccagcttcctcgtacaatcgtatgctgatccatcgcactgccgcattcttcggcatggagcacaatgtggacacggagacgcagcagtgtgtgattgtggccgtggccaagaacactcgcataccggagatccgcttccagtcgctggtgcgcgacgatgcacgcaagtcaattctgaagcgggacacgcacagcttcgatgaggtgcgtcagtcaccgtacttgtgccctctttctctggatcgaaaggccaagagcttcgaggagcgggaagaggactacgatagagcgcgcagccgcatcttcagtcgaacagggggcaatcatgacggttactccggaggtggtggcgacgaggaatgctacggtggttgggagcagcagcaacaacagcagaagcagtctcagccacccagacccaagaggcccaatggaaagatgttgcagatgcaaaattccacggaatctcgcgatggcatgcgatccggtggagccgtgcccaagtcgcacaactttggcaactacggaggtccgcccagctcaggaggtcctggcaacaattccttgcctcgtggcgactcaacaaactcgatcaaaagcggacgcggcggcttcgtcaagcaggactcaactggcagcactccatggcgcctgtctccttccagcagtggttccatttaccactacgacccgtccaacctgccgcccaaccaggcgctccagcactcgggcaatcaataccagtcacagaaccagggcaactcctcatccggcggctataacaactatcgcaagtcgtcgccacatcaacagcaacagtcgcagcagcagcaacagtcacagcagcatcatcagcagcaattgcagcagccacagcagctgcatcagcagtcatcacagcaatatgccaccactgagctgtcctgcagctccaccgagagctatgcggaggaggaggcgcagtccccaggaatggagtgttctgagggatacgagagctacgagcagcagtcgttgcctgttcagcagcagctttccggcaacggggattcggccagcaccaagggagatgattgtgatagcctggccagtgctaccgcctgcctcagcatcaccacctccacatccacaaagaactacgaccgcatcgaggtgcagaagtacaagaaccaggccactagtccgaacatacccgcctgctgcgccgtgggcgaaaagcttgaactggaggctggcttgccgcaggagcaggaacaggaacctatggctggaccctcctcttccggttccgccacctcctcggtgggcattaccgagctcccatccagccagacaccgctcccaatggtgaatcaggtgaactgtgacctccaatcggtctcgcccagcaccacgccctacagccagtgcgaggtgaaaactcctagccagaaccatgcacccagtgccgccgtcgaggagcccaagaccaccacctggacgtacacgcagagctaccaggcgccagacggctctaccgtctttcacactaccactacgcccaatggggctgcgccctactgcgccaccacatatcagcaggggcccgatggcagcatctatgcggttccgcagggcatggtttatgccgcctacccgcaaccaggcgtaggcactgccggtggtgcctctcagccgctcttccaacttaccaccagcagtcacccgcccgctcagacaatttttgcatccccggaggcaggcgcagagattcctggaggcacctacatgatacctgtctttgatccggctcagcagccgcgtgagggactcatcccggcgcaggccatataccagacggggccgggcggaccgggagccaccaccgtgatgccaatggcgacggcggctgcctatccaacggcccagttcgccacagcggctccaaatggcgcgccgatataccaggcgccgcttatctactccagtgaaccgggaggtggagcacagctgcaacagcttcccatggcaccgtatccgattcaatactcttacccgtactaccatcccatctcgtactatgtgccccagcaggcagtggccgccgcaccgatggtagcctcccagccgcaggtgggtcaggctccgatgcaacagcaggcgccgcacacgggagctggaacaaccacaggtccaccaacggtggtttcagtttcaggccaacaacaccaccagccgcatcagcagcaccatcagcagcagcagcactcgagcaatggatccgtggtcacatccagtgcctatggcactcgggttaagcgcacaccaggcggtggctcgatccactacaacccaagctacacaccaagttctgtggctcatgccggtggtgcccatcatccgtcagcgggctctgcccagataatcgctgcgcctgcggccagcacaaccacatatcatgcgctgcctacgctgacgctagcccacggtggtccagcgactggcacggatctcagtggagcgggtggtgcccatgtttatgctctccccgcccaacacgcgctgatcccaacgaatatcttcccttatgcagcggcggcggcggcagccgccggagggccagggggtcctccaacgactccccaggtggtgcagcaggcaccaccaccaccgccacagagtgctccccatcatgctcttatcacagcggctccgttttatcctgcaaatggcggtaacatggatcagggtgcctctcagtcggctcctagcactccagcggctcctggaagacaagcgccgttgttcagcacaccaccggcaccaaacaatggaagcagtggcagcagcagtgcgggaggcggtggaaacagcggtggctatcacagcaacagctccacgccgcactactaccagggccagaacagcaacgagggttacacctcgccttatgagaagagaaatcatggaggtggagcctcaggagcacactcggtgggagtgcgtaagccttaccacccaggtggctacaacccaagacattcggtaccactagggggcatcccctctggagcaaagactcccttgctgaactccaacaacgagcccacgccgcgtgcctctcccagcagcgtaagtctgggtggtgcttcttcatccggtggggccaattcctacccacatcgtgggccaccaccacacacgatgggtgtgaaacgagataacaagcccaaccaactgccgctgatcagtggaccaccgcctagttatgcagctaactcgagccctggagtttccagctacgagtccaagccaccggtgcgcctaaatgccggagctgctagtttccggagtcagaagtccatgaaccaggactaccgacgcagtgtctcccaacgtaactcgcccagcgccaatggaggtggaagtggcagccacgagagcagcaacaactcgcccaacagtattgtgggcagccagagcaacagtgctgccaacacgcccaacgcagcagccccaccaccaccgcagccacagcctacgctggttagccactctggaggatttgtggtgctggatcagaccaccggagccgccatgaatgcctcgccgccgtcgctctatggtggcggtggaggtccaaatgcaggaataagtggaggagcaggcgcttcgggagcggcaggctcgaatggtggccatcagccgggtggcggcggtggcgcccgctcgcacattcccactgcccagctgcatcacagtgccgccgctgccgccgccgcagctgctggcagccaacaggcaacggcggcggtgctgagcggcgtggccgctgctgccgccctcggcggctacaatccaaatggggcgtccggtgtctacttcaagtatggccagacgtactttgcccatccctcggtggccttgcccaacagtcgacgatctccgtcgaacgatatccggcctcaaatggcgcaagtggccggcatgtatcccacaatgatgatacaaggtgaggacatctcctaa

SEQ ID NO: 22578 - protein, 1805 aa, DROSOPHILA
MSSTKSQVALATNIPTNLSSAASASTAAAAAAVVVVASANAAVASSANSSGVGSGSGPGPGSGAGVSGPVAAGTATAVATGSTVTAATSVAATTSTSVATISTSCSSSSINNINNNCGEECQSAAGSSNLGRQNSFGNRRGNMKGKHLTRSHAMRESTSPPRTPTPRAASEQQQQQLQGEQHEHNNNNNINSSSKAQSAGRGNSPLMETPAVIVTSQQPQQQQQQQQQQQQSVPPKPQQNVPLSNEAEFPKLSPPKKSGGQHNRTNSNGSGMEFNNNNNSSNKKFVVDMKANGLDNKPHNNSSTGVIFNSGMNYKAAERHDRHERHEMSSQNSNLSNNHDEEPYHYEPRGGGGGKKHRANTNAKGNKPRLKNLGGSSSGSIDLGGGGGNGNCNNMSNNGQSNNSSNNTSGFISRENSSEQYTDYGGTDLLVFFRDTLNKNPKDRNILLKIEKDLIDFVQENSRGCEYRFPPASSYNRMLIHRTAAFFGMEHNVDTETQQCVIVAVAKNTRIPEIRFQSLVRDDARKSILKRDTHSFDEVRQSPYLCPLSLDRKAKSFEEREEDYDRARSRIFSRTGGNHDGYSGGGGDEECYGGWEQQQQQQKQSQPPRPKRPNGKMLQMQNSTESRDGMRSGGAVPKSHNFGNYGGPPSSGGPGNNSLPRGDSTNSIKSGRGGFVKQDSTGSTPWRLSPSSSGSIYHYDPSNLPPNQALQHSGNQYQSQNQGNSSSGGYNNYRKSSPHQQQQSQQQQQSQQHHQQQLQQPQQLHQQSSQQYATTELSCSSTESYAEEEAQSPGMECSEGYESYEQQSLPVQQQLSGNGDSASTKGDDCDSLASATACLSITTSTSTKNYDRIEVQKYKNQATSPNIPACCAVGEKLELEAGLPQEQEQEPMAGPSSSGSATSSVGITELPSSQTPLPMVNQVNCDLQSVSPSTTPYSQCEVKTPSQNHAPSAAVEEPKTTTWTYTQSYQAPDGSTVFHTTTTPNGAAPYCATTYQQGPDGSIYAVPQGMVYAAYPQPGVGTAGGASQPLFQLTTSSHPPAQTIFASPEAGAEIPGGTYMIPVFDPAQQPREGLIPAQAIYQTGPGGPGATTVMPMATAAAYPTAQFATAAPNGAPIYQAPLIYSSEPGGGAQLQQLPMAPYPIQYSYPYYHPISYYVPQQAVAAAPMVASQPQVGQAPMQQQAPHTGAGTTTGPPTVVSVSGQQHHQPHQQHHQQQQHSSNGSVVTSSAYGTRVKRTPGGGSIHYNPSYTPSSVAHAGGAHHPSAGSAQIIAAPAASTTTYHALPTLTLAHGGPATGTDLSGAGGAHVYALPAQHALIPTNIFPYAAAAAAAAGGPGGPPTTPQVVQQAPPPPPQSAPHHALITAAPFYPANGGNMDQGASQSAPSTPAAPGRQAPLFSTPPAPNNGSSGSSSAGGGGNSGGYHSNSSTPHYYQGQNSNEGYTSPYEKRNHGGGASGAHSVGVRKPYHPGGYNPRHSVPLGGIPSGAKTPLLNSNNEPTPRASPSSVSLGGASSSGGANSYPHRGPPPHTMGVKRDNKPNQLPLISGPPPSYAANSSPGVSSYESKPPVRLNAGAASFRSQKSMNQDYRRSVSQRNSPSANGGGSGSHESSNNSPNSIVGSQSNSAANTPNAAAPPPPQPQPTLVSHSGGFVVLDQTTGAAMNASPPSLYGGGGGPNAGISGGAGASGAAGSNGGHQPGGGGGARSHIPTAQLHHSAAAAAAAAAGSQQATAAVLSGVAAAAALGGYNPNGASGVYFKYGQTYFAHPSVALPNSRRSPSNDIRPQMAQVAGMYPTMMIQGEDIS

SEQ ID NO: 22579 - DNA, 3508 bp, DROSOPHILA
tttcttgtgactttcgagaatgttcttttaattgtactttaatcaccaacaattaagtataaatttttcgctgattgcgctttactttctgcttgtacttgctgctgcaaatgtcaattggttttgaaggcgaccgttcgcgaacgctgtttatataccttcggtgtccgttgaaaatcactaaaaaataccgtagtgttcgtaacactttagtacagagaaaaaaaattgtgccgaaatgtttttgatacgtacgaataccttgtattaaaattttttatgatttctatgtatcactttttttttgtgtttttcgtttaaactcaccacagtacaaaacaataaaatatttttaagacaatttcaaattgagacctttctcgtactgacttgaccggctgaatgaggatttctacctagacgacctacttcttaccatgacattgaatgcaatgccacctttgatctaaacttacaaaagtccaaggcttgttaggattggtgttttggaatttaagacccttgttagtttgcttttgaaatagcactgtcttctctaccggctataattttgaaactcgcagcttgactggaaatttaaaaagtaattctgtgtaggtaaagggtgttttaaaagtgtgatgtgttgagcgttgcggcaacgactgctatttatgtatatattttcaaaacttattgtttttgaagtgttttaaatggagctatctggcaacgctgcgcataatcttacacaagcttttcttaatccatttttaagtaaaatttgtttatactctttcggcaaataattgttaaatcgctttaagtgggcttacatctggataagtaatgaaaacctggataatatattaatacatataatccactgtgctttccccgtgtgtggccatatacctaaaaaagtttattttcgcagagccccgcacggtcacactacggttcggcgattttcgattttggacagtactgattgcaagcgcaccgaaagcaaaatggagctggagattttgaacgcgaagaacagcaagccgtacggcaaggtgaaggtgccctccggcgccacgcccatcggcgatctgcgcgccctaattcacaagaccctgaagcagaccccacacgcgaatcgccagtcgcttcgtctggaactgaagggcaaaagcctaaaggatacggacacattggaatccctgtcgctgcgttccggcgacaagatctatgtgaaggatctgggtccccagattggctggaagaccgttttcctggccgagtacgccggcccactgattgtatacttgattttctacttccgaccggagttggtgtacggcaaagctgccagtctgccgatttccctaaccacccagtgagtttgtagaaagtagtctctgaagtctttcgattgtcgacctaatcgacctcgtcgcttatgcaaactaaaacgcaacggctctgcataattatccccgaactttggatggtggttcacccagtaacccgctttcttttctcttttgccccagcattgccgccggctgctatacggtccactatgtgaagcgtctgctggagacgattttcgtgcaccgcttctcgcacgccaccatgccgctgaggaatctcttcaagaactgcacatactactggggattcaccgcctatgtgtcctaccacgtgaaccatccgcagttcacctcgccctgcatgtgcaccgtttggggagctcttggggcattcgctgtatgtatccgcggccatggtttatggatctgggttatatgttttcgtaatctaccggtttcctttgcttttgttcgaaacatttgtttcttaataccaaaggtgtagctttttgttaaaattggtcaagcaatttgtaatgttatatgtgctatatatttgggatccattaatcatatttgcagacccacaaactaagccgcacacttttcactttcagctctgcgaactaggaaacttttcggtgcacattgccctgcgcaacctgcgtccgccgggaacaaaagtgcgcaagattccggtggccgatggaaatcccctcaccaagctgttcgagtaagtggtcactaaaaaaacccacagctcaagtttattaattcgcgctcttcgaactgcagcttggtttcttgccccaactacacctatgagatcggtgcctgggtttcattctctgtgctgacttcttgcctggctgcctatctgttcgcctttgccggagccttccagatgaccatttgggccttggccaagcatcgcaactacaagaaggagtttaaggactaccctcgccagcgccgctccatcttccccttcgtcctgtaggttggatgtgggtatccccatgacgcattcgctgtattacctattccacattatacatttacacatttggctagcgtttaacagggtagttgtctagtgaactttgtgctttcgttgatttaaagcaaatacaaattggagaagcgtacatttggcgtgttttcgtcgctttttggactttgatcgatcgtatgggaagttcgacgaagcgcgtgtaatcagtaatagtttatttggggctttcaaaggtgtgccaggtgcttaccttgctaaaaataagtggccaccttgggtcatttatttttaacacttttatttcagaatgaaacaccttttttatagctttagtaaaccaataatgcatttttattgaacaaacattttgaaacaacgcgccatctggagctgccacactgctgaactccgtaccgtttggcatctccagcgaagctaagttggctgcggctgatgattttgtgtttacattttgccggcaaatcgaaaattggatttagaggccctaaattaaccatgaatctgttcgaggagctggacaccttggacccctccttcaaactagagcctccccgcatcgagacgcccacggcgcacaagattaccgtgttgatattgctcaaacagtatgtgattgtaggtgcacccacttatttactccgtgaaaaccaacttctaacatttatcaatttttaaagaacaaaaaaaactgtttggatactgggatatccatgcgcacccagcgacggcgcatgttctatatgctggtattcaagctcattcaggagcaggacaagagttacaatgagctacatagtttgttgaccacggggaaatacaaactggatactctgatgctggaatccttcgaaaaagccatgtccgagttttgtgcgggcagcattgaggctttgtttgacttctcggagatccagaacatcgacgagatcctaaacgaaaactacggcattagccagttcagcatggtgggcgtttatgtgcgcagagtgggcgtggtgctagagcgcctcagtttccctgagatgatggatatgtacaagaacgtatgctcctattacgagagaggagttcgagctgctgcctctggttcaagaatggccgtagccggagg

SEQ ID NO: 22580 - DNA, 1069 bp, DROSOPHILA
caccgaaagcaaaatggagctggagattttgaacgcgaagaacagcaagccgtacggcaaggtgaaggtgccctccggcgccacgcccatcggcgatctgcgcgccctaattcacaagaccctgaagcagaccccacacgcgaatcgccagtcgcttcgtctggaactgaagggcaaaagcctaaaggatacggacacattggaatccctgtcgctgcgttccggcgacaagatctatgtgaaggatctgggtccccagattggctggaagaccgttttcctggccgagtacgccggcccactgattgtatacttgattttctacttccgaccggagttggtgtacggcaaagctgccagtctgccgatttccctaaccacccacattgccgccggctgctatacggtccactatgtgaagcgtctgctggagacgattttcgtgcaccgcttctcgcacgccaccatgccgctgaggaatctcttcaagaactgcacatactactggggattcaccgcctatgtgtcctaccacgtgaaccatccgcagttcacctcgccctgcatgtgcaccgtttggggagctcttggggcattcgctctctgcgaactaggaaacttttcggtgcacattgccctgcgcaacctgcgtccgccgggaacaaaagtgcgcaagattccggtggccgatggaaatcccctcaccaagctgttcgacttggtttcttgccccaactacacctatgagatcggtgcctgggtttcattctctgtgctgacttcttgcctggctgcctatctgttcgcctttgccggagccttccagatgaccatttgggccttggccaagcatcgcaactacaagaaggagtttaaggactaccctcgccagcgccgctccatcttccccttcgtcctgtaggttggatgtgggtatccccatgacgcattcgctgtattacctattccacattatacatttacacatttggctagcgtttaacagggtagttgtctagtgaactttgtgctttcgttgatttaaagcaaatacaaattggagaagcgt

SEQ ID NO: 22581 - protein, 302 aa, DROSOPHILA
MELEILNAKNSKPYGKVKVPSGATPIGDLRALIHKTLKQTPHANRQSLRLELKGKSLKDTDTLESLSLRSGDKIYVKDLGPQIGWKTVFLAEYAGPLIVYLIFYFRPELVYGKAASLPISLTTHIAAGCYTVHYVKRLLETIFVHRFSHATMPLRNLFKNCTYYWGFTAYVSYHVNHPQFTSPCMCTVWGALGAFALCELGNFSVHIALRNLRPPGTKVRKIPVADGNPLTKLFDLVSCPNYTYEIGAWVSFSVLTSCLAAYLFAFAGAFQMTIWALAKHRNYKKEFKDYPRQRRSIFPFVL

SEQ ID NO: 22582 - DNA, 4371 bp, DROSOPHILA
ccaaaggtgtagctttttgttaaaattggtcaagcaatttgtaatgttatatgtgctatatatttgggatccattaatcatatttgcagacccacaaactaagccgcacacttttcactttcagctctgcgaactaggaaacttttcggtgcacattgccctgcgcaacctgcgtccgccgggaacaaaagtgcgcaagattccggtggccgatggaaatcccctcaccaagctgttcgagtaagtggtcactaaaaaaacccacagctcaagtttattaattcgcgctcttcgaactgcagcttggtttcttgccccaactacacctatgagatcggtgcctgggtttcattctctgtgctgacttcttgcctggctgcctatctgttcgcctttgccggagccttccagatgaccatttgggccttggccaagcatcgcaactacaagaaggagtttaaggactaccctcgccagcgccgctccatcttccccttcgtcctgtaggttggatgtgggtatccccatgacgcattcgctgtattacctattccacattatacatttacacatttggctagcgtttaacagggtagttgtctagtgaactttgtgctttcgttgatttaaagcaaatacaaattggagaagcgtacatttggcgtgttttcgtcgctttttggactttgatcgatcgtatgggaagttcgacgaagcgcgtgtaatcagtaatagtttatttggggctttcaaaggtgtgccaggtgcttaccttgctaaaaataagtggccaccttgggtcatttatttttaacacttttatttcagaatgaaacaccttttttatagctttagtaaaccaataatgcatttttattgaacaaacattttgaaacaacgcgccatctggagctgccacactgctgaactccgtaccgtttggcatctccagcgaagctaagttggctgcggctgatgattttgtgtttacattttgccggcaaatcgaaaattggatttagaggccctaaattaaccatgaatctgttcgaggagctggacaccttggacccctccttcaaactagagcctccccgcatcgagacgcccacggcgcacaagattaccgtgttgatattgctcaaacagtatgtgattgtaggtgcacccacttatttactccgtgaaaaccaacttctaacatttatcaatttttaaagaacaaaaaaaactgtttggatactgggatatccatgcgcacccagcgacggcgcatgttctatatgctggtattcaagctcattcaggagcaggacaagagttacaatgagctacatagtttgttgaccacggggaaatacaaactggatactctgatgctggaatccttcgaaaaagccatgtccgagttttgtgcgggcagcattgaggctttgtttgacttctcggagatccagaacatcgacgagatcctaaacgaaaactacggcattagccagttcagcatggtgggcgtttatgtgcgcagagtgggcgtggtgctagagcgcctcagtttccctgagatgatggatatgtacaagaacgtatgctcctattacgagagaggagttcgagctgctgcctctggttcaagaatggccgtagccggaggtattctgcatagggaggagacccctcctccgaatcccataacagaaaagcctgaggatcctaaacctaagaagaaagtggaggccgtagctcgtattgcccaagaacgtaatcccctgagcaaatgggcaccaaaacaggccaagtttttcatcaacaaacagtcggaactgttggagaataacgagcgtaaggctttgcctcctttggaactccagaagaaggtgcaggagatcatacacgacctcccactaacaactacaccctatttcctgggctatatgaatcaattgagagttagggattactacaatgctctttctgccctccacagagcattggacaggagtcccgtgcgcctgatgagccaggagaagggctaccagtatttttgcgtcaatctggcggtactacatgccacctttggtcatcgggatgaagcgctagcagcgctcagggaaagcattatgctggcccaggagcacggcgacaaaaggagcctcaaccttgccaacacttggtactgcttgctcagggatgagcttcccttgtccgctgttcaaaagagtgtgcaggatgccaacgaagtggatggttccctgctgcagaactacaccttagccctacacttcgctgtaaaactaggaacggtggctggctaccaaccactaagactctttgatctcctgcagcacagcgacaatctcactaatcgcaacaacttcgccgaccacgcatcagaggcccttgccttgaggagtgctgtttggtctgcttatggaaggcatgagctagctgctttgtactcccaagtcctattgacaggcagagacaggttcggcagtggatctgcgggtttgggaagcgctttggccagtttcgccctgtggcttcagttgcaaggagagccacaactatccaaagtactcctacatcatgctaaacagcgctttccgcgtttgcccagcgccgagggttggatgataagccagtgtcatgtggtcattcaggcgggaatctaccagtgtcgctggcacgatgctctgaaggcttgcgatcagctatatttgatcgatccctctgactccttattccaacgtgcctccatatatgtggccaagcgcgagtttttcaatgccaggcgcctcctggacaagttggccgtgcaggataacataccattcctccttaggatgagggttcaagtgttgcttggttattgtggcatggcgaacggtcgattttcaagtgaaacaacaatgcttctgctccgtgtgtccgaggaaatgtccgaggcccagatggattatgagttagctctggtggatctgctcttggccctgcaactattgctactcggtatgccgcagaaggcctatcaggcaataaagcgctgcatgcacgacattcacatcaacggcggtctatatgaacgagcaaaaacggatttcgtgttcgttcgctgcctgttggccgtcaatcagaatgatgcggagaaacggaaagcgcagctgcttaaatcgcaagtaatcctccagcgtgcagctcaatcattcaagaaactctccgcacatgcgaaggttttggatgtgtacgtgttcttggcacagcgatttaacgaatttggcgatcggaatttaaggaataagtacgctggagagttccgacgctactttacggatcaccccattccaagggaatatctgggtagtccttagtttccgtctgttgttaaattctaaataaacttgttcttacaacctaaggaatctcaatcttacctaaagtttttcaattcacaagcacacagctgaattattttgactattaataaacgtagttttattaattggtttaaaccgcagtggttgcttgtttatacactgtacgccaactgcaatgctaacacctatctgaagttttgcaacggctcgtttcgattgatgaggacgtcctttttttgggggccggatgttcatagagtgtggatgcgtaaatgctgcgctgtgaagtggcatttaatgggtggctgctttattggggggaatcgctggacgtcctgcaccgctcgatttcgactgggattgattggtatcgacaaacttaagctaacgtgtggcaatttccggatttccgatgccggttatcgtagagctaatatgcgtatgtggtagggggtctctcatggttaacgaatcaagggtaagctgggcgacggccctccaggacccatcgcactgccgggtccaagaagcacctgcttctgctgcgacttgtgcagctcctccatctgggcgcgctccgtctcgaagatgaccggggcgaacaggataaccgcgctggtgaagaatatccagctggcgttgcacgagaacgagtagaagcccttgacgctcttcaccgtggcgctgctcacggcgccgactgcattcctcactggctccgggaacatctcggttagtccccagaagcgctcggatgccgtctcatcgggctcctgtgtattgtgaacagaaatgagtattaataatctttaaaaggtgcttcttctaagcaattaaattatagatgtaacgccatattctattcattatttacaatcaaagtaaccttataggattttgatgaatcaatattatatacaaactacttacaagattaaatcttataatgcaatttttaaataaaaacagtgcataattatgttaaagttacagg

SEQ ID NO: 22583 - DNA, 2201 bp, DROSOPHILA
gcaaatcgaaaattggatttagaggccctaaattaaccatgaatctgttcgaggagctggacaccttggacccctccttcaaactagagcctccccgcatcgagacgcccacggcgcacaagattaccgtgttgatattgctcaaacagtatgtgattaacaaaaaaaactgtttggatactgggatatccatgcgcacccagcgacggcgcatgttctatatgctggtattcaagctcattcaggagcaggacaagagttacaatgagctacatagtttgttgaccacggggaaatacaaactggatactctgatgctggaatccttcgaaaaagccatgtccgagttttgtgcgggcagcattgaggctttgtttgacttctcggagatccagaacatcgacgagatcctaaacgaaaactacggcattagccagttcagcatggtgggcgtttatgtgcgcagagtgggcgtggtgctagagcgcctcagtttccctgagatgatggatatgtacaagaacgtatgctcctattacgagagaggagttcgagctgctgcctctggttcaagaatggccgtagccggaggtattctgcatagggaggagacccctcctccgaatcccataacagaaaagcctgaggatcctaaacctaagaagaaagtggaggccgtagctcgtattgcccaagaacgtaatcccctgagcaaatgggcaccaaaacaggccaagtttttcatcaacaaacagtcggaactgttggagaataacgagcgtaaggctttgcctcctttggaactccagaagaaggtgcaggagatcatacacgacctcccactaacaactacaccctatttcctgggctatatgaatcaattgagagttagggattactacaatgctctttctgccctccacagagcattggacaggagtcccgtgcgcctgatgagccaggagaagggctaccagtatttttgcgtcaatctggcggtactacatgccacctttggtcatcgggatgaagcgctagcagcgctcagggaaagcattatgctggcccaggagcacggcgacaaaaggagcctcaaccttgccaacacttggtactgcttgctcagggatgagcttcccttgtccgctgttcaaaagagtgtgcaggatgccaacgaagtggatggttccctgctgcagaactacaccttagccctacacttcgctgcccttgccttgaggagtgctgtttggtctgcttatggaaggcatgagctagctgctttgtactcccaagtcctattgacaggcagagacaggttcggcagtggatctgcgggtttgggaagcgctttggccagtttcgccctgtggcttcagttgcaaggagagccacaactatccaaagtactcctacatcatgctaaacagcgctttccgcgtttgcccagcgccgagggttggatgataagccagtgtcatgtggtcattcaggcgggaatctaccagtgtcgctggcacgatgctctgaaggcttgcgatcagctatatttgatcgatccctctgactccttattccaacgtgcctccatatatgtggccaagcgcgagtttttcaatgccaggcgcctcctggacaagttggccgtgcaggataacataccattcctccttaggatgagggttcaagtgttgcttggttattgtggcatggcgaacggtcgattttcaagtgaaacaacaatgcttctgctccgtgtgtccgaggaaatgtccgaggcccagatggattatgagttagctctggtggatctgctcttggccctgcaactattgctactcggtatgccgcagaaggcctatcaggcaataaagcgctgcatgcacgacattcacatcaacggcggtctatatgaacgagcaaaaacggatttcgtgttcgttcgctgcctgttggccgtcaatcagaatgatgcggagaaacggaaagcgcagctgcttaaatcgcaagtaatcctccagcgtgcagctcaatcattcaagaaactctccgcacatgcgaaggttttggatgtgtacgtgttcttggcacagcgatttaacgaatttggcgatcggaatttaaggaataagtacgctggagagttccgacgctactttacggatcaccccattccaagggaatatctgggtagtccttag

SEQ ID NO: 22584 - protein, 720 aa, DROSOPHILA
MNLFEELDTLDPSFKLEPPRIETPTAHKITVLILLKQYVINKKNCLDTGISMRTQRRRMFYMLVFKLIQEQDKSYNELHSLLTTGKYKLDTLMLESFEKAMSEFCAGSIEALFDFSEIQNIDEILNENYGISQFSMVGVYVRRVGVVLERLSFPEMMDMYKNVCSYYERGVRAAASGSRMAVAGGILHREETPPPNPITEKPEDPKPKKKVEAVARIAQERNPLSKWAPKQAKFFINKQSELLENNERKALPPLELQKKVQEIIHDLPLTTTPYFLGYMNQLRVRDYYNALSALHRALDRSPVRLMSQEKGYQYFCVNLAVLHATFGHRDEALAALRESIMLAQEHGDKRSLNLANTWYCLLRDELPLSAVQKSVQDANEVDGSLLQNYTLALHFAALALRSAVWSAYGRHELAALYSQVLLTGRDRFGSGSAGLGSALASFALWLQLQGEPQLSKVLLHHAKQRFPRLPSAEGWMISQCHVVIQAGIYQCRWHDALKACDQLYLIDPSDSLFQRASIYVAKREFFNARRLLDKLAVQDNIPFLLRMRVQVLLGYCGMANGRFSSETTMLLLRVSEEMSEAQMDYELALVDLLLALQLLLLGMPQKAYQAIKRCMHDIHINGGLYERAKTDFVFVRCLLAVNQNDAEKRKAQLLKSQVILQRAAQSFKKLSAHAKVLDVYVFLAQRFNEFGDRNLRNKYAGEFRRYFTDHPIPREYLGSP

SEQ ID NO: 22585 - DNA, 2798 bp, DROSOPHILA
aagttaaaggccaggagttcaattgcaggacctaaggacatggcagatgagatggcaatggtcgccaatgagaataagccaccagtgagcgacccatccgggctaatttgagaattgcccggcttaattgcgtggcacttaaacaataatcaagttaacggttatgccggcgattatcgccatttttacaccgatgccaatactaaggattattggctgcccattaacaggagcagcaattccaatccgagtcccccagcccggttctcaattcgattccgtccaatccaatgacactcgtacacagccaaaaatacttggagatcagtagacgtttgattttgaattgttaagctgtctatataacattatccaatgctgccaattcgagtctagatgtcaaagttcattcagaaaaatgttacatctaccgaaaattgtcgacttgttgaaggagctgcaagagcaggagaaagaaattcaagagatcattctcgaggagagcttcgccagtccagaacagcgactagcccaactggaatcggtcacatcacggatgcatctataccattcaaggcgcgggaatattctaatgagtttgcagcaagagctaggcaaatatgagtacttcactctgctggtgaggcacattgcccagacgcacagctatttgaaatcgctcaacaaggcactggacttcctgtacaaagtcaacatctgctccatctgcgatttgaaatgtgagccgcatggcaggcattccatggtgtccctgcgttgtggccacctctttgggcgccactgcatcaacaacgtcctgcgggagagctctcggtgccccacttgctcgcgaagagcccgtcatcacgaagtccgcaggatctacggcttaaagttttatcctctttaagctgcgttgaattaattgaattacattttgttcttatgaaacaagaatcttacgcatccttagcgacaataaaattttcagaattgaaagtattttcaaattaaaattaaagtacattttatttttgccagtgctgtggcaactttattgggtttaatgtgagcacattttcgccaccgaacggggtcctctatttgccacccaggagtccacccaagatgccaccgccgccgctgctgctgccgcctccggtgatgccgggtatggaaatgagattgcccagcaatgggttgccatttaaagtgagcaggcagctgtcaaagcaattgcacgaaaaggagcagatatatgagcgagaatatcctgcagaactcaaccggaagttgccacttaccgcagatccagccggatgacgtactgacaggcccattcccgcaggcactgcaacatggagccgagagatcgggagtttggtttaaagctgtccgagggatttatttaatccgcacttacccgtaaagcttcgggagaaggacgcgggcaagtgccgccgattgctccgccgccaccttctccacttccgcttcctccgccggcgccaccacctccaccaccaccaccgccactaccacctcctccgccacctccttctttgggataaacaggaacaggaactggcacaggaactggcaccggaacaggcactggcaccttctttatcggagtgggctgctgctcccagggattctaaagtatgccaaactaaagaatcaccaaaactagatcttcaacgccccagcttacattgtgacccaaggccagggatattagtcctagcacagctagggatataactaatttcctcatctcagctccagtcacttgaaagtcatgcactgataatgacttactgcctcaaatcgctttatatatacttccagatcccacaggtgtttctatatgtgggtcatgcaacggtatcaatgggataatccactttcatttacgatgtgaaataacagtgtattacaacaataaatctgcggtgcacttcttaaaaaagaagcataagattcagctactaaaaaaaaataataaaagactatggacaatatagacaaaaacaatacaaatatatccaaaatgactaattttgattttttaaataataacatataataaaaatacttaattatttatacctgcttaataattacttaatacctaattaattatttaaaattattttgcgtttcaaagagttaaacagttgcattcaaaagattggcaacgccgaatcggttaagaaacccatcgcttattcacgatctggcagctctaatacccgtttcgcttaccgccaaattcaaaatcccgcatcatagtgaacaaatgagagtgtaaaaccacataaattttacatagctactaacttatgaaaacaataataaaacaattttttctccattgattttctatatatatttcaattaatttgataatcataaatattttatttattcgccatgcaaaccatgtacaattacataaataggtaggttcatttcaatttcaatttgtggtttttagtggtttcgtgtactgtctgtgtttctggtttggcaactagtcgtatatatgtaagtatatatataagttacgagaactaattgtacaataattcatctaataataccgctgtgtataagagttaatatgaacgatcgcttgctagttgattagtatacgtaagacaatatcattaccgttggcaatacaaatatcaatggtgtaattgatctgcacgagaacgggcgcagcttaaaagaggagaaactcacatccaaaatcgagactcctgctcgtaattcctagttccattgtacag

SEQ ID NO: 22586 - DNA, 589 bp, DROSOPHILA
tttcaagtgactggagctgagatgaggaaattagttatatccctagctgtgctaggactaatatccctggccttgggtcacaataatccctgggagcagcagcccactccgataaagaaggtgccagtgcctgttccggtgccagttcctgtgccagttcctgttcctgtttatcccaaagaaggaggtggcggaggaggtggtagtggcggtggtggtggtggaggtggtggcgccggcggaggaagcggaagtggagaaggtggcggcggagcaatcggcggcacttgcccgcgtccttctcccgaagctttacggtgcctgcgggaatgggcctgtcagtacgtcatccggctggatctgcgctgcctgctcactttaaatggcaacccattgctgggcaatctcatttccatacccggcatcaccggaggcggcagcagcagcggcggcggtggcatcttgggtggactcctgggtggcaaatagaggaccccgttcggtggcgaaaatgtgctcacattaaacccaataaagttgccacagcactggcaaaaataaaatgtactttaattttaatttgaaaata

SEQ ID NO: 22587 - protein, 155 aa, DROSOPHILA
MRKLVISLAVLGLISLALGHNNPWEQQPTPIKKVPVPVPVPVPVPVPVPVYPKEGGGGGGGSGGGGGGGGGAGGGSGSGEGGGGAIGGTCPRPSPEALRCLREWACQYVIRLDLRCLLTLNGNPLLGNLISIPGITGGGSSSGGGGILGGLLGGK

SEQ ID NO: 22588 - DNA, 2432 bp, DROSOPHILA
tggtcagacctacctggcaaaccatttactttacgaaagcagacttcggtcttcaggaagctggcagtaaggaaggtatagtggcaatccgctgttattccgcaccatggatctgctttcaccgtagctgaattggggggttcaagaacttttggcattcttcaacagttaggacaccattgacttctatcattgttacaactgtcacagggatgaaaccataccatgtttataggtatattcccattaaatcttaggtaactcactgagtataaggatatatccgaaaatcttcatggtgagattgagattgaatgtttcgcaagtgttgcagggttttacaaagattagctgctaattaccgaaacatgtcgtatttaaggcgattaaagcaacaggtgtggaatttcttaacaaatgtcaaggccacaaaaggcggtgtttctaaactttagattacatagatttttaaaatggtaaaaatgaagagttaaatctttattgaaagtgatcaaggatataaaatgccttataatataaaaaagttattttccttatctagttttcctgcatctgggtttaccccggggacaccttccggccttgattttcagaaatactggacatgtaaataaggttaggcgaactgaatacgataattgaattgaacctacgaggctttcccagttcagtcagtttgcactgctcttgtccaacgtgcaaaagactcaagccttggaagttacaggtagcggcaaacgcgcagaatggacttccagcttttataaatccttcacagacactctttccattcgcagtctcgaatatattcataactgcagtggttgaatagttcagaacgtatgtatttactcgcagtttcttgcgtagaaactcactcagaaataataagaagctcaaagctttcataatcgcacgcagattgagtagtttacatataatttaatgctttaaaatgcttctcagaagaattatagaatataggtatttataatgcctttaattgaaacatatatgcatggaaatattggaacaatattactattttaacgagcaacgcggtttaccatggagacattttccgggaattagttcgatgaatcctaaacgaatcgattaagttttctgaaacacaaaaggtgtcaacaattacccacctggttttccgttttctttgcgttcacacgacacccttttgaggtaacttggatttggaccatctaagttacaatcgggaagtattccgcagtgaggatcaagatttagataaattgcttggttgcatttgctcatagcatgcacacttgaaatgactaaaggggatgtaaaagtaaaacaatttcggttagcaacataagctccaaaaaaactcacacagaataaaaacgatgatagctttcatcttgcaaagcgactgatattcttaaagaaaatactcaacttaaatagatctatatatggcatgagttctggaacatattccattcgatctagaaaatcaattatgtgtacttggaaaatgggcaagaaatataggaatttaataaataataaacctttctcgaacgttacgcaaatgaaattatcatgtaactatgtaagtttacacttgcaggctggtttattaatatccaaaatactaaatttccaactttagtcctaaaatgattcattcttacatttttcagatggcttcgtggccggagtgcgctgcaattcgcagtacaacaagacgcgcggcaacttgaagctgaacggcgattcgcgggtgatctgccagggattcaccggcaaacagggcacgttccacagccaacaggctctggagtacggcaccaagttggtcggcggcatttcccccaagaagggaggcacccagcatctgggactgcccgtcttcgcttcggtggcggaggccaagaaggccaccgatccacatgccaccgtcatctatgtgccaccaccgggcgctgcggccgccatcatcgaggctctggaagcggagatccccctgatcgtttgcattacggagggtgtgccgcagcacgacatggtgaaggtgaagcacgccctcatcagccagagcaagtcgcgattggtgggtcccaactgcccgggaatcatcgcccccgaacaggttcgtacatctccagcgcttgagagataagcttggccagagggcaaagtccacgttcatctggtggttttcttatctcttggtatgacgctcgctttgaactacatatatctgtttactattccgttttcaatttgcttattgttaatgtataaacaggcctccattgacacacccttaaatttgggcattgaactttgcacctgaagttggtggaatttgcggacgatacgttttttattaccatttataacgcttatctttctatgcgtca

SEQ ID NO: 22589 - DNA, 317 bp, DROSOPHILA
ctttgcaagatgaaagctatcatcgtttttattctgttcatttcaagtgtgcatgctatgagcaaatgcaaccaagcaatttatctaaatcttgatcctcactgcggaatacttcccgattgtaacttagatggtccaaatccaagttacctcaaaagggtgtcgtgtgaacgcaaagaaaacggaaaaccaggattcatcgaactaattcccggaaaatgtctccatggtaaaccgcgttgctcgttaaaatagtaatattgttccaatatttccatgcatatatgtttcaattaaaggcattataaatacctata

SEQ ID NO: 22590 - protein, 65 aa, DROSOPHILA
MSKCNQAIYLNLDPHCGILPDCNLDGPNPSYLKRVSCERKENGKPGFIELIPGKCLHGKPRCSLK

SEQ ID NO: 22591 - DNA, 3695 bp, DROSOPHILA
cctcactcgatcagcgttggttcagtactgcgtgggagccatcatcagcagactgagtcgcaaggtcttcgaaccgaacgttccagatcgattgctaggggatatcctagtgctgcagcaacttaatctactcaacgatgttctgctcactcaacagatatttaacctgatcaagcaacggaaatcgttcaatctgcgcaccctatccacctacattattaatatcgatttgctcgaggaactctcgcacatttggaactcccagcaggaggataactttgagttgaccagctcgccaaattcgagtggcacacctactgcgaccactgtagctggtggttcccaaagccgaagaattggcacccgtggagcggacaaaggagcccgagatgaattcagggcgataacacgccagcagattgcccgctgcaatgagaacgtgatcactttgcttgcgaatttcattaaccaagaacacttgatgctggcgcagcacatctttggaatcagtcagcccgtggagacgattgtgattaagtgaaataactaggaggtaacatttataaaatatctattttccagctatcttacacattgtgtgtttggttaatacatacgactattatatttaagttcaccagtctagactggtgtatttcgcttatcgaataaacaaatatttattttatcagctgataacatagttagaggttgcatttgatatgtttcgatttagtcatacgcataatttaaaacttcatgtagttttaatttaatttgggtataataaatataattgatcgactaacaataacttaaaatgattcatcttatttcttggttaagcatttatgttaaaggaccagttgtgtactaaacatgcatatttattggtattaagagcctcttatttacataataaccctcgtgttcacaataactaaataatttggtttcttgtcgatatcacacctattccgcgattcctattcgttctgtcttaaacggctttttgggcatcgggactcgtcgttgaactctgaggcaataggttctgctcggaggacgcaactaacttctcctccagtgggaggtgaacgccgaaatcgtgcttcatgtaggacatgagcacattgtaaacagccgtgcacacattgacgaacgtcacccggtatttggtgtctaaatagcgaaagttcaggtactgcgccgccggccaggtcatccaatccagcatgtaaacatacgggaacttggagatcagctcctgattggtggcgtccagggtctggcgctccagatagcaaagcgaatagaagaatatgacgatgcaggcgggcgacatgaccagctggtcaatcaggatcttcttgaagatgttctttagcgtacgagccggcattaccctgtccatccagttgtacacgtagtggtgaagaggtccctgcagcgcgccagccacaaacatccggtacatgcgatccgtatcgaagcggtcctggtgccgcaatccacgcctgtactcgtactcctgggctatcacatcgcccacgaccatcagcagtccggagcccaccacgttcgtaacgagcagatacttgccgaacatgttgctccacgcgatcttagtccatcgcagcagtatgaaactaagcgctccaccctccgtttcccccttgccatgggtaaaacgaagtccgtacttttggtatcccacaccatggcttctcatccggcacagagccgcaaaatctctgcgggaattgtgggagccatggattcggagactgtagcactggcgcaggcaacgagtgccaaacatcgttcgcagccactgcaatttgcgactactgtagtcccgtgtgtttttgatttacgttacgaaagacccgattgttttgacgttaaacaagcagctgattggggatggcattttttcgactgaccaccaccacttactgtaccagcgagcttctaatcgatagctttcttatcgcttttaaaatttatccatgagttgttggaacgccattcttgtattttgcttattaagtttaattgccattaaatataactagggatcgtggttggaaaccccgtactttatatgagaaagcagaacgacgtacacgcaattggctacattgacgaacaccacgcgatagagggaattgaggaagcggaagttaagatattgcagacccggccaaaagcagcagtccaacatccatgtgtagaggaacttctcggacagctcgctattgcactccacgaaactctttccgcccagcaagctgctgacgtaaaaaaacaggaatatatagatgggtgacatgattaactgatccacgagtatcttatgcagcacaccccatccactagtgcccggtagaaccccatccaacagcagatagaagccgtgctgaatcggaccaatcaccgagcccgtaatcatcatgcatcctgagcgagagtagtcaaaggctttcttttcaccaaacctctcgtactgctgagcaattgcatcgccgatggcgaggagcagtcccgatccgatggtattcgtcagcaacaggtactttccgaacagcttcgtccagaattttgcattcggagggggggctgtcgagaaatgcgttactaactggcagctcatctttagcggattggccagtcgagtccagctaaacatcataattccatctgatcctattttgttgtcttgtaggtgtgcgatttgattcaaaaacattaattttctatcgatctgacattgcaggaactggtttgtggatcagttttgtgatttattgatggcaacaataggtttatattgaataaaccatgtatcaaaggaatttaattgaaaaacataaaacttgacataaaagctaaaagttctacgctgcatatcctaacaccttacaacactgaccgatatatgtaagccgataactttagctattttccaaagggactccctctggtcacactgccctgttcggttttgctttgcactgctttcgcgttatttttagccgctttttttgccgaaacgatttttttggtggctaaaagccatcgcaatttccaccaaatctgaccggttggtaaaccaccaacgcacgcaactatttaaggttaggaccgacctgaagaaacgcctgaaatcgtgtattaagcgcattttatttccaggtgactcaaaaccatccggttttccgggtggcgacaattttgcgtttttggaccaacgcggcgttattataatgaagctgatctacgtgtttctcctaatcttggccgtgcgcttggcctctgttttcgtggtccaaacatattacgttccggatgaatactggcagagtttagaagtggcccacaaactgacctttgggtaggttcaatttcacggatttcggttcgattcctagacattatctacataaaactatgctcattttgattaaaaactcaaagtacatagttcgcacactcaattttattatgtagtatagtctacgtgaaaattttcactgataaatggcctttagtatcaatatatgcagcaactttttcatataatttaatgaaaatcctactgaatccttaaacaaaatccttatctatatgtttctttgtacctaactcacgttttctgtatttttagctatggctacctgacttgggaatgg

SEQ ID NO: 22592 - DNA, 1320 bp, DROSOPHILA
atgatgtttagctggactcgactggccaatccgctaaagatgagctgccagttagtaacgcatttctcgacagccccccctccgaatgcaaaattctggacgaagctgttcggaaagtacctgttgctgacgaataccatcggatcgggactgctcctcgccatcggcgatgcaattgctcagcagtacgagaggtttggtgaaaagaaagcctttgactactctcgctcaggatgcatgatgattacgggctcggtgattggtccgattcagcacggcttctatctgctgttggatggggttctaccgggcactagtggatggggtgtgctgcataagatactcgtggatcagttaatcatgtcacccatctatatattcctgtttttttacgtcagcagcttgctgggcggaaagagtttcgtggagtgcaatagcgagctgtccgagaagttcctctacacatggatgttggactgctgcttttggccgggtctgcaatatcttaacttccgcttcctcaattccctctatcgcgtggtgttcgtcaatgtagccaattgcgtagattttgcggctctgtgccggatgagaagccatggtgtgggataccaaaagtacggacttcgttttacccatggcaagggggaaacggagggtggagcgcttagtttcatactgctgcgatggactaagatcgcgtggagcaacatgttcggcaagtatctgctcgttacgaacgtggtgggctccggactgctgatggtcgtgggcgatgtgatagcccaggagtacgagtacaggcgtggattgcggcaccaggaccgcttcgatacggatcgcatgtaccggatgtttgtggctggcgcgctgcagggacctcttcaccactacgtgtacaactggatggacagggtaatgccggctcgtacgctaaagaacatcttcaagaagatcctgattgaccagctggtcatgtcgcccgcctgcatcgtcatattcttctattcgctttgctatctggagcgccagaccctggacgccaccaatcaggagctgatctccaagttcccgtatgtttacatgctggattggatgacctggccggcggcgcagtacctgaactttcgctatttagacaccaaataccgggtgacgttcgtcaatgtgtgcacggctgtttacaatgtgctcatgtcctacatgaagcacgatttcggcgttcacctcccactggaggagaagttagttgcgtcctccgagcagaacctattgcctcagagttcaacgacgagtcccgatgcccaaaaagccgtttaa

SEQ ID NO: 22593 - protein, 439 aa, DROSOPHILA
MMFSWTRLANPLKMSCQLVTHFSTAPPPNAKFWTKLFGKYLLLTNTIGSGLLLAIGDAIAQQYERFGEKKAFDYSRSGCMMITGSVIGPIQHGFYLLLDGVLPGTSGWGVLHKILVDQLIMSPIYIFLFFYVSSLLGGKSFVECNSELSEKFLYTWMLDCCFWPGLQYLNFRFLNSLYRVVFVNVANCVDFAALCRMRSHGVGYQKYGLRFTHGKGETEGGALSFILLRWTKIAWSNMFGKYLLVTNVVGSGLLMVVGDVIAQEYEYRRGLRHQDRFDTDRMYRMFVAGALQGPLHHYVYNWMDRVMPARTLKNIFKKILIDQLVMSPACIVIFFYSLCYLERQTLDATNQELISKFPYVYMLDWMTWPAAQYLNFRYLDTKYRVTFVNVCTAVYNVLMSYMKHDFGVHLPLEEKLVASSEQNLLPQSSTTSPDAQKAV

SEQ ID NO: 22594 - DNA, 4473 bp, DROSOPHILA
taaagctgtagcacacataggggttataggggtgccgttttgcccgcgtgggttttgttgattttgcgtgcgcataaaaaatcgaagtgggcttgtgaggttggagattcgaagccgacgaagatggaatggcgaatgggggcttggggttttttgggggcactgggaattgtggatgcgacaatctcggcgcgtgtttttggctgctggagcagcttgtttcgcattctgcacttctgtggttgagggccgactcgtttaggggcgtgtacccctcttttcggtcataaagggcggagggggggggggtgaaatgccgacgaacaggtggcgcggacacgtggacgcaactcacctgtaatatcacgatcgtagaggtaactactggcactgctcttgaggctaatggaatccaggggcgtggcaggtggctcaaagatatcgaaggagttgcaggactcagccgagggcgtcggaggatccacaattgtccttgctgatggagcgggtcgtataaatgcatgcaataaggacacaatttaaaggataatttaaacacaaatatatggtattactcttactcttactcttactaaaacatatgtaaaaaaacaaaacataagaagcttcagtaatttaaaacaccttcccctgttacttaaaatctatctgaaaactgaagtgcttaattaattgaatcactttctcgaatttaccttttcaattgaaaaaatccatgccttccaccaaataaagcaaggaatattccctttatctttgaggatagtttattgtaaaaatccgtcttaatatttaaaacatttcagagaatataaagagacgtgttgtatttcagctcttaacaaggcatttacttgaataagcaaatatatttattgacatacaatgattcccgagaatctttatgcaccacttaataatttattaatataataatatttataaaatcgcttaaaccggcttcgattaaaacaagagcttagcttctgccgccctttagcctttttcgctccacttccttgctgtagaaatgaagatgtctattgaccctggccaccacatttagctggcttttgtccagatatctgaagatctcgaagtacaattcgtccgggaggcccaatagcgagggctgtagcttcatctccatctgcattagttgctgcgatcgcatgggctggaacaagtgctgtttcagctgatatgagagttcatccagcttccgaaagcgatggtagatgggcttgttcttcgcctgaatattcagtacatagcgtccgatagacaggctgacgctgtagccaggctccttcgacggaggtgctggggacagggtgatcataagctgatcccccaggctgacggccatcagccggcactgaagggcagccaccagagaagtctcctcgggagcatgcttgtccaatagtgttctcagtcgcattatatagacggtgtcattgaagcacacttcatatctagctggttgttcgctcaggattcgcacattctgggcgtgaaagctgctaaatgatggtacgggttgaatgaggtgtctcttctgggcaaatgtctcctcctccacaaatccgcattccagggccaccaggtaagtcaacaaatgaagccactcggcagccggcattttgcgacattcctgatactgattcagtagcttatccatatgctgcggcacccattccagagtagcatgctccaggatcaacggatttgtctcctgggtgctcttctcttgtatcaaacgtggtcgctgctttttccccactgcaacgagttttatttgtatttatatttaaacagaatctcgaggatatgattagtgaaattgtctgtgctgttggttggttaggagaagattgaaaattgcagaaacaaacctgctatgtgcggatttcggaagcaacaactcaaaccggtagttatatacaatacattttgacactacaaaatatagaacacagaagtaaactcaaaactcccgttaagactttaagactgatgtagaactttaaataaattaagtaaattaacacttgcattcaaaaacaaatcacgaaagaaattgtaaataaaattatgtctaacacgacataaatatttaattcactactcaatttgctttaaaataaattgtaaaattaatcaaacttagaattattttgtgtttacataatatatttgataagacactaggttaaacaagttggaactgaacaattaaaacggctattattacaataaatataacgtcacatttttgaagcaatttacaaaataatcaaacaggtttttcggaatttatgttacttttattcgaaggggttaacttgatgattcatcgaagagagtcgccgatcttggaatgaaagtctaaggaacttcattcaagttaagtgattcaaggtatgagtaaatagatatgcataattcgtggatgaaaaacacattgctctataaactaacaatagaaacaggtacaaataaatttgttaaaaaaatatctatagaatgagcagattgttattagcataatgcatgaattagtgtacgttgtcttgtttatcatgatttatgagtatctattgttaagtgatatgtattaaataatgatttctattatagattatgaataacttctagatatcagtgatactctcaactaaatattaatatatacaataatcgtattttttaagattattttacgatatagaatatgataagatactaatgaacgattgttatttgcaggccatttatcaattacatagagcgctcttaagtaagttagtaagtttctataaatattacacaacttaccctgatcaggagctttaatgtcctttgtgccgaccacttgttgctcattttgctgctgttgcggctgttgttgttgttgttcgcccgatgtcgtgggaatggctataaagccctcaatttcggatttagtgtctgacatttcagatatttacgtacgaattttctgggaaacgatttgatttaaactttcaatgcgactgtcattgtttgttttcggaatgacaatcagaaaatggggcatactgcgatttgtgcactcaatttttatatttagtgctatatagtgggactgattaacaaaaggagggaatcgcaattatattacttcgttgataagctgtggcacttaagatttaaacatatttacaacaaattgcgaatgtacaaatatccaacgattcttattcacgcaacaaaaacaaagcgcaacgacgcatcggcaggtattttctagaaaacttggtttgtcacagatattacataagcagtcgcaattgccaggttcgtatgtattttgcttaatatagttttcgattttgtagccgcaaaaatcacagaaaattgaaaaattcgcgaaaaaacaattggttatttagcgaataatcagctggctggcagctactatgcaacactactgccgctgctgttatcgattgcagatgaggagagagtcgcttgttaagctagctatattcaagctgaaaattaaatatcttcgaattcaccgaacatatattgatataaaaagcgttttaggttgaaatgactcaataacgccagccctaatgtaactaaaacaagcgcactatgctaaacaagcgttttgaaaataattgaaatctctagctagtttctagatccaatagttcccatccctaatagaaaaatatggccagtgctagtaaataaattcctaatagccggctaaatggtttgtttttgttgaaactaggagaaaattaataaaaacaaaagatatacccgaagaaacatgccgagccaagaggaaaatgagttgtacatggtcaaggaggcgcaaagactccggaaaagcgatccttgcgcggccatggcctggattatcacagctaaaactttatatcccaatgcattcaacctgcaatacgaggcttatctactggaacgcgatgctcagaattatgaggaggcagcaaagtgtttcagtgctatgtgagtatacaatagcacatctattccagttactttatcttttactgttccagagccaccaatttccagaatcaacatacggagctgtggcaggagatcaactccctaacaaatgccctcagaaatgagaatgaaactacgccggaacacgagttctatgtaaaaatgtacaagcacctaactccggaagtacagcacaacatattcatgcacaccatcaaccacagtgccgataatctggagcgcatctatatctacatactgatgttcaacaagtttcccaaatcagccataactcaggctcccaggctactggaaatgctggcggagggcatgaaaaccgaaccggatctctatcagcggattctggtggaggaggtattgcccatgatccagaataagcccccggaactttcgcca

SEQ ID NO: 22595 - DNA, 1363 bp, DROSOPHILA
ccagctgattattcgctaaataaccaattgttttttcgcgaatttttcaattttctgtgatttttgcggctacaaaatcgaaaactatattaagcaaaatacatacgaacctggcaattgcgactgcttatgtaatatctgtgacaaaccaagttttctagaaaatacctgccgatgcgtcgttgcgctttgtttttgttgcgtgaataagaatcgttggatatttgtacattcgcaatttgttgtaaatatgtttaaatcttaagtgccacagcttatcaacgaagtaatataattgcgattccctccttttgttaatcagtcccactatatagcactaaatataaaaattgagtgcacaaatcgcagtatgccccattttctgattgtcattccgaaaacaaacaatgacagtcgcattgaaagtttaaatcaaatcgtttcccagaaaattcgtacgtaaatatctgaaatgtcagacactaaatccgaaattgagggctttatagccattcccacgacatcgggcgaacaacaacaacaacagccgcaacagcagcaaaatgagcaacaagtggtcggcacaaaggacattaaagctcctgatcaggtggggaaaaagcagcgaccacgtttgatacaagagaagagcacccaggagacaaatccgttgatcctggagcatgctactctggaatgggtgccgcagcatatggataagctactgaatcagtatcaggaatgtcgcaaaatgccggctgccgagtggcttcatttgttgacttacctggtggccctggaatgcggatttgtggaggaggagacatttgcccagaagagacacctcattcaacccgtaccatcatttagcagctttcacgcccagaatgtgcgaatcctgagcgaacaaccagctagatatgaagtgtgcttcaatgacaccgtctatataatgcgactgagaacactattggacaagcatgctcccgaggagacttctctggtggctgcccttcagtgccggctgatggccgagcctggctacagcgtcagcctgtctatcggacgctatgtactgaatattcaggcgaagaacaagcccatctaccatcgctttcggaagctggatgaactctcatatcagctgaaacagcacttgttccagcccatgcgatcgcagcaactaatgcagatggagatgaagctacagccctcgctattgggcctcccggacgaattgtacttcgagatcttcagatatctggacaaaagccagctaaatgtggtggccagggtcaatagacatcttcatttctacagcaaggaagtggagcgaaaaaggctaaagggcggcagaagctaa

SEQ ID NO: 22596 - protein, 296 aa, DROSOPHILA
MSDTKSEIEGFIAIPTTSGEQQQQQPQQQQNEQQVVGTKDIKAPDQVGKKQRPRLIQEKSTQETNPLILEHATLEWVPQHMDKLLNQYQECRKMPAAEWLHLLTYLVALECGFVEEETFAQKRHLIQPVPSFSSFHAQNVRILSEQPARYEVCFNDTVYIMRLRTLLDKHAPEETSLVAALQCRLMAEPGYSVSLSIGRYVLNIQAKNKPIYHRFRKLDELSYQLKQHLFQPMRSQQLMQMEMKLQPSLLGLPDELYFEIFRYLDKSQLNVVARVNRHLHFYSKEVERKRLKGGRS

SEQ ID NO: 22597 - DNA, 4276 bp, DROSOPHILA
gtctgtgctaattatcagaagaatatcaagattgagatggaagaaggtagccgaatgctctggagattccacagcagcagtgctttatgcttatttaagtgccatggcaagtctctcaggcatcccttcatttttcagtcacagtctgcccttcctaaaaccgaactaaatttaaaaaaaaaaattttctatataaaatgttggtttaagtcgcttgaaacatttacctctgtagaaatatataactatacttttaattaatacgttttaatagctatagaagtgttatattgaagttttactgtaactgtctgacaatctcattcagttacttgcgataaacttttagtaaagtgccgcaagtgctgagaaaagatttgaaaagtgaaaaagcaaacatggatacatttgcatatgtgtgtatgtacatatgtatgtatgtacatcaatgggtgtgcgtgggtgacccttaactaggcgttaactgagctcaaatgggctttaagtgtctctaatttatggcttatgttgatgacgaaaactagtggaaaagacaagcgcaatgatcacttaaacgtaatggttaatgcccatattgcagtggctataaaacgtctaaagaatacccattttaaattatttaaatggacatatttttaaaaatttaaaaatttaggactcattttttttgaattcctattctttgaattgagaaactgcttgaaatatgataacataaattgtgttgcatacttggcggctgcatgctggaaaattcatgtagatatcatgtagaagacgtgtaaactaaaatcatttcagatttggtttgtttaatacaaccatttttgcaataataaattactttttaagttgtataatcaagtaatttatacaaaataaggatatcattttgcatgattttttcttgtaccccaataaatcctcatagctccattcattcataatatcaaataaatttttctatgtcgacactcaccgttattgttgctgatggcgaatcgctgctgcagctgctgtgccagcgcctggtggtgctgggccagtggtgttaggggtggtggtggttgccccacccccagttgctggggcgccgactgcgagtgcggaacgccgccgctgagggaagacgtgtccgaggaaccgtctccaccgccgccgccgccacccactaggccattggccatggaattctgtggattctggttctgaccgttgaactgctgcacggagatcgagttgggaagtccctggttcagctgctgctgggcggcggagatgagcggattgccggtggtggcatttatggaattattggcctggctcatggaattattgtggacggctgagttgagcagggatccattcgcggtggctccactattgctgttgttataatacgactcctcgcctgcaattcaaaaaaaaacacagataatcaatgtcctgtttgtaagtgagtctttagaaatagcagctagactatacggaaatacacaaatgtctagacgttcctttctttctttctgactttcgcaaactttgtaagtaagggaaggagagggaaggactaacaaaaattattataaattattttaaaaagatttttgaagaataagctatggttcaacatttataaacttggcttaataaccactaacataacactagcataaaaacttttaaaaatcgacaggttgattaaattttagaaatacattgccgaacaccgctttagataactacccattcataaaagctctatttaaggtttatatagcgacagctttctcttggcaaaagcctttctctgagtggcgccatctgtggtcgagtggcggcataaaactgcttgctttgcctgccgcaagcagctcaaaattgaggtaggttctgagttcttgcagcatagcccaccgcccctttccttttcctccacaatctcatttgaatgcatttcgcgttttattgtggacggctgttgcttgtcttgtttccccttggatgcctcaactggccatgggcatggacaattagccgccactgattaattgacatttagcggaaaagtcgcgacttggcgacgacttgcagcaactcgtaaagttgtaaaaagtaaaccgacaaggcgcctccttgaggtacacgcccccattgccgccccttatgtgcctccttcgcccattgcactgagcaaaatattagttaaaacacgaattttaggcatctttaaacgttcaagcgcgaattctttagcatctatagattaagcttctgctattttctctctctgcatagccccatttgttttcgtctttcaccacaacacggccaattgacgagctgccagtcacagctaaactacgcaactcaagcggaaggaagacgcttcttctttggcaagcaaacaatttagcagagtgctaacctgtctagttacgcagatcgggcagatggcggtgggggcttcgagggggggagggatatcacactataagccttggctatatcgtgcgtggcttatggccaatttccgttatgcttgcgctttgcttttgctgctcttctagctaagccgtaagcaaaacttgccagcaattggcagccaacaaaaagttttgttgcacatggcaaataaaacagaagaaactaaagagggaaacaaataaaacaaaagaaatggagggggtatccaaaagttgtgggaataatcagcaagttaatttgtgcgattggcacgcattaagagatataacaaatgtatatttcagctggagtcttatgtgattttacttttatatagaatggatttgatgtaaatactgctcaagaattcactcgaatggtattttcaatatattcttaattaaattaaagtaaagactatttatttaggatataatattttttgaaaacttacctggttctggaatattgcccaggggactctcaggcattagaatccccttttgcactagctcatcacgattggcacgcacagaaatcttacgctccagggctaaaaaaaaatcatattaattaatattagaaatactacattttgcatgcatttgatttacttacatttggaggccgcctcgaacttctcgctcttctttttccgtcgccatttccagggcttaaagaatctgcccagggcactgagtttgctcttcctttccaaaggtggcgtcctagtgcccgaacccaggctatttgtgcgtatggcagctccattctgtttcttagctgcaatcgaaaacgaaaacgaagaggggcaaattagtaattagcatacatggtaaaacatttcaatgaaaacgctctgccggaaacggaagcgggcgttcccccattttgggccaccgcttattaaatggacgcattccacgcccacttttaccgctactgcggcttttgtttttttgcttttcctgaaatatgtgtgcaaactgcaatttcatacgattgtgcaatcattagcgaaatgctttgcaagctaggaattcagtaatggatttattcacaacaaagaaatacaaaatgcactgccaacggtgcgtaaaatcctattaggcaggtcattaaaagggaggatttttaaacaaagtattgtataaaaaataactgctaattgcacttcaagttaagcgaaattgaatttactttccaattttaaatatgtactccaaatttgaacaaaccatcaatcttttccctttcatcgaacgcaaaagataaactttaaattgaacgtcaaaggcttataaatatattcactcaagcgaatgaagtttcccagtggaatatttgtattttcattccttcaactggacaaatatttaaattcctactctgctatttgaggctccatctcagtttgcattggaaaatctctttcccaaacaattgatgccgagaaaatgggagaaatacatacccgtaaatcagcaaaaggatgaagataaggcaaagaaaagtcaacaaaaacagcactagatatgtcgactcattccgaagttggaccgaccaatcccgcccacttttccctgctcttgatgctgctttttcagataagctctggcatacaacaacgtgaagcataaaaaagactacacccacatggtgaaaaacttcgaagtgctgcctgcattgaagcgttgaaattaggctacctgagccataggagaaagatgtggggggggggggtttgttgggcacttggaggtagaaaaataaaggggaaccaactgta

SEQ ID NO: 22598 - DNA, 702 bp, DROSOPHILA
ttgcagctaagaaacagaatggagctgccatacgcacaaatagcctgggttcgggcactaggacgccacctttggaaaggaagagcaaactcagtgccctgggcagattctttaagccctggaaatggcgacggaaaaagaagagcgagaagttcgaggcggcctccaaatccctggagcgtaagatttctgtgcgtgccaatcgtgatgagctagtgcaaaaggggattctaatgcctgagagtcccctgggcaatattccagaaccaggcgaggagtcgtattataacaacagcaatagtggagccaccgcgaatggatccctgctcaactcagccgtccacaataattccatgagccaggccaataattccataaatgccaccaccggcaatccgctcatctccgccgcccagcagcagctgaaccagggacttcccaactcgatctccgtgcagcagttcaacggtcagaaccagaatccacagaattccatggccaatggcctagtgggtggcggcggcggcggtggagacggttcctcggacacgtcttccctcagcggcggcgttccgcactcgcagtcggcgccccagcaactgggggtggggcaaccaccaccacccctaacaccactggcccagcaccaccaggcgctggcacagcagctgcagcagcgattcgccatcagcaacaataacg

SEQ ID NO: 22599 - protein, 156 aa, DROSOPHILA
MPESPLGNIPEPGEESYYNNSNSGATANGSLLNSAVHNNSMSQANNSINATTGNPLISAAQQQLNQGLPNSISVQQFNGQNQNPQNSMANGLVGGGGGGGDGSSDTSSLSGGVPHSQSAPQQLGVGQPPPPLTPLAQHHQALAQQLQQRFAISNNN

SEQ ID NO: 22600 - DNA, 8677 bp, DROSOPHILA
caaatgtgtgaaatttcgtctggctctttttcttcttcttctaagtctatgcccccaaaattaaatcgaaaacacaacgttcccaccttccacatttctactcctccgatcttagaaggaaaacccgtagaagctacgtataaataaataaataaacaagcgtttaattgaaccggaaattattgtgtgtgggttgtatgattgcttcttcttctctattcctcacgtatgtgtgtcgaaatgcattagaatgtgtgtgtgtggttcttattggaatttgttgttcacttttatttagttttatcccacagatgttgttgtttgttcgcattgcgttttagttctccaacttgtttgcccagttggtttatagtggctggaaagagaggggtgtactagaagtgaaagagagggatgcatgtgtgaaagagaagatttcttgcttttgggcaacaaaaacatatacacttttctgattagttctattcatagttatggcaaccaacaagtgccacagatttaagctgacatagaattatacagttaagtttttggaatatttaccgtttgactttaagaagatttcttaagctataagcttgtcttagaatttatacaatccgtttctatgctgcaattttgaccagatgactaagctacctactattcacttaaaataaacatctcaaaggctttacagagaattcggcaatcatcgtttacattagaaattgggactccccaactgaatcccattaatatgcaacccttcacattagcgtgatatttagaattccctgtgtgtgggtgtgtatctgttcttgcacgtatctgtgtgtctgctttgtgtatcttgcagcacattgtagtaaattatacttgacagtcgttgcatgttcgacttgcgatactcgacagtttccactaccattaatggctactcagccacgcccccacttgttgaattaaatataatttgatgttatttatttgactgaagatattcgattagctatcttcgctatataatctactatctcaacatcataattagtcacagaaaagctataaaatatcctgtagacatcgaaagacaatttagtaccgccaaaatgtctcgcattgtgacagctttcaataaaacggttgtggaatattttcgaaaaacaagcctcaacggcttcggcctgctgtattttattagaaaacgcagaattcaaagaatattctggtttttgtttattagctttggcatacttttcgctagttatgcagtgttctcaatggttctggaattcctcagctattcaacaattgcagatctctcggaattaaaagttttggaagatgaaatacattttcccgagctaaaaatatgtagtggttataagtttagctacaggaatatgttagcttctgctcatgatttagttagttctcaaaacaaatcgctggattactggctaaataaattatcattgctttctggatattttgatgctttgtctgtaaaagcagagaatgttgatgatttaaattctttacttgatataaagaatatttcttcttttttacttgccctaacaccagcgtgtgaatctttaatactcaagtgtaagttgaataatattcctgccaattgcttgaagttatttactttaaaagcatataatgatggaaattgttgtgtcttaaggaatagtaatctcactggagaactcaccctttttatggattcttcacaaattgatgaatatcctttaaatggaaatcttcctggctttagtttacatgttccaagttggcagggtagagttagtatcaaccctggcgaaatggcagctgtggaaatagaagttatggaacttcagggaaattctcaattaaacgagtatgccgtagaaaagcgagcttgttatttttctcaagagggtgaaagtagggaaaagtgccttcatgagtgtagaataaaagccacgctaattaattgccagtgtgtgccgtatccattcgagtttagaacgcaaaagtttgggtattgcactttggagaatataagatgtctgcagttggtagaaagtgagtttcgaatttcttataattcctcaaaggtaatcaattcttattaaaataatccaggaaactggtcaccagctcaatgtccgcaatgtttgccgctctgcaatcaactgttttacagattgaataaacaaatccttgggcatttgcatccttggagaagtgagttgaattttaaatttaaaacgccacaccgacagcggtacaaaacaaatatactctatcattggtatcaaatgctgtgtaagtttgtttaacgtttaacacaaatacacatgccgaaattacatgcatatttatttaaccaaaagcaaacgttggcggcgttctgggcatttgcattggctgctccttcatcagtggcttcgagctgatctactttctggtctttcgcctgtggactaactatcttcgacagcccgagacttaattaagtaaaatgttgcgcatacgccatgtgggcaaatttgttgtgatttatctcgttgacaacgtgccagcgacagggtcgcattaatcttgatgacttgaattgtaactgaggcgaaataaacgagtgaacaagaattgggggaacgaaagggtggcacttgggagctggattgtgggtggggcttagctggagtgtgccgatcatcaaggttaagtggtctgctgagccccttttcatcgtctcagcttgttcgccattcgtcgcctggggggccacttgatgactactgaacggcaacaaaaagattcagaaatatgtctcatcatgtgtatataaactgggaaaaaaatgttttaacattgaaatgctctcttaaaagagaagaaaatcttatggaacacatctatggcacgccatggtaaatagagtgcacatttaaatttgaaataaaatattatttccacttattttctctcagtgaaattgtgtgagtgtgaatacctttcttaagtgcacttcagcgtgcgttttactgtattgattttttcccaaccgacttgtcaacttttgaataataaaattcttgtttctttcattgcaggtgagttttcccaagaaaaacgtgtccaggttttcaatagcgtaagttttataacgtttaagatttgaatttttttaaaacatagttaacagcacatgttaataagctgctgagtaacaggtaaaagctttgaaagcttcatagagtaggaaaatcagctaagaaccgtagcattggaaaagcttgctggaaagcttttactttggggtcgtcggctgtgtttattaaagtgtattttttatggcactctgccggttatcacaaatcatgttcaatcaattgaaatttaagacatagagctcttaaattcgaagaatggataggagaattcaggccatgaattatcaaaaatctggcgctaaaaaatgcaatctaagcattgcagtaaaatctagaagccgcgcacacccatttaatagccttctgggggcaaaaaaaccgtgagcaaggcgaacgtctccattaattttgaaaccgccaacttatcagggcagcgtcatggtcctaagtgatttccccagttccgttgatttacgggggaagagtagcaacggatatctgctctatattacacacatagagccactaaacgcaaggacatgcgatgccgtgtccttcaccttcccatcgcctccgaaaaaagaaaggaaaaaatttatacataaatatctccgagcgaaggaagaaccttcggaattccttttaaagtattccgtatgcggcggcggcttgtcctgacattattattttttattttcattttttttttataccagctgatgagtcgttgatcaaaggcattccaggctggcttttccggctaacggtttcggggaaaattcaattcgtgccgcttaatgtgtcacattacagtcaccgagtagttcgaagtagcagtaactaatttgggatatttgagttaaaaagaggatattctcaactggatatattggtttctaaagaggttgtctttagcttatatgttggtatttaaggcattaaggtaatagaagcgtttttaaacactttccttatctaaagtaaagtaactgaccttcaatcgagctagcaaaaaagatacttgtataaagaattgagcttaaaattaaaaatttacggtgtgaaaaacttgtttaatttcttgagaagtggccattgttaccatttgcagcatgtgcaagcgaatttccaaaggtctgtgtgtttttgggcagacgaacaaaagttttcgttgcaaacttgaaatgaaattggttcaaattaaacatttcaaacagcttaaacttgtccctcaaattgcctgccattgttcgacgctcgacaaactccgatcggatatgggcccaaggacatttaggcatacctaaacacagtcatcttccttcccctttttttctcagcacaatctgaatcctgcatcgacgtggactctgccttatttgcataattctaatatggaacatttttggccatcagctccctcaactgtccacctacacacacacatgcacacacacacatgcacacgcatcctgtgctgggagatttgcataaataaaagcgtagttgtgcctccatgtccttgtcaacgtaaattacggccatttgatttcggcaattacaacgcatttttgtgcaacaattttctgtagaccaccttgttccccatactggctccacgccccccgcatgatttatatgtccttttttgttcctggtaggacaggacaatttcaatttaagctgctctctttcagcttcgacatgttgtgttggccaagttaattatgggcttatccttggacttgtctgcagtcgagtatatttattgtcactgtcgtctgtctgcaggatttcctctgtgattttttcgcttttgttcgccattgttcgcggatattttcctgcaaccaagtcgcagccatttggcactcgtcccaaaaacaaaaaaggtagacaaccttggccatgagcaggactttctatttatctatttagccaagccaagttgccgacttgtttttcggtctatttgcattttgcgggcggaaaatgagaacgaaaatgattatcatttgttttcgttaagttggctaaaaccaagctgtccagagccaacaagttgtggcagctcataaaaatgaattacgtccgccggccccaaggattctgtagtttatctaagctattcctcctgcctttccatggacttttccaagatttcctgggatcagttttgcgcaggggcgttattcatatgtgaaacagttttgttgtggttttaaaggaatgcgaattgaatttgcttttagtaaatttatgtatgactaagcccgcataatatgcgactgatttaaaagccacacgtatgtatttacatattttcctcatcaatttatactgctgcggaagttaaaacttggtcaaaccattaatattagtaacaaataccaaatttaattacaactaggtaaaattttataaatattttttaatcctgcctaatactatctcattatttaacaaatgaaatatgccacgtagcttgcaaatttcaaatgctccttgggctaacgactgtaatcgcttcgttcgattacgaaaaataattcaaaataatttgtatcgattttgctggagagctcttcccgatttgttccgtaacgactattttgcctgcataaatgcgtcctttgcgatttacatgattttctctaccgactttccaatccgcttttccgcattttcccctctgcagctcaccattgtgtaagtcccgcagtcttatgcaaatgctttcggggcagggggaggacgagtcctctcaatcgaggaggcggcggcatccctgtcgtcctgtccgttcaatcaaagttgacattgcctggcgggaacatcctggatccaggactcgggattcatccctgtcattgtcattcggtgtgtcgagtgtgggcgctttaaagcgattttatttatgcaacggcatatgctcgctgagctgggttcttaaacgagtttggcatgcaaattttgcacgtgccttcgtctccgtgtgcatttaattattaaaatttaatttggccaattctctggctacttcggccgcttctttctaacccaaaaatcaagctgtagaatctactctaaaattggggacaccgttccagttcctttgtctaccgagcaaacaacctgtttgcatcgtcgaaaggaaaaaggaaatctaaattatggcccggaatagttttttttttttttagttttttagaggagaatggcacatcattgttattcctgttgctcttctctttttgctgataaatttttgataacttgcgtcactcgcatttttaatgcaaaagggagcattttcattgtcgtaagagagtccgggaaaattttaagagagccaaaagcttttcgattttcccagcacgtgccgttttgtcggcaaaaagcgaattcaagttcaagtcacacaacattgaaagccaagttcacaggctccaaggctccctcgccctctctctttctattcgtgtcatgctctctctttccctgacgctgactatgtatttttgtgattatgtaagcaatttctgtgttgcgttctgctatttgtcctttattgttttgcctaaataactgcagcgtttcatttacaaatttgtacaaatatttcaaaaatcaaactttcttacgagaggtcattaaaaaatttaaaaaaaagttttttttttcatttcaattttacatatgccatctgttgaatagtttaaagagtttattatatcaaaacattgaaataaaacaaatatagccatgtgttttccaaactaaaattttttttagccaacagttgtttatcttcgttgtccttaattttgtttgcggcccaaaaatttcaattgcaattttctgctatttatttttcattttccttggcattttgctcgatgctggcagccgtcctttttgtgattcctcaccagatatctgttgtttgttgtgtttttccttttggccgctttccccctttatcgcccttgtcaatgagcccaccaaagcggaaggacgcccgccgccatagtttccccgtctctttctttgttccagcttgctgtctctttcggcccacatctacccgtccctttcctcgttcttggcattcattgcgtggctgtctcacatatctcagcctctaaagcatctattgcctggctgtagcagccataaactcgtgtaaacttgtgttttctatactaactagttgacattggtttgatttacccatatttttgggatctatggcgcagtcttttccttgttgcgcattcgagatgaagtcggattttcccctctggggaccttcgacgtggtcctggccttgattagctttcggcttcgccctggagattctgggaatttcaattcaaatcactttggcactggtttatatttagatccaatgtttaaccttgtgggcacgggcgcaggcacacttccttttcggcgtgtcactattgtggattgtgggtttgtgcccctcatagccagatgacaatgatggagcctggcattgatggtgaaagaaccaaaaggacgacagggacacgcagaaggacattgccaaggacgcgccaggaaacgagtaaggcggcactcattggcatctggttattactttgaagtgtttgctcatcaacgcaaaagttatctaagcgtcagttttccgcaactctcctgtttcctgttgaatccaactacgacccaaatgcatctgatagcttattaactatccattcaaaagagtaatggaaaaatatcgatcatgttcatattctatattaatatttattaagattattaagcacaatgataatatattgtggaatattaaattcaactttagtctttaattcttcattcaaggacatgctctacagttaagtctatttggttgcctgttaatgacttggacttgggctcttttaatttgctgcttgtctaccgcatgccattcggcattaatttgctacagcctcctttttttcccgtacttttcactatccggctcatttttgctctctcttacttaattacaataattcatcaacttgttttcattctatggaaatccagccacgcttcatgttgattaaattcatggtcccattgttgtgcgctttttgaagggatggcgtgatactgaggatactaaatgaggaaattctgtaataataataaccaaataatgttggtttggtttatggttttccttcggttgcatgtgcaacaggcaaatagcatcataagtatgtatatggccctgaccatggcaactgcagcattgacgcacacgaaaacaaccccctcgttctgcattttccattttccttgctggctagccgcaaaactcctgcctgatgatttcaatcagactgtgggcgtgcattaatgaaggggaaaatggaaaaggaagcaaggaaaatgcgagtaaaatggggtgtgggcaagacaacaggcttcgagccggggcaacaaacatggcataaacaaaa

SEQ ID NO: 22601 - DNA, 1498 bp, DROSOPHILA
atattcgattagctatcttcgctatataatctactatctcaacatcataattagtcacagaaaagctataaaatatcctgtagacatcgaaagacaatttagtaccgccaaaatgtctcgcattgtgacagctttcaataaaacggttgtggaatattttcgaaaaacaagcctcaacggcttcggcctgctgtattttattagaaaacgcagaattcaaagaatattctggtttttgtttattagctttggcatacttttcgctagttatgcagtgttctcaatggttctggaattcctcagctattcaacaattgcagatctctcggaattaaaagttttggaagatgaaatacattttcccgagctaaaaatatgtagtggttataagtttagctacaggaatatgttagcttctgctcatgatttagttagttctcaaaacaaatcgctggattactggctaaataaattatcattgctttctggatattttgatgctttgtctgtaaaagcagagaatgttgatgatttaaattctttacttgatataaagaatatttcttcttttttacttgccctaacaccagcgtgtgaatctttaatactcaagtgtaagttgaataatattcctgccaattgcttgaagttatttactttaaaagcatataatgatggaaattgttgtgtcttaaggaatagtaatctcactggagaactcaccctttttatggattcttcacaaattgatgaatatcctttaaatggaaatcttcctggctttagtttacatgttccaagttggcagggtagagttagtatcaaccctggcgaaatggcagctgtggaaatagaagttatggaacttcagggaaattctcaattaaacgagtatgccgtagaaaagcgagcttgttatttttctcaagagggtgaaagtagggaaaagtgccttcatgagtgtagaataaaagccacgctaattaattgccagtgtgtgccgtatccattcgagtttagaacgcaaaagtttgggtattgcactttggagaatataagatgtctgcagttggtagaaagtgagtttcgaatttcttataattcctcaaaggtgagttttcccaagaaaaacgtgtccaggttttcaatagcgatttcctctgtgattttttcgcttttgttcgccattgttcgcggatattttcctgcaaccaagtcgcagccatttggcactcgtcccaaaaacaaaaaagtcttttccttgttgcgcattcgagatgaagtcggattttcccctctggggaccttcgacgtggtcctggccttgattagctttcggcttcgccctggagattctgggaatttcaattcaaatcactttggcactggtttatatttagatccaatgtttaaccttgtgggcacgggcgcaggcacacttccttttcggcgtgtcactattgtggattgtgggtttgtgcccctcatagccagatga

SEQ ID NO: 22602 - protein, 461 aa, DROSOPHILA
MSRIVTAFNKTVVEYFRKTSLNGFGLLYFIRKRRIQRIFWFLFISFGILFASYAVFSMVLEFLSYSTIADLSELKVLEDEIHFPELKICSGYKFSYRNMLASAHDLVSSQNKSLDYWLNKLSLLSGYFDALSVKAENVDDLNSLLDIKNISSFLLALTPACESLILKCKLNNIPANCLKLFTLKAYNDGNCCVLRNSNLTGELTLFMDSSQIDEYPLNGNLPGFSLHVPSWQGRVSINPGEMAAVEIEVMELQGNSQLNEYAVEKRACYFSQEGESREKCLHECRIKATLINCQCVPYPFEFRTQKFGYCTLENIRCLQLVESEFRISYNSSKVSFPKKNVSRFSIAISSVIFSLLFAIVRGYFPATKSQPFGTRPKNKKVFSLLRIRDEVGFSPLGTFDVVLALISFRLRPGDSGNFNSNHFGTGLYLDPMFNLVGTGAGTLPFRRVTIVDCGFVPLIAR

SEQ ID NO: 22603 - DNA, 3764 bp, DROSOPHILA
gtgacttacgtcttaagtttgaaatttttctgctacttgtgttctcctcactaaaaaacttcgttctgggtccaacttgcttcagtttatttttcctgatattttgttgccatttattattagagttttatatacgtttgggtattttttactacccgtaccattctgtttcagcttgagcatgcttttttctgcattttgggtttccttcctatctctccacgataagttttagatttgcaaattttctttggcgatatgtatgtacatgtttgaagacaatcgaaaatgaaacttaggaaaactcagactggaaaaaaattaaaacaacaaaattatctttcgtaaacatgtctttcgaaaaattagaatttatttttccgtattatcgcatatgtggtagttctaagtttaatgtgttgtttttttgtttacgtttaagctttttacaataatatatgtattttaattgtaaaacataatttttcgtttagaattgtttgttttgtggtatttcttttattttgtattgtttagttggcttaattcaaaaattaaaaatttatggaaagcaacagtaagtgtaaattaatgcctaagctttaatgaatttttctcagccatttttctttaatgtaaatatttaatcgaatatcatttagtgtttctccttgttatttaatcgttaaattttatataatataatacataattgccttgactcaaaaagcgacttaacatttctacaaaagacgaattgatattttgatttgcgttgtgaaattggcatgaatatcgaaaggaatttatttacacacaattaacaaataaagaaggtgaaacaaagaacttaaaattagaaaaccgagcggcactctcgctatgatcaacagaaatcttaaattatcaattatgttcttgaatgtggcccttccatcttcattttcgctttctcatgtttccttcctctttttttgtgatattttttttttttttttttaatttttgcatttctatgcttgctttttttttgcgttgaaagtttccttcgtttttagtttgctggcttaattttttgcttttaaacatttgttgacaattttatgctgcatgaaatacaattgctgcttcggttgctgttgtaatttgctggaaagttgctgccattgcaatcgtcatggcctatggaatctgcaagagaaagttttgattagtttttgtttttagcccagtcctggaaatagaattaaatggcgtgtggcaggtcgctaagctctttaagcattaagtgcaactggccattggcagcgcacaaaatccaaaagccattacacactttcccccagaacaaagcacaaagtagaaaaagagaacctgcaaaaaatgcaatggaaatataaatggaaaaacgttgccgccaccgaatcctttgtgactgcatatcgccaaaacacatttgtaagggactcgactcggtgactggtggccgaaactgcacgtgacacttcactggccattggcattggcaattttttgcttggctcactttttggccattcgatttggccgcaaggacacgcccgctacataattcacggggcctgtacactgggtatgtctcaattgcgagattgctttggccccagaacttagccatccaaccagccacagacgacctcacccacccacccacgggaccaatttgcaaaaccagttacacacagagcttgtccttggccaccgatgcgcgaaataccctggcaaagtcaattactctacatcaggcagtctaattatttcgaaaagctacaaaactaatatggtcatttttttcaatttgaaaaataaatatatcttcaaaagtaactagttggttctagccatataaatgacacttatatcctgccctgacaattctaaactattttccctaaaagctatttattctcccaaaattctagccggattacagtccatacctcgtcaaatgccgactgccctcgtggacggccatttcggaggacttgaactcgttcagctccttgcgaatggcggccttgtcctttggcgtcagtcttgtccacggcttgtccgcccgccgatcgtagtcgtgggcctgcgtgacctcgatgtagtcgttgaatcggatgatcttcttctccttcagctcctcgacggtcggccgaaagctgagtttgcgcaacagatacgacttcttctcctccttctgcttcttctcctcggcgggtgattgagctgcacggcaaaaagcgaggaacattaggtaaaatcaaataaatataatcgaggaagttgaatgcctactaagtattctcatggttgcccaagtagtacgtcaaatcgtattgatgattaaattcttgaatttagttcggcattcagctcccgttatctactcacttttcaagatgttgcgctcgaccagctcctcggccgtgggtcgcatggacagccgccggatgaggcgtgctccgatcgcctccttggactccttgagctcgttgtcgttgacctggtgcaggatgttgcggttgatcaggtcctgcttgtccggtcggagctgcagcttcagggacagcgactccttgcgggccagtttggccagccgggtgttgtcgttgtcctcgtccctgtagacgatatggccatcgctgtcgtcactatcgctgctgctttcgcgtatcacaaatggccgggcgttctccttgttctccacggtgcacggcaattggatgttgaacatttgctgcctgctgtgggttaagcatcaaaggaggcgtcacattagggcacattagcattatgtcattgtcagtcgcattaaacactacaaacagacatcgcatcacattgctcacaacacagccacaaacagtaactactggcaactacaaaacagcccatgcatttcagtcctttctcctctgagtccgcttcctcctttgccgcaatcttggccaggcaatctgccagatttagccagcttctggcactcacatgtgcataaatatccctgcatgtgttaaatttattcatccacgttcacacagcactaggtctttctctatcatccactggctacagctacagtggcacgcgaaatagtagcgaataataaaaagatttttaatgcctgttttgcatatttaatcgcacttaattggcgcgcttttctgcatttaataataattgcatttattattttaccattttaaattataattgaagtaatttgaataaaaaacccattatcttttccgactaatttacatccacgagattaaattcctatcctattattgtaagcacacgtgtatcttgtctatatgtttccttctttctcctttaagttttgtcacccagccgagaaaaaaaagggaaaatgtttttccacctctttattttccattgctgctgcggcagtttcatttcttttatattcttctttttttttttgcaaacggcaaacggcacgtggagtgcacatctggcaacccacacccatgaaaataatatgcaaaacacatgcatatacgtacgacgctcatgtgtttgactttgtgtacttaaagctgtcggggttttagaaggtttgaaacccccgcctcgaatgccatatcctgttggctgcttccgccgcacttttggggcgttaatgcaaaacacgattggataaaaactgaacaaagcctggtctttcgtggtacactataagcggtccatgcggcgtatgagtgacgcag

SEQ ID NO: 22604 - DNA, 811 bp, DROSOPHILA
atgttcaacatccaattgccgtgcaccgtggagaacaaggagaacgcccggccatttgtgatacgcgaaagcagcagcgatagtgacgacagcgatggccatatcgtctacagggacgaggacaacgacaacacccggctggccaaactggcccgcaaggagtcgctgtccctgaagctgcagctccgaccggacaagcaggacctgatcaaccgcaacatcctgcaccaggtcaacgacaacgagctcaaggagtccaaggaggcgatcggagcacgcctcatccggcggctgtccatgcgacccacggccgaggagctggtcgagcgcaacatcttgaaaactcaatcacccgccgaggagaagaagcagaaggaggagaagaagtcgtatctgttgcgcaaactcagctttcggccgaccgtcgaggagctgaaggagaagaagatcatccgattcaacgactacatcgaggtcacgcaggcccacgactacgatcggcgggcggacaagccgtggacaagactgacgccaaaggacaaggccgccattcgcaaggagctgaacgagttcaagtcctccgaaatggccgtccacgagggcagtcggcatttgacgagattccataggccatgacgattgcaatggcagcaactttccagcaaattacaacagcaaccgaagcagcaattgtatttcatgcagcataaaattgtcaacaaatgtttaaaagcaaaaaattaagccagcaaactaaaaacgaaggaaactttcaacgcaaaaaaaaagcaagcatagaaatgcaaaaatt

SEQ ID NO: 22605 - protein, 211 aa, DROSOPHILA
MFNIQLPCTVENKENARPFVIRESSSDSDDSDGHIVYRDEDNDNTRLAKLARKESLSLKLQLRPDKQDLINRNILHQVNDNELKESKEAIGARLIRRLSMRPTAEELVERNILKTQSPAEEKKQKEEKKSYLLRKLSFRPTVEELKEKKIIRFNDYIEVTQAHDYDRRADKPWTRLTPKDKAAIRKELNEFKSSEMAVHEGSRHLTRFHRP

SEQ ID NO: 22606 - DNA, 3308 bp, DROSOPHILA
acaacatgcaaacttgtgtatcaaactactgcagctgccgttctgttgttgtcattctgcaatggccaaaacaatcaagtatcaattgtatttcaattacttcgtagatcgatttcaatagggcaatatgtcggtgtagggaatttaatttgccctaagcctagttaatctttaaaatcgtagaaaattaaataatttataaaaaaaagttgaccttactaattcaggatccactatttccgtattctaggtgagaagccatacacctgccagtggccggaatgcgagtggagattcgccaggtcggacgagctaacgaggcactaccggaagcacacgggggccaaacccttcaaatgcatcgtgtgcgagaggagctttgcgaggagtgatcacctggcgctccacatgaagcgccacttgcccaagaataaatgaggaaggcgcagggtcgggggcccagctgcaaatttgcaaattgaactataccacaatccaaaggactttagcgtagataaaatgtattcgtttagttaaaaggttaactactagatggtacgcactctactgtaggaacagctaaccaattggggctggggagtacactgtttattgcccactcgattaactcaaacgcgaagtagactaagtaaatgaaattaccacctgcttgacgaacatcttactataccaactaacccgcgctaataaggcaattataccctcggcaccacaatcacaaattaaactagaataaactaggattacgttactgtgtataaacatacttctttgcatatagaacattagatctacatagacgtttaatcagagttcgcatcctaggcgggttaagtagcagtagtcccatatattctatttgtatatcactattgtatgtatcttagtgtcgtaaaccgtttaaaaaccaccaaaaagtgctggcacaaaaacatccaataaatttatttgaagaatatattcaattagatttcattcttcacttggcatattttttggtccattcgcgtgcattcttgtcgtggagggcacggtttcccttgaaaacatctgctacggatacctccataggatcgtgtggattcgggtctgccagcaatgacattatggatataagtaccttggaaaccgacaaagctggcgaccacttcgagccgagaatatccaggcaaatgcgcccagataaagcgatgttgcagtggtaagtcttggttaaaaacgcaagataggggggataaaatggatagttcctgggaaagactatctccactctaaaacgcccaccttcgtaaactgtttccgagggacctgggatcgtggctacccagtggaacagattgtcgcccaccatctccgccttacacccttccgtttgatcggttgagaactctgagatctctcgacggagcctagtgatggtgaggggatcaccttgggtgggtattccggattcgatgcgaaaaagtcttagcaccagagagttgctttgcaacgactcagtgtcaaaagtttcgtccattggcacattttcagtcacagttggtagacctctggttaggtgcatctgtgaaccttggcgtattacagtggcccgaacaggcggattcgaaggtgtagctactgaaattgaaaccgtcctgcggccacgacgtgacgggacagcggctggtgtactagttgctcgacgaccaggagttcccagtcgggcagtcaaaaaaacagaaacagcaaagaatgattgagagcggacttcttcggcagatccttcagtatcctcagaatctgtaccagcagctatcgcagccatagcctcgattctcgcacgttgtctttcgtccattgtcttcaaaataaagcaaggtatcaaatgaaatatgtatatgcattacaaatatgcatgccctacaacaaagacacaagaatattcaagtgtctttgcctgcaactcaccggtgtcgaaaaacgaatttcaggacgaacaatagttcgcctgcccctgggggctgcacggccaccacgtggtctatcggactggtcccttgagttcgtaccacggcgaactcttcccacaggtcccgtgttggactcgtttgttgggctaccattagcatccccacgtgccgcaatcctttcacttcgtcgtgctggcattatctgtagttgagcacagcgaataaagcaatattattacagaaatatacttcaccaccaaccaatttagaaagaatccgctttcacgaaacagaatatcacaggaaaaaaaatatatgctttttcgactttcgccagaatggtaatgtcatgagtcactcgatactctcagcagtgctgctttatatcgatatatagtgcttacgagcactaagtattttatcaggctcaaaatgaaaaggagcaacacttttatatatgtaataatataacttcatatatggtaaacatttaacatctggtacagtcccatgactgtactttcattaaaagcttaatctatttgcaattcacggccagatttgcttgtcactaatttatggccatcgcctggactttaaacaattattaacatttccccaatacgtgcctggcaaaacaaacacaaatcactgaaaatttttccccattcgagatctattcgaaacgctccacacgtcacaaagagcttcataagtttttctatcgactaaaaagacaataatttcatttagatgagaatgtaagcccgataagtgtgaccccatgccaaacgaaatgtcttggaactcaattgggttttgttgtactgggctagcgatcattatcaaaatattttgtacgcgaaacaaacatgtcaagcaaatgtcttggcccccttccccaaacctcgaaagcgacccgaaaaaattgttaaaaataacaataataatttcaattgtctgcctgcatttcgattcgaacgcgtcatgttgttttgattgggacgatgataaaagtaatttcgctcttgcccctccgatagtgtattcgtttatagagtagggttcagaaaccgagctaaatatattttatacaagtaagaaaacccgtttgaaaactcagaaattaataaaactcttagagcaattagttaggggattatatgattatatgattcttaacgagaaacattagatgaaaataaatgaattattcaagttattatccaaaagttatacattgccttgatgtcacaattcacaatgtcacaagtattatgctaaatatgtgttttattatgttatttttccgttgtgtaatgttacttatgttgt

SEQ ID NO: 22607 - DNA, 1142 bp, DROSOPHILA
ggcgaaagtcgaaaaagcatatattttttttcctgtgatattctgtttcgtgaaagcggattctttctaaattgataatgccagcacgacgaagtgaaaggattgcggcacgtggggatgctaatggtagcccaacaaacgagtccaacacgggacctgtgggaagagttcgccgtggtacgaactcaagggaccagtccgatagaccacgtggtggccgtgcagcccccaggggcaggcgaactattgttcgtcctgaaattcgtttttcgacaccgacaatggacgaaagacaacgtgcgagaatcgaggctatggctgcgatagctgctggtacagattctgaggatactgaaggatctgccgaagaagtccgctctcaatcattctttgctgtttctgtttttttgactgcccgactgggaactcctggtcgtcgagcaactagtacaccagccgctgtcccgtcacgtcgtggccgcaggacggtttcaatttcagtagctacaccttcgaatccgcctgttcgggccactgtaatacgccaaggttcacagatgcacctaaccagaggtctaccaactgtgactgaaaatgtgccaatggacgaaacttttgacactgagtcgttgcaaagcaactctctggtgctaagactttttcgcatcgaatccggaatacccacccaaggtgatcccctcaccatcactaggctccgtcgagagatctcagagttctcaaccgatcaaacggaagggtgtaaggcggagatggtgggcgacaatctgttccactgggtagccacgatcccaggtccctcggaaacagtttacgaaggtgggcgttttagagtggagatagtctttcccaggaactatccattttatcccccctatcttgcgtttttaaccaagacttaccactgcaacatcgctttatctgggcgcatttgcctggatattctcggctcgaagtggtcgccagctttgtcggtttccaaggtacttatatccataatgtcattgctggcagacccgaatccacacgatcctatggaggtatccgtagcagatgttttcaagggaaaccgtgccctccacgacaagaatgcacgcgaatggaccaaaaaatatgccaagtga

SEQ ID NO: 22608 - protein, 354 aa, DROSOPHILA
MPARRSERIAARGDANGSPTNESNTGPVGRVRRGTNSRDQSDRPRGGRAAPRGRRTIVRPEIRFSTPTMDERQRARIEAMAAIAAGTDSEDTEGSAEEVRSQSFFAVSVFLTARLGTPGRRATSTPAAVPSRRGRRTVSISVATPSNPPVRATVIRQGSQMHLTRGLPTVTENVPMDETFDTESLQSNSLVLRLFRIESGIPTQGDPLTITRLRREISEFSTDQTEGCKAEMVGDNLFHWVATIPGPSETVYEGGRFRVEIVFPRNYPFYPPYLAFLTKTYHCNIALSGRICLDILGSKWSPALSVSKVLISIMSLLADPNPHDPMEVSVADVFKGNRALHDKNAREWTKKYAK

SEQ ID NO: 22609 - DNA, 3445 bp, DROSOPHILA
cccacttttttccgcccctcagcttttctgctggccccgattgcaggggatgtgagctggggtccgggttttgtggcatgcgcagtggtcggcgtgctgcgtatactgaaattacaatacaataattttcagctaaccaaggctcgacggcagtcaccttctacacctccatggcaatccgcaaaaactagaccagaccaaggcgaaacgaatgagccagcgacgacacgcacttggtcacaggagcaaatggtagtggttgctctttcgtgacttggtctagtcactacccaagagaagtatttatagattgcagcgcactttcacttcgatccttcagggcactgggagttataacgaactaggggttttccagtatatgcactttaaacttatttatcaaacattttagcactttttaggagccagtcactcgctggagtgattttcttctcggcttggagcacacatccacaaattcctcgggtgggaactcaccaggcgcttcgaaaattccttcacttgtgcgacggtggcaaggtctggtacattgtgcctctttgaataacagatgttgtgccgcttccaaagtgttccgtcctcccagaaagctccagctccactcatgcgccccacacagaataccccaggcaaagcttttactggtctcgaaggtgtggtgctcagtcggaatttcattttatcctggagtcatgtaagttactacaaaaatttcggtgctatcggtactttagtaaatatgaatttaaagttaatttggagaagatattatatgataatcaaccagcttatataagttatataaatatataatatatataagacacaaatttaaaaaaccgtttcacaagtcataccatagatggaccttatcttcccgccaattttggccagcttttcgagcttatcaaagcttttttcagaactttgtgagagggcacaccatcgagattcggattcagttcggtcagtcagcgaacaactgtggaacggtcaagatgtccagcaaaattccctacgtaaagcacaacaacggcacccaaatccagtccatcggactgggcacctatacggtaagataacgccgtgaagatcacgtcttcgatggttatcagttggaaacggaccatatctcattataaaacgattcgcactttcagtcgttgggaggcgattgcgagcgggccacgctgcatgcgattgatgtgggctaccggcacatagacaccgcctatttctacgagaacgagaatgaggtgggtgcagctgtccagcgaaagattgccgagggcgttatcaagcgggaggacatccacatcaccaccaaggtgagttctgtgattagtcaattatgaaatgcccaacatcctgaaatggaaatctatactccccagttatggtgccacttccatgagccgaagagggtggaatatgcgtgccgcaagactctgcagaactttggtctgcagtacgtggatctctacctgatgcactggccctactcctacgtctaccgcggcgacaacgagatgatgcccaccgatgccaagggggaggtggaactcaagtgagtttttaatttagtcaattacttttctaatgcgggtgtgcttcgtttgtatttgcttgactcttaatgaccaaatttgtgctattacagcgatatcgattacctagacacctggcgcgaaatggagaagctcgtggaactgggcctgaccaagagcatcggcgtatccaatttcaactcggaacagttgactcgcttgctggccaactgcaagatcaagccaatccacaatcaggtgcgtcaattgtggttatgccttgggtttcatattcctaatagaccattttccagatcgaatgtcatcccgcgttgaaccagaagaaattgattgctctgtgcaagaagaatgacattgtagtgaccgcctactgtcccctgggcagacccaatccagcagaaaagacgcccaactacatctatgatgccaaggtgcaggcaattggagacaagtacaagaagtccaccgcccaagtggtgctccgatatctggtagggattacgaactaggtttaatgagaacaaaaactctttattaacataatgtttatcgaaatagattgagattggaaccatcccattgccaaagtcctcaaatcccaagcgcatcgaggagaacttccagatcttcgacttccagctggatgctgaggatcatgccattctggattcctacaacaccggagaacgtctgattcccatgacccacgccatcaaaagcaagaactatccatttaacatcgagttttgagctggaaagcaggagcaatgtttgatattaattaaagtggttgttaaatctgatattttgtgtacatatacatatgttttttaaaaataaacaccaataataattatttttgagatcttttttcatgttgaaatatttatgtttattttggagatttttatataacaagcacacttatttttttttttttacataatatcgcattagttttacttttaagcattttgatagtacgtaattcttctattttagtcttatcacttgaactgtttcttatttgcagtcaagggtgtggcaaatattttaaaggggcataaaatataataaacatttgaagtcatctatgaaaacaatacgaattcattttgtgattatatacatataatcttaattaaacaatacccttttttggacaccactgctgaacatttaatgatttgagagagagcttttgctcgatcatttagtttttagtgtgggcttggcatggaaaattccacttaatcaaaatcatttggtctagtacaatttcgccaacacttgtctgaattcaattattcacaactgcaaggcagattgcaaaaatgaaaagctataaaagggaagagaatataaacaaacccacatgtaataggtaaataaacaaaactagcgataaagttaaccgaatcagctttgcgcgccactcaactatcaagctatcgataagtgtttttcaaaagtgttcccacatatttttaaatgggattttacacatgatttggtttggatcatttataaaaaatatgtgtttaatttatccttattaaaacattaaaataatgcatttaatatattggttagcacacttagaacctacgctccttgcgtctctataaactatttccaagtttctctgccagcttggccgtgttttatctgcaaatgcaaaaggtcttttgaaggttctatgggcccattcgaaaaccttataacagaggtgaagcgagcaacccaagcattcagtgttcaactttgtaaccgcgaagatgaccgggaaagtggagtactacttcaagcacaacgacggaacccatatccagggaatcggactgggcaccttcgcg

SEQ ID NO: 22610 - DNA, 1076 bp, DROSOPHILA
caactgtggaacggtcaagatgtccagcaaaattccctacgtaaagcacaacaacggcacccaaatccagtccatcggactgggcacctatacgtcgttgggaggcgattgcgagcgggccacgctgcatgcgattgatgtgggctaccggcacatagacaccgcctatttctacgagaacgagaatgaggtgggtgcagctgtccagcgaaagattgccgagggcgttatcaagcgggaggacatccacatcaccaccaagttatggtgccacttccatgagccgaagagggtggaatatgcgtgccgcaagactctgcagaactttggtctgcagtacgtggatctctacctgatgcactggccctactcctacgtctaccgcggcgacaacgagatgatgcccaccgatgccaagggggaggtggaactcaacgatatcgattacctagacacctggcgcgaaatggagaagctcgtggaactgggcctgaccaagagcatcggcgtatccaatttcaactcggaacagttgactcgcttgctggccaactgcaagatcaagccaatccacaatcagatcgaatgtcatcccgcgttgaaccagaagaaattgattgctctgtgcaagaagaatgacattgtagtgaccgcctactgtcccctgggcagacccaatccagcagaaaagacgcccaactacatctatgatgccaaggtgcaggcaattggagacaagtacaagaagtccaccgcccaagtggtgctccgatatctgattgagattggaaccatcccattgccaaagtcctcaaatcccaagcgcatcgaggagaacttccagatcttcgacttccagctggatgctgaggatcatgccattctggattcctacaacaccggagaacgtctgattcccatgacccacgccatcaaaagcaagaactatccatttaacatcgagttttgagctggaaagcaggagcaatgtttgatattaattaaagtggttgttaaatctgatattttgtgtacatatacatatgttttttaaaaataaacaccaataataatta

SEQ ID NO: 22611 - protein, 316 aa, DROSOPHILA
MSSKIPYVKHNNGTQIQSIGLGTYTSLGGDCERATLHAIDVGYRHIDTAYFYENENEVGAAVQRKIAEGVIKREDIHITTKLWCHFHEPKRVEYACRKTLQNFGLQYVDLYLMHWPYSYVYRGDNEMMPTDAKGEVELNDIDYLDTWREMEKLVELGLTKSIGVSNFNSEQLTRLLANCKIKPIHNQIECHPALNQKKLIALCKKNDIVVTAYCPLGRPNPAEKTPNYIYDAKVQAIGDKYKKSTAQVVLRYLIEIGTIPLPKSSNPKRIEENFQIFDFQLDAEDHAILDSYNTGERLIPMTHAIKSKNYPFNIEF

SEQ ID NO: 22612 - DNA, 3390 bp, DROSOPHILA
taattaaagtggttgttaaatctgatattttgtgtacatatacatatgttttttaaaaataaacaccaataataattatttttgagatcttttttcatgttgaaatatttatgtttattttggagatttttatataacaagcacacttatttttttttttttacataatatcgcattagttttacttttaagcattttgatagtacgtaattcttctattttagtcttatcacttgaactgtttcttatttgcagtcaagggtgtggcaaatattttaaaggggcataaaatataataaacatttgaagtcatctatgaaaacaatacgaattcattttgtgattatatacatataatcttaattaaacaatacccttttttggacaccactgctgaacatttaatgatttgagagagagcttttgctcgatcatttagtttttagtgtgggcttggcatggaaaattccacttaatcaaaatcatttggtctagtacaatttcgccaacacttgtctgaattcaattattcacaactgcaaggcagattgcaaaaatgaaaagctataaaagggaagagaatataaacaaacccacatgtaataggtaaataaacaaaactagcgataaagttaaccgaatcagctttgcgcgccactcaactatcaagctatcgataagtgtttttcaaaagtgttcccacatatttttaaatgggattttacacatgatttggtttggatcatttataaaaaatatgtgtttaatttatccttattaaaacattaaaataatgcatttaatatattggttagcacacttagaacctacgctccttgcgtctctataaactatttccaagtttctctgccagcttggccgtgttttatctgcaaatgcaaaaggtcttttgaaggttctatgggcccattcgaaaaccttataacagaggtgaagcgagcaacccaagcattcagtgttcaactttgtaaccgcgaagatgaccgggaaagtggagtactacttcaagcacaacgacggaacccatatccagggaatcggactgggcaccttcgcggtatgacattgactggttgatcatagcatatccgatacggatcaggaatgtcgcctatcagtagccgggttaacgtcatttgaagaaccgctaacgttattgatgacttgtgatttcagtcgacggaaggcgattgcgaacgggcagttctccacgcgattgatgtgggctaccggcacatagacaccgcctacttctacggaaatgaggccgaagtgggtgcggcggttcggaagaagattgccgaaggcgtcatcaagcgggaggacatattcatcaccaccaaggtcagttggcaagttcttatagcaggcatatcataaactaatccttaagtggccacatatttccgcagctctggtgcaatttccatgaaccggaaagggtggagtatgcctgccgaaagaccttgaagaatattggcctggattatgttgacctctatctgattcactggcctttctcctataaatatcgcggtgataacgaactgattcccaaagatgccaatggagaggtggaacttgtgtgagtaaaatgaataatatatgaaatatttcgaatcgattggcacttacaagtgattgtgaaatgcgccttctattatcagtaatcttactatgccgtttacttgcttcaaactacagagacattgattacctggacacttggggcgccatggagaagttggttgacctgggcctgaccaagagcatcggagtgtccaatttcaacgaggagcaactgacgcgcctgttggccaactgcaagatcaagccaatccacaatcaagtaacttagtcacaggatgttccctccagtttctcaactcatattgttctttctgcagattgaggtacaccccgcgttggatcagaagaaactgattgccctgtgcaagaagaatggaatcctggtgaccgccttcagtccactgggcaggcacaatgccgagttgaggacgcccacctttatgtacgatggcaaggttcaggccatcgcagacaagtacaataagtccattgcccaagtggtgatccgatatgtggtaaggattttcgatttaggccttatgttgaaccggatttctcatgatgaattctaatttcagattgagctgggaaccatcccgctgcccaagtcctccaatcccaagcgcattgaggagaacttcaatgtcttcgatttcaagctggatgctgaagatcatgccatcttggactcgtatcacaatggagaacgtgttgcccatgcccgacaagccatcaagagtaaatactatcccttcaacgtgtatagtgcttgtttttgatacaacaaatatatttaagttattatgattaataaataaatagtaacccttgtaagggaatgcccaaaagcaagaagatttctaacgtcatttacaatcggtaagtatttttcgtaagtgttttgtatatgtcttttttggccttatcatcacaagtacttcccattgatattcacatggattggttaataaatcaaacagcgcggcacttttttgttccagtcattcagttttttcttagagaatgtatatatttcttaatgcaaaaatttaaaaactgatatacttttacaacaaaagtgaaaacttttatttttgattgtatttaaatcgaagttgtacccgtatcataatgcacaatagaacagataatagaaaatagggtagcggatccattatgaaagtcaagttctcgataagaaaaatataagaagtcgattgttttacccagctagctgtgaaaataggaaataatatgtttgtattaaaatctaccaatgtaaataacattaaaagctttttctctgctgcatttaaaataaaattgaaatgatcaatgtcatgaatagaaaaatgttacagcgaatattttaaatttcaatctcgcggtattttgtaacgcattacagtatatttgctggctgtaagaaatatcgatagagcggttgccgaacaatatcgataagtatttatttactcttccaaatattgtgtgatatttttatgtgcgcacatccataacaaatatccttgcaaatcgccgggaacacgacgaattgcaggtaaacaagatgccagcagtacgtggacattacagcagcgaagattacgtggagcagcaacagcaggaggagtaagtgcacacagcggaagcaagtaaatccgtccaattgccgaaaaccagagcgtagccagccggaaaagtagagcagactctcccagaaatcgatgccccactgccacacaatggtctatatgcgaattgtgctaacaaccttgg

SEQ ID NO: 22613 - DNA, 963 bp, DROSOPHILA
atgaccgggaaagtggagtactacttcaagcacaacgacggaacccatatccagggaatcggactgggcaccttcgcgtcgacggaaggcgattgcgaacgggcagttctccacgcgattgatgtgggctaccggcacatagacaccgcctacttctacggaaatgaggccgaagtgggtgcggcggttcggaagaagattgccgaaggcgtcatcaagcgggaggacatattcatcaccaccaagctctggtgcaatttccatgaaccggaaagggtggagtatgcctgccgaaagaccttgaagaatattggcctggattatgttgacctctatctgattcactggcctttctcctataaatatcgcggtgataacgaactgattcccaaagatgccaatggagaggtggaacttgtagacattgattacctggacacttggggcgccatggagaagttggttgacctgggcctgaccaagagcatcggagtgtccaatttcaacgaggagcaactgacgcgcctgttggccaactgcaagatcaagccaatccacaatcaaattgaggtacaccccgcgttggatcagaagaaactgattgccctgtgcaagaagaatggaatcctggtgaccgccttcagtccactgggcaggcacaatgccgagttgaggacgcccacctttatgtacgatggcaaggttcaggccatcgcagacaagtacaataagtccattgcccaagtggtgatccgatatgtgattgagctgggaaccatcccgctgcccaagtcctccaatcccaagcgcattgaggagaacttcaatgtcttcgatttcaagctggatgctgaagatcatgccatcttggactcgtatcacaatggagaacgtgttgcccatgcccgacaagccatcaagagtaaatactatcccttcaacgtgtatagtgcttgtttttga

SEQ ID NO: 22614 - protein, 320 aa, DROSOPHILA
MTGKVEYYFKHNDGTHIQGIGLGTFASTEGDCERAVLHAIDVGYRHIDTAYFYGNEAEVGAAVRKKIAEGVIKREDIFITTKLWCNFHEPERVEYACRKTLKNIGLDYVDLYLIHWPFSYKYRGDNELIPKDANGEVELVDIDYLDTWGAMEKLVDLGLTKSIGVSNFNEEQLTRLLANCKIKPIHNQIEVHPALDQKKLIALCKKNGILVTAFSPLGRHNAELRTPTFMYDGKVQAIADKYNKSIAQVVIRYVIELGTIPLPKSSNPKRIEENFNVFDFKLDAEDHAILDSYHNGERVAHARQAIKSKYYPFNVYSACF

SEQ ID NO: 22615 - DNA, 18189 bp, DROSOPHILA
gatctatggagcttattttgacccctgctgatatccatttacaatctatgatctatacttatttccaggctgatttcgcttggtaggcaaaggatgtggaatatacagtacattcatttgcgttaaaagtagtcaataagcattttgatttgtggttggcattaaagcgatttaagtgggtgatttgcttgggttctcctctttcctctctcctaatcgaaggcaatatgtatgtgagtatagctaggtaaatggtaaatggtaaatggttagtaacaatgcacttgtccagcacttgtgggtttgggtatattgctacttatacaccgaccagctgctggccagagtttctcggggattttctggcctggccaggccaaagaaaactaagctaggtaggcgctacaacagaaaccgttacactaagaggcatccatgtttaccctagacccgcaatcaatccacagttctcgtatcggttaattaaaaaattgcttattctcgcaaatctatatcaataactaaacaaattcaactagtctgcagctgtctagccatctgtgctaacactctccattcaattattgtttattattacttggtttcgtatttgattctttcgaagactaccataaaatccctgtaggttcatcgtaatgcctgtgtgaaagtgtgatgtttgagataatgctaaaaacaatttatgcctagagattagtgatgcgttaaaatgtcacataacacccgcagcgttagtttcgtaaagtctgaactactcgattacattggttgctttttggttttttggagtatttcagttgcttggtaaagtaatttgattgtttttatgcttaaattcgtctgaatttaacttttgatattcgactaagtatattaacttcgtttaattcttaagactaacaattagcatgggaagcgcaggttagtgtttagttgggttgagcttggattaggaaatgccaaatgaaaccaaggcgaattcaatagcgattttgtatatttgtttggttggtgaataggtgtgtgtgcgttattttatcgtttagtgatcaattcgtgtttaagatatagacttaagtatttttttcctattctgtgtaggtttacaaacttatcaagttttaaattatataaagccttgtaatgtacactatgtaatatttttgtatacatacatatgtgtgttttctatagataagcgctagagagatcctttctcaaaatacatgaaaaataaagtagacataaattatatgcttattgcccatgagctataaaactggaacagccaaaaaagccaaagaatgataaatgcttaaaacatagttcaacaatcaatcaggcatcgcgttaatgttcacaaggataatgcttaaagctaatccaaaacaaaaaataaactaaacagtatatttataataactcatgtgtgtaacaattcaatgaaaaacaaaaaagggagactggtgagttaaacgaatttacaatttttaaaatgttttcttaaaaattgaaattcctgataaacgcttagcggacaatccaaataatataatatcatattaactcgagtcgggggcttggctatgtaaaaagaaactacataaaattcctcagtaatagcacaaaacataacaaaaatggtgtttctaatctcgcagcgcggcaaattggtcgagacatttcaagtagccatttgccgcgcggtttcgtttccttaaaattaaacatacaaattagaaattaataactgctttcttagccaaaaagtaacttgagtagtatttgtatgaggggtatgagtaaatgaaattgctcatttcatgtatcattcatttagcattcgaatgccagctccaaatgctgatatgtaagcatgattatcaaaaaatagtatgaatgggggtctctcttctgtttcgattcgagggtgttcgtttttgggggagtcgtctaacaataattatcttaaatgaaactcaaagtgtaagcttcatattgtaccgatattatatacacatcaataaaactgtgtttacaatgataatgacgatgatgagcccgggtctccatcggctgcaagaaaactatctccgccatatttctacgtcgcctacaagtccaaagtctcacacattatattgcggaaacatccgttaaaacggtgtggataaaagccgtaacagtctagatcgcctgatgctgttgacgctgtattcgcaccttgtgaatttgccgctgctgaagagttaccattgatgtagcagcggcattggcagctcctgagtttcccatcacgttgagactgtggggctgcgagtattcttgcagctgacggtgtttctgctgttggtactgatgctgctggtgctgttgatgctgaccgttccccattctgttgtccctgatacttcgttggccagagaagggtaacgaaacattcgacgaagatggtccgatgccaaccaggctctgcgacttggagttgcgagtcaagggcttgtgatttttgacgatgtcacagctgtgctgccattgccagcagctgcggcagaagtatctgtaaacagaatgtaggaaataaaatattacaatataaattaataaaacttaccggaagcacgataattccctacaatagtagggaccgtgctgcacaccgcatatggaacatagggcatcctccaagtagggatccacctgcaccttcttggtgaacttcgtggtcctaatctcgataaaggcggccgaaacagctttcatataggagcgaaagttgctaaatgtcacacgtcccgatccgatcgggtacttgtacttgtccgtatctataccagcatacagcacgccgtcgaaaagatcatccattatatttcccaagccctcggcagtcagttttccatgcagtgcgcccacaaacacggttttcgttgggtcaagtttctgggagctggatcgcacaaaattggagtcagcgataatccaaggaatgacttcaacctagtaaatgaaagtattaaatatggatactattcgtactatcctttgcacttacatccttggacttaatacgccgcgaagagattttgaagaagtagttcctaccacagtgagaatcatccacctgaagcacacaggccgaaagtaatgccttgacctgcttgtccgattcaaagattatgtaaacataacccttgggctgagccgcctgctgctccttgccgggccactccactctgaggatataaggtttttcagttactcacaagtagcgctttacttaaggttagacttacttaatagatccaaatggcttgaagatctggatgagcgactgctcactaatatcccagggaatcccgccgaggaagaccttgggagaatagttgagcatacggtgcgaacgcggcggcaggtgtccactccatgtgcatgtggcatcgcacagggcagccgaactcttatagaacttagctacgcgatccaggtggccatcgttggtggttataatgccgccaacgtttcccgccatttctgtcatcagtgatgatccgcctgcgctcatcaagttaccaagattgcttccaccgacgctgcctatggcgttgccggcatagctctgcaggagctggttgatcagcggcatttgttgagcttgggcatgcaggagctttagcgtgttgatgcgttgcaaattctgcagtttggccagctccatgtccacactggtgatgttttctagattatactggctaaagcagttctcatttccgctactagaagcacccacacccacgccgttgtgctcgaacccatgttgttggctacccaaattggcagatatctgttgctcgtagttcctgtttaggttaacaaactgctgctgcaactgatgttgttgctgaacctgcaattgctgctgattctgttgttgctgctgctgttgttgttgctgctgctgttgttgttgctgttgttgatgtggaattttgttgctatttacagacagcaaattctaaaagatagtagtaatcaacatttcactcattaggtaaaataggacgaatgatttagaggataaactataggataagttggccattgttattaagaaaaaaaaatcatcaggctcgctcgctaccaagttgaccttaccacacgtaaaactttagccataatacctattgtaaactgcaattttgaaaaaaaaaaaatttaaaaatataaattgtaataaagaccaacgcgtttgaatattatttgtaaagtgaacgaaaaatctatggtgtctttcttaatttggataataaaagtaattaataataatctaagaacataataattttctaaagctatgaaataatatttcccccttgagatatattcgaattacttacaatcatgtccagtagattttgttcagtcgttgaattgctgctgttctgactctctggcgagttcgagcgcgtggaagcgtttgccaaactaagtcccaatccgctgcccatggagttgcccaaactggtgtaaccttgctgctccggctgttgctgttgttgttgctggttgtagaacatgttgatggagtccatggagagtccaatgccgctggacgagttgctgctgtcgctgcaagggtcgagtagtggaagagtcgattaatcattgtgttcaaatcattcagagagagtgccacattatcatatttcggttattacctgactaaaggtgaactgtgaaaggagcgattgtaaatagatgtaggcgtacttggcgataagggtgcagagcaatcgaagctgatgtttgttctttggaaagccttaagtgggttactttgtgcaacattttcaaactaagttcgccaattcacccaaaaagaaagaaagaatggaaacaaacgaataaattaaaattaggaaaggaaacggtaacgacaataggtaacttcgctaaaacgaagttggcataccttgaaggactcttatatttacgattttattgtagtttatagtaaaggtttttcgcatgctcaagtccttgcaacgtttgtttatatgacgaatacagagtgggtcgattatttgcacagatatttacaagtgcagacagttaatattattctttgaaatatagtcttttacgtgaactatcaatacttttcgaacttgtataaagttccacatggcttttaatttaaataaattacttatttatcgacccacccatgaacacacagagccattgacagaggggaaagttagaaaatcataagacggttacggccaccgtgcgagaaatacaggttggtttttcgggggatagatacgagtacaagcaagaaagttaggagaattcggtgcaaattgagtgcagttagagagaagttgaaggtcccagcccgtgggtagcatcaaccgggcgggcggacatcgcatgtcgacacctggccttacctggaagtagtcaaaattggactttgtgcccggcgaggccgatgaatgagtggagctgggcgtcagcggagcgtaggctgccgcattggcggacagttgagcgccatcaccggcagccgcggcggcagcggcagcagcactggcgagcagcagattattgacgtcgctgctgctgccgttgccaccgaagctggctgatgggttagccgctgaggtgttgcacgaggcattggtttgttgtcccacgactcctcctccaccacctccctggatcgatggaactcctggcccaggtaatgtccctccagctccaactcccactcctgttgccgttgctgcgccggctgtaactccatttgctcttccgcctcctcctgctccaagtatcggcgctgatgtcgagggggtctggccagtaccgaccacttcattggcagtgctggcaccgcacaagccgagtagatcgttcagtgtgattggatctgcaggcagtaaaatgaagaagatggtgggggtaagtacaatgtcaacaattatcgcacagtttgtccagccctcaataaatcaaaactattgcccctcaagcactttgcaaatattcgacaaaactgctaataaattaagcgtactgcagtcgctgtttgtgttgtccgtgctgtcctggtcaatgctgttggcactgctgtcttgggcgaagttctgggctccgtcgccactagtcagtctgccaaggtccttggagctggcgttgcttgtatggctgttggtggagctcccatcgccgttgctgccaaattcaaacgagtcctgcgctacggccatagctggctctaccacatatggcttctcgactcccaacatgtgtgcactgatcctgatggaatcctttctggccttcgatacggactgcaactactgcgtctgcgctttcttattgaacggaaacaatttggggcctattttatttaaaattttgattggtactgtaaaatttaattagcgcttcttgctggcaccgttgcgacaatttgaaatggaaatgaaaatgaaaatttatggctgcggacggcgggggtgcagtccgacttgaaaaaggatgtgtatgattaaattaagttaataacaataatgacagtgtctacgaattatgtgtgccgacttctaaaagtaaaaaactattgaaatattttctattgtgttttgacaacaaagtaaaagaacaacccactgtttttcagcacgtattcgaaaattgatggtcttgcgatgatgattctccaaagggacatacaatttgcatacacttactaatggaacaaattcagctaattctagagctcaccgtttataaaagatatcaatccatcgtcgttgcatctctccaacagactgtgctgctgttggtgttgctgcagttgcaagtgatgctgctgttgctgctgctgctgatggtggtgatccaggtaggagcttatcgagtgtttctgcagcaactccgttgtggagcctccgctcagggctcgcatgttgccaccagaaccggagcaatcgggggtgtcgtactggaaatgaaaagatagtgaagcttgtagaaacgatgacatcaagcaagaaatttgaactgcaatcgtaataaaaacggtcgacagttgctgaaacttttattgtctcgctgtctacttcttttttttttaaggtatgtcaatgcggatggaaggagttcctgctgcgcccacccacccaacagcagcaactaatgaatcgtttatctttcacatttcttgccacacgccaggcaacggcgagaggaggagggacaagaacgtggcaaccacacgaggccagccacaaggagacaatgccgccgcaccgcagcacttccagccctcagtttttccccacccacatttcacccagtttgcagcgcacccacagcagccgaccgacccgacccttgtgtcgcactttcctccgaatcttcctcgctctcctctgaagcactctcgagcgcctgggcgcaattaaaagcgcatcaagtgtcagtggagcacacttaaaaatgccaaattagtgcaaatattgttatcaggcactcaccaaacaatttagcgcaaaatggcgtacaactcattacgccggattaatgcagcccacgaaacgtaacgaaagccaacgaatcgagacgagtgacagcaatcggaaacgggaaacggaagtgtgtctatgtgggatgaatgacgagaactcaaatgaggataaagcaaaaatgtgccaaagccaaggcaacaagtaacgacggtcagtggtcagctgatgagtgagtgcgaaagagttgttctagttacctaaaaacggatttggacaagtccttgactttctatggcaaaatagagatgaggtaaatatatcacagaatgtattttacgataaacacaccgatctgtagcgacactatgttatcaagtgatcgattgcggacaaagaattccattggaacttaaattaacttacgaaaactcatttgttcatttgttcagcaagtggaaatgatgcgattttcctggtccaaatgaaaccagtaaacagcaaggggcacaagttaaagatctatcgcagcataaaggactgacacaagtggtggggaacgaaaagaacttccatccgctggcaagttttgaatgccgggaacgaagcgacagtcgacggcttccttagtctttgtcaagatgtcacaactatgttaagtacaaaacttgctatggatttaaaaattgaatgacaacttgatgaaggtacgtgcaaagtcggaaatggcacgaacatccgaacacacgcacggcaatcacacatcctatccaacatgaaaggatgcggggatgtgccggacaagtcggctccgttgagaggcggcattgtggcccatatgtgtgtgtttttgtgcgggatttcagactttgtttctagcctacatacgtcacacgcccgtccgcccacagttacaacttgtggcaggcgataaaaaaaaatggcgtcaatgaatgcaaattacaaatagtcttcaagctattttgtaatgccgaggccgcgtccgtatccgcattcgcactctcatccgcaaccgcatcctccccagatccgtcgtccaaaaaagtcagtaagacgctaaaagctttcgctggcggaaatagaaaaggcgtcaaagagactaacgagaattctaaggccaccgccattaaaagaaagcgaagatactcttttcaagtaccagatggttaagcaggtcgtaaaatctataatttataatcgattgtcttgcaccttcaatgtaaatatcttaaaattgttattgttcacatattgttgcgcaattgagaagatcggtgtaaaagtgaaattatcaagtaacaatttcttacttttcaattgaaacagctcaatccagtgacaatacccggccaactactctactctacactctcctcccggcaaaatcccataaacaacgaaattgaatacgacaaaaaatcttaaccacccgttcacgcgtagattgcaccctggcctattgactcctctattccgtgcgccccacgtcctaagatcgcccccgtttgcaggaccacccctatatcgtagctccagtttcattttcagctccttctcctcctgctgcttgtctcttttgccgtcgaggatttgcaaaatttgattcaatggcgttgctatgtccgagcatccttctctcactgtctactgtccacatccccatccacactctccgccagctgatggctacatggagatattcggcatctctctgcgtccgatccgaaaatgtcagccgaggggccaaggagccgttccacccataactcagtagttatttatcctatgtccattcgacttggcttttgtgtttccactcctcctgcactgctaccccgcctcgttggccattttcttgggcttttcttgcatttcatttttggcaagcgatttgcctctgctgcttttcggtctggctgggattttgtcctgggcctggcctgcattttagcggatacactcatacacatgatgtggcaatggtggtcgacggacgggagaagtgggtttgaaagcgtttccggggccagagcctctgtaaaattacatgtttctgctttcagaagtcatacaaattattatgtttgcatcgcttacaacacttattagatgtcctgctcctgtttgccatccttttccaatgcttctcgtgctgtgctccggcccaaaggggttttcggcattaaaatttgatggcatgtagtgataagcgttcaataacgacgttgtccttgtcgacgccattgcccttcctgtccctttccatgctttccgttgcccgctgactctcctttccacaagggccacttcattcgattcgtttcgtttcgatttccctttgcccaccgcccgtttcccgctcccagtgaccgcagccagaggttaatgcacagttgtaattttttatggccgattacatgttgccaacttgtgggcgaaaacggattcgcaaggcgggcagcgggaacagcgacgttggcaagtccataaaggataagagttatggccgaatgcatttgaatttgccagcggtaatagagtgtttgcatattacgtggcgagtgcttaaatcccctgaaaggattcgggatgcacaatttatggagctctgatctataagctgctgtcgtggctgcaaaacgattgccgactgccaagggggaaatcatgtaaatgcaactcaatttacgacaaagtttttatttcgcccaaaaaacaattggcaaattacgaggacagtccaaagtcagtgccatgctgctagttttttaataaaaattaacttgaaagcaatactttcaattcactatcaattaaaagaccttaagatcttaacttacagttcagaaactgaggatctaagatataggaatatccggtagcactgcgcaccattcacctgtgctaatgtttataagttttattcgttatatacctgtagtaaaagttcagcaaagtggattcaccaagaatgccgtggcggcgtataactaaagcgtttaatgtttgcaaattaaaaagcattcaccggagtcgagacctctttgacttcgaactttgtccgcaggccggcggagttgtgaatggcacaaggattcgataagatgcaaatgcctgcaggacagcaagcagagcctggcgttggtttccgatatagtggcacgtaattgctgcgcctacatatccagcatcctgaaccccatccacttcctcgtcctcatccacctcctttaactcctactgcagatgctgccttgtttgtgttgttttgtgttgtactgagctgagctgtgctgtgctgtgcatttcattaaatgccaatggctgggcaaattaaattgagttttgagcatgtcgaggagtgccatttcatcagctttgactacgcgatgtgtcgccatcatatttacataactgcatgccttccatggatgcttgcttgcctgcttgtttttgtgtcctctgttttgtgcaatatgaaaacaagacattaaatgcctttctggatcagaattcaactatcaaagcgcatgcagacgtcttcgcaggcagcaggatctacaccacctccattgccaccagcaccaccaacacttcatcctcctttcagcggagtcagtcgcagttgcagtttcctttcgcatgcagcccatccatttaataataacaatatcgtaattcaggcaagtcactgacagcaccagcctttacatgggcgtagccagcccctcctccgttcggcgaacaaacgagagaagcgtagcgacatttcagtttcaacggcaacatttccgattctcggagcattgttgccgttgttattgtttctctggggcgccagtggatgggtgaggagtgggctggcggccaggcggtggctccataggaggcggaatggtgggccaagcagccgtcaacaggccttcaatacatgcacgtttgtatgagtgctaagtggaaataaaacacgcgctttttccgcactgtattatctgccactgctactgccgctggatctgtggatctgtttctggtgatggtggtgctctcctccagctccaaccaaatgaaggtggtagtgcaagcagcagcagaagcagccaccaacgaggggtgcatgctgcacattttttaggcagcccacgacgaggcgaaaaggtacaacttttccgggcctatttaaaaaacagaaatacaatacagtttcaaaactgccgagtaatcatctcgaatgtctgatgccttagcattaaaaatataattttgattagttcatatttcttcatcatgcccttctaagtatgctacgctttaactgattaatacattaattcaacaagtcctagtcattctaaacagaattttatacaaagtacctatttaaaagtattttatgctgaaacctgatgtaatggtttcattttaatattttttgagagtttcatacatgtcccgtagactagatccttatttcatgacaagttttgacgacagagattatctgtagcctgcagttcgcaaggacaaaactgctccatcacggacgtttcaaaaacgctgcacagagttgcgctgggaacctttgcgaggatatagaaaacaagaggcgactccaactggatgctgcccttttgtggtttgccttttattgttgcttgttgctggtgttgttggtgctccgactggatgttgctgttgctcattgctgtttgcttctattttcttttgccgcattttggttcgcttttaatgataacgcaacagcattgtgtgtgtatgccaccgccaccgccaacccaccagccccttctgtcccctcatcacgcatcctcgggctcattccattggccaaaaggcctgataccctctcgaccaggccacctttcgtcatccgctcaaccacaataatggtgtgcatcagccggagttcagggggtcacaaaggggtgagtgggtgtcgtcggacgatgggcggtgtcggcggtgccgcatcacaatcacgcatgccgcaccactgccaatgcattaaatgctagttgagcccagtagtgtgtgcaacgtctggcgaagtaaattcaattgaattttgcactcgttttctgttttcagttttccattttttctcccattttccgcactcttcttttatttattttttttttttgtattattcctttctcatttttgttaaatgccacaggctcatattgcaatgggctacgccctaataccaagcaccactacccaatccacaaaacgcggcagtgcaacaaacgcaacgcaccctggttgatattttcttggttgttatccttctcgctggcggcgggcgtgtgatttgcttggtatcgacattttaatgatgtgccctggggctgctgccaccgcattgttggaggacgccttggccgccttgtacttttggcatttgcgcgaaatgtcgagacattccaatagtctgccaaggatcagaaccagaaccagaagctggagccgtactattgggtagtgggagtgaaaatggcaggctatggcggcctggacataccaagttggcctgcggcatatacttaagtgtacataaccaactgttaatgccacaccatcgcccagcacaatgatttgctcgaaatgattgccgccctctcttgagcattcactcgagtttgggtttgaataatgccaatgatttgcccgctggcaatcaaatttgagccggctaataactggcaattgcaggcagtcgtttagggaaaacggccaagcattcacttaattatactattagtgtaatatttatgggcgtgtgtaatcaacaggtaaagcagatagtttagtttgctttaagcatagtttacccccacgagcatagatctaatttaatagtaaggttctatgattaattatgcacaatacagtaatgttggcaagttttaatgccagacatattgctacacaaaatcccggtgtcattgatatggactgacctgcacttggacagtgaaccaagacgttggtgcaaggacaataaaggaaaattttgtacgaaacgatgttacagcaggatatggacttttgcagagcatgacatcacacatcctacggcttaaaatggcaaataaaatgtacagcatttcttatgaccgacaaattttccgctgtggcccccaccattatttataggcattttaaacagcaggcaatgccgcaatggaaatgagtgcaaaaaatataaataatacggaaagcaggacattaagaacacgccacgttggcaagaagtagacgcattttagacattaccagcaaataaatatgaatgtatagcaatacggcaagggaaggggggggggggtatagacactgcttacacgacgaaattgacattttgcatttagttattcagttgggtctatattttgatcttttttttctaccattttgctgccgccgctggcagccacaataaaatgagaagaaaaattgcataataacccctttgaaatcgtcggattatccttaaatatttgtgtaaacattgtaacaaatgcgcagctccattgtcagccaactcgggccatggatgcagcacagaaccaacctccatccttcatcctccacctctgtttccatctccgcctctttgaaagccatccccaatccattgacgtagtcaaggcggcttttcctcaacccctgtgcgtcgtctgtcgtcaaatgcctgaatgatgagcaatagacgggtccgggtctcctgtcacagtcgacaatgagcaactttttccaaaggcggaagacgtggcaaggatacaaacgggccgcgtagccaacaatgggaccaagtgctccgccgaggagggaaagcgtcttaaaaaacctgtcacacatattgacagtcgctttaggatcgcttaaatcaagtctggggtcggcgggggcatgagccgagtcgtcgggttggttagcatgtgcgtatcagcataaaggatattgtaatcattacatgtaattcacatttgggggtgaagggcaattgccgcaactgacataattttgatgtgtattgatatgaagcggattgtcaggcaggataattaattttccagaggataaagaaaaactcaggaagggacatgtaatattttgagccataagaggctaatagctgtctgcttgtactgtcactggagttttaagattattagacaaacttttacgaatctttaaagacataaaaatctggatactaatggcagttgtaaagcgtgcccaacaactttagctctgttttttatccgctattccaatgcttccatttgctctctgcgctttttctgtaccgctcagtgtcctaatcgaatcatctcatttaagtgaattaaaaaacatataaaggcgagcaaaattaaatcacgcaactattttgcgcaacaaagagtacaattaaaagcccacccggcggcaaaaaggacgaaaaggaggcgcagtggtgtctggcgcagaaaacgccgcaagtttaatcgaatttaactactcataatgtgcaacagacgttggcggatggggctgtttcagtgggtggtggggtggtttgaaaaactctcagaagtgtaggcgtaaagttgggcactaatcttattaggatcatcccgggccagccactcacgaatcccaattgggaagatgaactgaaaaagccagctgatgtagagctctctcactcgctcggtcgttctctctctccctctttctctctagccgactttattcgtacgtgagcgtttcaattaccgctctggagtgcgaatgggttttattattatttacatacctgttgcagcaggggcattgttttgaataaaaattccaatttccacacttgttcacgttgcgctccttgttcgttcgtgctcgttcgcgttcgttcgtgttcggcaggagcagcatccgccaactgacaaagcggcaaaacagatgtcaccacttccgcctctcgtaccttccctttcccactcccactgccggcggagagcccgttcgcgcaccgtctctctcgccctctctctttcactcctgcgcaggcctttcggttggagttcgctgcggttcgagtccaagttcgtgttggatctggttggagtttgaattggatgccgagcctcgggcaaggaatctggtttttgttgttgtttattggagctccacaggataacgcgactgagcgagcgagaggggcgaaggcgaaccaagacagctggcagatgtggccgtatcagcagcaaatagtcatcgattcattccgcctcgtcaacgatgcaaatttccaaaggcctgaaatatcataagcatgaattaattataagagtactcttctttgtagtttccaaatcagtggagtttaaagaaaacacacgcgtacgcacttgagcgttaaatgccgtaaatcgatcaaggcgtatccctctctctcctactctctatgacactgtcccggctaactgtaattaactgtaatccagggtcgtttactttaaagggggcttttatggccgccaataacacaaactatgcattatcctttcgggtggtaatcctttcggaagctgtgtgttgagcgaacctattattagagccataaatcagcatgaaatgagcagtggcagcgaagttggagttgtaaaatggagatggagatggggccaagccctgtctcgccctttctctactctctccatctcactctcgcgctctgtgcgtagaataatgggtagtaagaataagtgtgcacacagaaagaaaaattgctatactttcatgaattgcactgttattcatatttcttttcaattgataccggacaatccaaaaatctattattgtgcacaccttacattttattaacgaattaagaccccgcgcaattccagcttcatttcctctgtgtggccaaggcggcgattgattgccgtagtttttggagagatgacgtgagccaaaggcaacagaaaaaaaaacaggaccaacggcacataatagtagtgtgtagttgtaaagttgtaaaatacgcacgtcgagaatgagagaacgaaaaatgagccgctgccctgtttttcttcaccttcttgttaccaactaatttgaactgcaccatttttcggtcaacaatttctagtgccggctaacactgatacaccaatacatacccaggactcgcaaaaacacgcggatggcgcataaattcgtgtgaattttattttaattccgcacttgcaatcgcatcccgtttcttttgtcgtccaccaagcacatttttacacacactcgcacacacgccgccaggaaccgttacttctgctttgcacgcccttcgccgttttccgtttctccttccgatgctgtttcgccaaactactcactcacggacgcattttttactattaaactattttgattgttgaaaatctttgcgactgtggtatggcaccacattaactcgaatttaaaattgagccttaaatttgagcggaccctgccgcggcaatacaaattaatagaacaaactaaattatcatcccgtgatatcttttattttggaattttagtcgggattttttgatattatggccacgccacggcgtgcaacgctgcttaaataacctttttcgcctggctctgtcgaaccaaccgcatgcaaccgctctcttgaacttaaaagcgctcatttgtttgaaacaacttgtgttcgacgattcctcgacaaaaaaagaaacagtcattaaaattcgcacaaatggctgaactatttaaataatttatttaatttgtattttcatttaaagttttggttttaaaataatttttatatttccattaattttattacttattggtaaagcattaacagcaaccaaatttttttcactggcgtaaacaactgtttccagtgaatggcaacaatacagctgttttgcacagagttgccactatgttcaaatgagttattaccagcggcggaaaacttgtatcaaatttataacaaaaatacaattctgcgttaataaaaatgcccggggacacggaaaacacaagcactgacaccaccaatgaacacatcgacctggccttgtaccggcagctggtcaaacaattcatagacatggtaagacaaaaaaaccaaaagccggcaagcagagcctgagtgcaaattcaattgcatttttagcgtcgctactccacagcgcttttttgggcagaaaaggtggccgtgcttggtggcctggaacccagggatatttactaccaggcgcagtgcatgtacctactgggggaataccatcgtgctgctcacacaatacagcatcacaagctagagaagaattcactgccatgttttaacctactactggaaagtctctatgcggccaaggagtttaccgaggcggccaatgtcatccagaatgtggaggtggaagtcatgaccacatcgctgatcaaccagcccgttgatgcaagcagtggctgctatctggaaagcaacagtgtctttggtggcgaggagaatcacagaaatgaactgctctcatccatttacctaatgaagggcaaa

SEQ ID NO: 22616 - DNA, 4840 bp, DROSOPHILA
ccgactaaaattccaaaataaaagatatcacgggatgataatttagtttgttctattaatttgtattgccgcggcagggtccgctcaaatttaaggctcaattttaaattcgagttaatgtggtgccataccacagtcgcaaagattttcaacaatcaaaatagtttaatagtaaaaaatgcgtccgtgagtgagtagtttggcgaaacagcatcggaaggagaaacggaaaacggcgaagggcgtgcaaagcagaagtaacggttcctggcggcgtgtgtgcgagtgtgtgtaaaaatgtgcttggtggacgacaaaagaaacgggatgcgattgcaagtgcggaattaaaataaaattcacacgaatttatgcgccatccgcgtgtttttgcgagtcctggcctttggaaatttgcatcgttgacgaggcggaatgaatcgatgactatttgctgctgatacggccacatctgccagctgtcttggttcgccttcgcccctctcgctcgctcagtcgcgttatcctgtggagctccaataaacaacaacaaaaaccagattccttgcccgaggctcggcatccaattcaaactccaaccagatccaacacgaacttggactcgaaccgcagcgaactccaaccgaaaggcctgcgcaggagtgaaagagagagggcgagagagacggtgcgcgaacgggctctccgccggcagtgggagtgggaaagggaaggtacgagaggcggaagtggtgacatctgttttgccgctttgtcagttggcggatgctgctcctgccgaacacgaacgaacgcgaacgagcacgaacgaacaaggagcgcaacgtgaacaagtgtggaaattggaatttttattcaaaacaatgcccctgctgcaacagtacgacacccccgattgctccggttctggtggcaacatgcgagccctgagcggaggctccacaacggagttgctgcagaaacactcgataagctcctacctggatcaccaccatcagcagcagcagcaacagcagcatcacttgcaactgcagcaacaccaacagcagcacagtctgttggagagatgcaacgacgatggattgatatcttttataaacgatccaatcacactgaacgatctactcggcttgtgcggtgccagcactgccaatgaagtggtcggtactggccagaccccctcgacatcagcgccgatacttggagcaggaggaggcggaagagcaaatggagttacagccggcgcagcaacggcaacaggagtgggagttggagctggagggacattacctgggccaggagttccatcgatccagggaggtggtggaggaggagtcgtgggacaacaaaccaatgcctcgtgcaacacctcagcggctaacccatcagccagcttcggtggcaacggcagcagcagcgacgtcaataatctgctgctcgccagtgctgctgccgctgccgccgcggctgccggtgatggcgctcaactgtccgccaatgcggcagcctacgctccgctgacgcccagctccactcattcatcggcctcgccgggcacaaagtccaattttgactacttccagtttgaaaatgttgcacaaagtaacccacttaaggctttccaaagaacaaacatcagcttcgattgctctgcacccttatcgccaagtacgcctacatctatttacaatcgctcctttcacagttcacctttagtcagcgacagcagcaactcgtccagcggcattggactctccatggactccatcaacatgttctacaaccagcaacaacaacagcaacagccggagcagcaaggttacaccagtttgggcaactccatgggcagcggattgggacttagtttggcaaacgcttccacgcgctcgaactcgccagagagtcagaacagcagcaattcaacgactgaacaaaatctactggacatgattaatttgctgtctgtaaatagcaacaaaattccacatcaacaacagcaacaacaacagcagcagcaacaacaacagcagcagcaacaacagaatcagcagcaattgcaggttcagcaacaacatcagttgcagcagcagtttgttaacctaaacaggaactacgagcaacagatatctgccaatttgggtagccaacaacatgggttcgagcacaacggcgtgggtgtgggtgcttctagtagcggaaatgagaactgctttagccagtataatctagaaaacatcaccagtgtggacatggagctggccaaactgcagaatttgcaacgcatcaacacgctaaagctcctgcatgcccaagctcaacaaatgccgctgatcaaccagctcctgcagagctatgccggcaacgccataggcagcgtcggtggaagcaatcttggtaacttgatgagcgcaggcggatcatcactgatgacagaaatggcgggaaacgttggcggcattataaccaccaacgatggccacctggatcgcgtagctaagttctataagagttcggctgccctgtgcgatgccacatgcacatggagtggacacctgccgccgcgttcgcaccgtatgctcaactattctcccaaggtcttcctcggcgggattccctgggatattagtgagcagtcgctcatccagatcttcaagccatttggatctattaaagtggagtggcccggcaaggagcagcaggcggctcagcccaagggttatgtttacataatctttgaatcggacaagcaggtcaaggcattactttcggcctgtgtgcttcaggtggatgattctcactgtggtaggaactacttcttcaaaatctcttcgcggcgtattaagtccaaggatgttgaagtcattccttggattatcgctgactccaattttgtgcgatccagctcccagaaacttgacccaacgaaaaccgtgtttgtgggcgcactgcatggaaaactgactgccgagggcttgggaaatataatggatgatcttttcgacggcgtgctgtatgctggtatagatacggacaagtacaagtacccgatcggatcgggacgtgtgacatttagcaactttcgctcctatatgaaagctgtttcggccgcctttatcgagattaggaccacgaagttcaccaagaaggtgcaggtggatccctacttggaggatgccctatgttccatatgcggtgtgcagcacggtccctactattgtagggaattatcgtgcttccgatacttctgccgcagctgctggcaatggcagcacagctgtgacatcgtcaaaaatcacaagcccttgactcgcaactccaagtcgcagagcctggttggcatcggaccatcttcgtcgaatgtttcgttacccttctctggccaacgaagtatcagggacaacagaatggggaacggtcagcatcaacagcaccagcagcatcagtaccaacagcagaaacaccgtcagctgcaagaatactcgcagccccacagtctcaacgtgatgggaaactcaggagctgccaatgccgctgctacatcaatggtaactcttcagcagcggcaaattcacaaggtgcgaatacagcgtcaacagcatcaggcgatctagactgttacggcttttatccacaccgttttaacggatgtttccgcaatataatgtgtgagactttggacttgtaggcgacgtagaaatatggcggagatagttttcttgcagccgatggagacccgggctcatcatcgtcattatcattgtaaacacagttttattgatgtgtatataatatcggtacaatatgaagcttacactttgagtttcatttaagataattattgttagacgactcccccaaaaacgaacaccctcgaatcgaaacagaagagagacccccattcatactattttttgataatcatgcttacatatcagcatttggagctggcattcgaatgctaaatgaatgatacatgaaatgagcaatttcatttactcatacccctcatacaaatactactcaagttactttttggctaagaaagcagttattaatttctaatttgtatgtttaattttaaggaaacgaaaccgcgcggcaaatggctacttgaaatgtctcgaccaatttgccgcgctgcgagattagaaacaccatttttgttatgttttgtgctattactgaggaattttatgtagtttctttttacatagccaagcccccgactcgagttaatatgatattatattatttggattgtccgctaagcgtttatcaggaatttcaatttttaagaaaacattttaaaaattgtaaattcgtttaactcaccagtctcccttttttgtttttcattgaattgttacacacatgagttattataaatatactgtttagtttattttttgttttggattagctttaagcattatccttgtgaacattaacgcgatgcctgattgattgttgaactatgttttaagcatttatcattctttggcttttttggctgttccagttttatagctcatgggcaataagcatataatttatgtctactttatttttcatgtattttgagaaaggatctctctagcgcttatctatagaaaacacacatatgtatgtatacaaaaatattacatagtgtacattacaaggctttatataatttaaaacttgataagtttgtaaacctacacagaataggaaaaaaatacttaagtctatatcttaaacacgaattgatcactaaacgataaaataacgcacacacacctattcaccaaccaaacaaatatacaaaatcgctattgaa

SEQ ID NO: 22617 - protein, 915 aa, DROSOPHILA
MPLLQQYDTPDCSGSGGNMRALSGGSTTELLQKHSISSYLDHHHQQQQQQQHHLQLQQHQQQHSLLERCNDDGLISFINDPITLNDLLGLCGASTANEVVGTGQTPSTSAPILGAGGGGRANGVTAGAATATGVGVGAGGTLPGPGVPSIQGGGGGGVVGQQTNASCNTSAANPSASFGGNGSSSDVNNLLLASAAAAAAAAAGDGAQLSANAAAYAPLTPSSTHSSASPGTKSNFDYFQFENVAQSNPLKAFQRTNISFDCSAPLSPSTPTSIYNRSFHSSPLVSDSSNSSSGIGLSMDSINMFYNQQQQQQQPEQQGYTSLGNSMGSGLGLSLANASTRSNSPESQNSSNSTTEQNLLDMINLLSVNSNKIPHQQQQQQQQQQQQQQQQQQNQQQLQVQQQHQLQQQFVNLNRNYEQQISANLGSQQHGFEHNGVGVGASSSGNENCFSQYNLENITSVDMELAKLQNLQRINTLKLLHAQAQQMPLINQLLQSYAGNAIGSVGGSNLGNLMSAGGSSLMTEMAGNVGGIITTNDGHLDRVAKFYKSSAALCDATCTWSGHLPPRSHRMLNYSPKVFLGGIPWDISEQSLIQIFKPFGSIKVEWPGKEQQAAQPKGYVYIIFESDKQVKALLSACVLQVDDSHCGRNYFFKISSRRIKSKDVEVIPWIIADSNFVRSSSQKLDPTKTVFVGALHGKLTAEGLGNIMDDLFDGVLYAGIDTDKYKYPIGSGRVTFSNFRSYMKAVSAAFIEIRTTKFTKKVQVDPYLEDALCSICGVQHGPYYCRELSCFRYFCRSCWQWQHSCDIVKNHKPLTRNSKSQSLVGIGPSSSNVSLPFSGQRSIRDNRMGNGQHQQHQQHQYQQQKHRQLQEYSQPHSLNVMGNSGAANAAATSMVTLQQRQIHKVRIQRQQHQAI

SEQ ID NO: 22618 - DNA, 2929 bp, DROSOPHILA
aggccttatgttgaaccggatttctcatgatgaattctaatttcagattgagctgggaaccatcccgctgcccaagtcctccaatcccaagcgcattgaggagaacttcaatgtcttcgatttcaagctggatgctgaagatcatgccatcttggactcgtatcacaatggagaacgtgttgcccatgcccgacaagccatcaagagtaaatactatcccttcaacgtgtatagtgcttgtttttgatacaacaaatatatttaagttattatgattaataaataaatagtaacccttgtaagggaatgcccaaaagcaagaagatttctaacgtcatttacaatcggtaagtatttttcgtaagtgttttgtatatgtcttttttggccttatcatcacaagtacttcccattgatattcacatggattggttaataaatcaaacagcgcggcacttttttgttccagtcattcagttttttcttagagaatgtatatatttcttaatgcaaaaatttaaaaactgatatacttttacaacaaaagtgaaaacttttatttttgattgtatttaaatcgaagttgtacccgtatcataatgcacaatagaacagataatagaaaatagggtagcggatccattatgaaagtcaagttctcgataagaaaaatataagaagtcgattgttttacccagctagctgtgaaaataggaaataatatgtttgtattaaaatctaccaatgtaaataacattaaaagctttttctctgctgcatttaaaataaaattgaaatgatcaatgtcatgaatagaaaaatgttacagcgaatattttaaatttcaatctcgcggtattttgtaacgcattacagtatatttgctggctgtaagaaatatcgatagagcggttgccgaacaatatcgataagtatttatttactcttccaaatattgtgtgatatttttatgtgcgcacatccataacaaatatccttgcaaatcgccgggaacacgacgaattgcaggtaaacaagatgccagcagtacgtggacattacagcagcgaagattacgtggagcagcaacagcaggaggagtaagtgcacacagcggaagcaagtaaatccgtccaattgccgaaaaccagagcgtagccagccggaaaagtagagcagactctcccagaaatcgatgccccactgccacacaatggtctatatgcgaattgtgctaacaaccttggtgaccattacgtgtctgctgggggacaactttgtggagctgacccagcatccattgctgaaggccctggccgacaatgccacccatgcggccattggagcactcacgggaatcacgttcgccacacaattctacgagcgcacctcgcagttgttcggctggatattgattttcacctgcttcgttgtgtcatcgttcattgacttggaccactttgtggaggctcgttccctttatttggaggtgagttgcagtaaccagacgaaaaacgaactaaccaagttcccacaactcgcacgcaggatgccaccaatctgtcgaagaggcccttcctccactgctccagcattatagtggttatgctgctgttctacatgtgcaccgcctgtttgaactatttccggaccagcctaatgctgggatccctactctgtgccttcatcacacaccacaccagggacgccgtgcggcggggctactggctgtgcccgctaggtcacacggacaggatgccccagctagcctacatattgaccaccatcctgacgccccatctgctgggctgcctgcacaacgtgtgccgcagcgcaaccgtgcttaacttcctggggcagtacgtcaagctaagcgagggccaataccgcagcggctccactgccaactatcgctacatgcaggtctaggctatatgtaggaacactttgtgataatattgcaaaacatcatcaaatggtaaatgcaaattgcttttcaagcttcaagcgctttaagattagagatcgcctagaaacccaaatacttcctcgcaacaggacacaattttacacggatctactactagaagtacctttttgagggaactatgcttcccgtccaattgatttttctttgttaagtagcgtgtaggtttttactagcatctaactagaatacagataatatccggatatgtgatatgtagtccttagacaaactagagtaacgagcatagcgcacaacgatatctaatcgattttcaacttcaactctgactcttgtaactagtaggccatacgaattttaagctaatcgaataataaaatcaatctaattgccttacaacatcagccttgcaatcacaattaatcccattggcttacttggcccacctttattttattcgctgtttatttgtgggccaaattagttgccgtttacaaattggccctaatggctggcatggctgcgaaggaatcccgtcataaatcgacttttctgcttattttaccgattcgtttgggctatttttaaacgaatttaattttaaatgttcgccattataaataaatcacaatttcgatcgaaaaagttcgcaaggaaccaataaaaaacattggtttttcgaaattttcctacgcttttcggcggaaaatcgctgtgtttgcgggtcaataattgggtaattaaagttacacgtgcgatcagacagtgaaaatattctagggtattgtcggtaccagaatttcccacgcatgcccattaacagcggcacgaacaacaataacaataacagcggctgaatccgttggcaacacccacgacccaacatttgtttgacatacactgaaagaaaaaactgatttattgcgaaataatgatctaaggcgtacatgaattatatattggaactaatattttcataaa

SEQ ID NO: 22619 - DNA, 870 bp, DROSOPHILA
caaatcgccgggaacacgacgaattgcaggtaaacaagatgccagcagtacgtggacattacagcagcgaagattacgtggagcagcaacagcaggaggagtaagtgcacacagcggaagcaagtaaatccgtccaattgccgaaaaccagagcgtagccagccggaaaagtagagcagactctcccagaaatcgatgccccactgccacacaatggtctatatgcgaattgtgctaacaaccttggtgaccattacgtgtctgctgggggacaactttgtggagctgacccagcatccattgctgaaggccctggccgacaatgccacccatgcggccattggagcactcacgggaatcacgttcgccacacaattctacgagcgcacctcgcagttgttcggctggatattgattttcacctgcttcgttgtgtcatcgttcattgacttggaccactttgtggaggctcgttccctttatttggaggatgccaccaatctgtcgaagaggcccttcctccactgctccagcattatagtggttatgctgctgttctacatgtgcaccgcctgtttgaactatttccggaccagcctaatgctgggatccctactctgtgccttcatcacacaccacaccagggacgccgtgcggcggggctactggctgtgcccgctaggtcacacggacaggatgccccagctagcctacatattgaccaccatcctgacgccccatctgctgggctgcctgcacaacgtgtgccgcagcgcaaccgtgcttaacttcctggggcagtacgtcaagctaagcgagggccaataccgcagcggctccactgccaactatcgctacatgcaggtctag

SEQ ID NO: 22620 - protein, 224 aa, DROSOPHILA
MPHCHTMVYMRIVLTTLVTITCLLGDNFVELTQHPLLKALADNATHAAIGALTGITFATQFYERTSQLFGWILIFTCFVVSSFIDLDHFVEARSLYLEDATNLSKRPFLHCSSIIVVMLLFYMCTACLNYFRTSLMLGSLLCAFITHHTRDAVRRGYWLCPLGHTDRMPQLAYILTTILTPHLLGCLHNVCRSATVLNFLGQYVKLSEGQYRSGSTANYRYMQV

SEQ ID NO: 22621 - DNA, 9089 bp, DROSOPHILA
gatacattttggtgacgctttatcctcgcgcagtttatcctgatagcaaccagtctggtgctgagtgcctatgcccaggacgcggcggattctgacctggagcaggtggcatccgcatcggcaccggatgcggtggccgtggaggatcaggtgagcgccgccagcagctatgccccgctgcaggataagaagcaggagaagcgctatgttggtggatacggtggctacggagcgggctacggcgcgggatacggcggctatggcgccggatatggcgcaggatacggcggctatgcctctggcctgggagccggctatggaggagcgtacggcagtggcgtcggcgttggcgtggacagctactacaatccgtacagctcgcgagctctgggtggattaggtgagggtgagcttgaaagaagactctcaatctcttgccgaagactcgtagtataccaacgctgtttctcaatccccagatggtgctgcagtggccggatacggaggctatggatccactctgggcggctatggatccgctttgggtggctatggatccgctcttggtggctatggatcgggacttagtggttatggtggctcctacaactcgaatccatacgccctgtcatactacaacagcaggctgggcgctggagccggcactgggtatccgtactacaacacccgattcggcgctggtggctatccatccagttactatacgagcaactatggcaacagcgtggtgggcggcggcttgggcgctttgggcggagtgccgcccatcggatcgggctataactacggttccggaatctcgggaaccgtctactagacaccgcacggtccaacgttcaagatctaagctagtggaatttattttttttcatcgatatatttttttctaactttatttttattaaaagatgctacaaaaaaatacattatcataatcgtcatttaactagaaagtatatatttatatatgcatgtaatctcattggggcgatggatatgcgccatgcttgtccttgatcacccagaaggagtcgacaatggcgccgttctggtcatcggacacctgctcgaagtgaagatgcgtgccattatgtgccttcaagcgggtgtatccgtaatcctaaagagattatagaattatagtattccgttttgatattaagcaggtcattcaattacattgctatggtaggcattccagatgggcaaatcgttggagaagggctcgcgctcctccttgcagccggcggaacccgtgatgatctggatgggcgccttgggattagtgtatggcgcctcggcactgccattgtacaccttgtagtcgtagattggccacaggcgagtgtagaagtgttcatgcgcaaagatctccacgtcgacgccgtgcttgtagaacagatcctccaggccgaaccacttgagcatgggcagaccctggcgaatgtacgtctccagttggctattgcaatcgtactccttgtcgtcgctgcagtacatcggtcgatgaccgtaggtgatgatccacggacgtttggcccgattctcgggcagattggcctcggccaggtcacgttccagccactcgaattgcttggtcagcaacttgaagccatagctgaggaagtagtagacctccgtggagaaggagacaaagtgcacgggtcccaagttgaagctgtaccacaagctgtccgtttcgccgggcatattgaagcgggcgcgatagttggagaagttgctgtgatgggccaaagtaagttaggtttgaatagttaacacaccggcatcatcaaatacttactacttctcctcgtgattgcccggacaaaccatgtagggcacataggcagccaccgactcgatctggcgcatgaatgcatcacccacggcagcgttggaggtgtccatgtcgtaggcaaagtcacccacatggatgatggcatcgtacatgcctcgctcagtgtcctgctgtagtcggcccatcgactgggcattctcgttgcccatgtcaccgaaaatggccaacgagggcgaccacttctcacccgccggtggcgtcttgaaattgaacaccgccgaccaaccgagcggactgccgcagctgtactcgtaccgcgtgtccggctccagatccttcagttccacattgtgtatgtactgagtgcgagccttctttccaccatcgacgaatcgctgccaggtgccgttcaccattatcggctcgtcttttagatagttccgcgagaatttaaccaccgaggcgttgggggaacttcgagtcgaccatgtcaccacaatatcacgaagattgtctacaacaaagttcattagctgggattattctcacttttaaagacccaatttatatttaaaaccatctcgttttaaaaacagtttcccctcgaatttcgtacttaagactatagaatcagtaggccacaatcattgccactcatacatagttgttttatttgagcgtataactgtaattacatttcattaaaatatatatgtttagaaggaggatagtttcttggtccgattgctgcgaatataaatcattcgaatttgtgcccgaatttaaaatactttagtatatgacgacataaaatatcacaaagtttttgagttgagatcagactggtacggtccatgcttgtccttgaccacccagaaactatcgatgacctcgcccttcttgtcatcggacacctgctcgaaatgtagatgggtgccgttgtgggccttcagtcgaagatacccaaagtcctggctgtggaaggcactccacggaggcatgcgcttgaagaatggctccctgccctcgtgattgccggcagctcccgaaatgatgtgtattggtgcaccgggattcacatacggctcggccagcgatccattgaacacggtgtagttgtacatgggccacatccgctcgtagcagtgctcgtgtgcccacaattcaatatctacgccgtactgataaaagagtggctccagcccgaagaaatccagcatgggcagaccctttcgaacgattgtctcatgattggcacagtcatctccgttgtcattgctgcagtacatgggccgatggccgtatgtgataatccagggacgcttcttccggttttctggcttgttggcctcgatcaaatcccgctccagccagtcgtactgcatcacgatctgcttgatcccgaacttagtgaaataatagacttctgtgctaaaaccgatgaagtgcaccggtccaagatcgaagctatagaacatgttatccgatccacccggcatgctgaaccgattgatgtagtgcgaaaagttgctatgggttgaaagggaaaagtccttatatcagtcatcatcattatcatcatcgcaattggcttgtggtgtagcacttactacttctcctcgtggttgcccacgcacaccatatatggtaagtaggcggctatggtctccacctggcgcataaactcgtcgccgacctctccgttttcccagtccatgtcgtaggcgaagtctcccacatggatgatggcgtcgtactggccgctctgcgtttcacgctgcagcgctggaagggatgccgcattcaccacgcccatatcgccgtagatcgccaacgagggcgaccagtcggcgtgatcgaatcgcgtccgaaaccaataggtggcggaccagcccaactcactgccacagtggtagagataggtgctattcggtttcaggtgggacagcgtcacctgcattcggatgggttcatggattagatgccttcgtttgcgactcttgctgcgtcgttactcacacgatgtatatactgggtggcctttttggctccaccatccacgaatttcgtgggcatttgcgtcgccttcactcgctgatgcagtccatcgatgccgaactcacagattgattcgttggtgttgtcgcgcgtgttccaggtgacgacaatgtcgagcacggtttctgcacaagcacactgattaactaggagcttaacactgagcatgtcacatatttacaacacttgtctacaagatgaagtcaactattaatggattcactcacaaaccatttgattgatcgttgaattctcaattgagttgttcccagttttatgatattgaattgttttatcccaaaacaataagcacaatgaaaagttcaagacatttattgtaaagatactaggcatttaaacaacaatcagtgtacaatcggattgccgtgactataataaacccggtaatcggatttcatgtacttattgataataaaaaccgatcgggtgcatatccattagtcctttaacattgatcctaataagtatatcaagtacatcccatacacattaaaaacaatttgcttaagacagcagttaccgagtaccagtttttgaacatcaagtaacatgcgacagagataagaaactaagttcatttacgttcttatcagcttatgttaaatgcacacttaaaagcgcttgcatatgtgtaaatgctgcgtttgttaaattggctaagtataaaactgtagtttgtttcgggctgggttgagatatttggataaggaatgtgccacgcttattgctatagtttgtgatcgaatcaggtcgaggcgaatgtgcgctactaatactgcctgttgctattgatgcgtgtaatgcctcgagagactcctttagcttgaattgattcggctcaggttatggttcagattgggaatgactatttagtttcggtagcttccatgcttggatttcaccaaccaaaagtcatcgatgatggcgccgttcttgtcgtcggacacctgctcgaaatggatatgtgttcgattgtgagccttgagccgtgtgtaaccatagtcctggctgtgaaaagcgctccattcgggtattttgcccttgaatggttctcttccctccttgcagccggcggatcctgtgacgatgtgcacaggggcactaggatcattgtacggcgaatccttcagcgttccattgcgcaccttgtaatcgtaaatgggccagagtctctcgtaggagtgctcgtgcgcccaaatggccacgtccacgccgaactcgtaaagcagcggctccaatccgaacatgtgtacaaatggccagcccacccgcgtgagagtctctgagtgggtgcagtcattgtcgttctcgttgctgcagtacatgggtcgatgaccgtacaagatgatccacggacgcttgttccgattctctggcagattggccttggccagatcctcacgcaaccattcgaactggaataccagcggctttaaaccatagttgagaaagtagtagacctccgtgctaatgcccacgaagtgcacgggtcccagatcgaagctgtagaacatgttctccgtacctcccggcatactgaagcgggcacgatagttcgagaagttgctgcaacaccaacaattagatcctgcttctaccaaaaaacactctactctctgctctactagctactcacaacttctcctcgtgattgccgggaaccaccatgtatggcaggtaggcagccaccgtttcgatctgccgcataaactcatcccccacgcgagcattcttcgtgttcatgtcgtaggcgaagtcacccacatggatgatggcatcgtacatgccgcgctgcgtctcctgctgcaatcgggccagggattgggcattctcattgcccatatccccgtagatagccagcgatggcgaccagtcaacggatgccgagggcactgtgcgaaactggaagatggccgaccagccaaaatcgctaccgcaatggtaagagtatgtggcatttggctccaggtccctaagcgtcacctaagcaaagtaaacaataagtttttctctctctttctggtacatcaactgcgatgtcaaggtggatcgattgattgttaagagatggagtgcaagcagtcctggctcattggttcttaatttggttctaagagccggattcaaggttgcattcctcttacattctcacatcaatctacttgaatcgtttgatcggttgcatactctatgcataccctgtggatgaactgcgtggcctgcttgtgaccgccgtccacgaatttagtagcctttccccgggcctgttgggtgagcctgacctgtccgtctaccagttgaccgtactccaccacgctgaccgcacccacttcctgatccggcggcaggctgcgcgtggaccaagtgacgactatctcgctatcggtgcgttctgcttcagaggacaagcggatatcgagaaacggggaagagtaaaagaaaaacaaacttgagcaatttcgttggtccaatgttggtacgtttcaaatgaaaggaaaacaaacaattagcccccatccggcatctaatatcatttagatttggcattaatactgattactaaacatgaaaatgtatagatttatagtataatataaacaatgaactcgaattccagatttgccacgataatgattcgcataattaaagttgattgaaacaagtgctacttggttactttaatgaataacttcaatcccattagcatcgcttgtgccaaattgaatttgaatctgtaacgggtgcagggtcgtccagtcattcatgaccaaatgttattgtccaataaaaccctgatatttttgctttgcagcgacgctccattgtttgcttcatccttatcgccaacccaacagaaactagaaactagaacacaaagccaaatggccggtgggatgacgatcgaccgtatcggcaaatatgaggccccacagggagccaaagtctatcaatctttgggttgcatttcagggttttgaagtttgcaatgcccgcgttgtcgtagacaacagtggaaccccaatatggcggaataatgctattttttttgggggggaatcacctgattacaaaaaagactggccgagcggctgacgtttttaatcttgttcagtttttcgccaatcgcactacacagcgattaattttagcattgtgcacgaacacattcacagtggcatacttaaattgtttgttaatgtttttgtgtttgacctgccacctcatcaggccttaaataagcttgaatttattgctgcttccaaaaattcggaattagatgttatcagttttggagttttatgggactttcgattattaatataaagctatatttatacaatatttggggaaaccttaggtattaccttgttgtaatttgtaggctgtaactaacgatcgtatagatattaactacaattaaatataactatgcattgcgcccgttattgtgggtgcatttgcatttgttcatcccatttataggggcgacgacactgataatcattttatgtagcaaatgattctgggcgggattggaaagcaagtattgatatcactcgataagtgcctctggaattgcgtactatacgatcaatgtttttcaaaaccatatgtgataatacacataaaggaaaatgtaagtacaatgtaaggtaatgtaaataaaataaactttcctacgtgatagatttgtaatattagaaacttatatgccaagctatcatttttctcccagtgtattctaacactaatgcaacgctgcaggtgagcaatttacataatgcgaaaagtaaagaagatcgcactcacctccaaaggacagatgcacttgctccggctgatagtgaacaatgtcgacgtcctggtcgatgggagtgctcctaatccccggaagaagcagcaccagcaggagcagcgacgctagcagagcgaattgcagtctctgcatttttaccgttttgtatttacttgtgtttgttgttgcacagtaacgcagtcagcaaaaacattgccaaatcacaattgcgtcgttgtcaaagtggggacacttggctcggggagtcgttggagttaaacgggggaatcgacaaattcgcttgcgggaacaacaaaaaatgagcactaatatggaaatatccagcaatttataagcgcagccacaacaaaaacaatccgggtgcagtgtgaccttggccgccgaacagcaaatgccagtggtaacgattgcacgctggcgacaactatcgatagaaagcgataagtgagcgcgcgatttgaacttgatacgtaaataaattacgtgaaaatgacaaatttatctaaagctgtttgaataaaaatgaaatagcgtttcaaattcaaaacagctcaattggttattctattgttaatacatttcgaccaattactcaatttcaattaaatcaatcaattagaaatgtacgcattattgcagaatatctttattatataacagcatatgaaatgttttggggaatgaagtccctctaagagctaaatgaaactacacacaattcgagatcctttgtcggtcccaattgaatgcttgaaaacatgcggatcgttttgttcatataagcgccttcttagcaataaacatagaagaatatatatatagatatatagattagggtatatgggtataaatacaggataacaatagagagagagagatagagagatagttttaacaatacatacaactaggataactggatatacgtatgtaaataggtttaaggataacattagcataacaactaaggacttttggcagccttatcgactttgtggcatacatgctgtgaaattggcaaagcaattccgctggacgtggaaatacatatgtatacgatacaggtaatacatctttcggacaaggaaacctaactacttctcggcgggggcaccactcgatcccgtggccgctgcactgggcatgctgctcttgcgctgtgcttgcgagatctgcacgatcctcgagagcggcgagtgggtgctgctggtgctgggtctcgttccggcgggcaagggcagcagccgttgagcggacgttccgccagactcgtcgatggcccccgctggcaaggcgcttccacttcctccgggcggcgacgtgggcgacagttcgcgggccagtggcgagggtcgcagcgagaggcgtcgc

SEQ ID NO: 22622 - DNA, 1592 bp, DROSOPHILA
tcacactgcacccggattgtttttgttgtggctgcgcttataaattgctggatatttccatattagtgctcattttttgttgttcccgcaagcgaatttgtcgattcccccgtttaactccaacgactccccgagccaagtgtccccactttgacaacgacgcaattgtgatttggcaatgtttttgctgactgcgttactgtgcaacaacaaacacaagtaaatacaaaacggtaaaaatgcagagactgcaattcgctctgctagcgtcgctgctcctgctggtgctgcttcttccggggattaggagcactcccatcgaccaggacgtcgacattgttcactatcagccggagcaagtgcatctgtcctttggagacaatcttcgtgatattgtggtgacatggtcgactcgaagttcccccaacgcctcggtggttaaattctcgcggaactatctaaaagacgagccgataatggtgaacggcacctggcagcgattcgtcgatggtggaaagaaggctcgcactcagtacatacacaatgtggaactgaaggatctggagccggacacgcggtacgagtacagctgcggcagtccgctcggttggtcggcggtgttcaatttcaagacgccaccggcgggtgagaagtggtcgccctcgttggccattttcggtgacatgggcaacgagaatgcccagtcgatgggccgactacagcaggacactgagcgaggcatgtacgatgccatcatccatgtgggtgactttgcctacgacatggacacctccaacgctgccgtgggtgatgcattcatgcgccagatcgagtcggtggctgcctatgtgccctacatggtttgtccgggcaatcacgaggagaagtacaacttctccaactatcgcgcccgcttcaatatgcccggcgaaacggacagcttgtggtacagcttcaacttgggacccgtgcactttgtctccttctccacggaggtctactacttcctcagctatggcttcaagttgctgaccaagcaattcgagtggctggaacgtgacctggccgaggccaatctgcccgagaatcgggccaaacgtccgtggatcatcacctacggtcatcgaccgatgtactgcagcgacgacaaggagtacgattgcaatagccaactggagacgtacattcgccagggtctgcccatgctcaagtggttcggcctggaggatctgttctacaagcacggcgtcgacgtggagatctttgcgcatgaacacttctacactcgcctgtggccaatctacgactacaaggtgtacaatggcagtgccgaggcgccatacactaatcccaaggcgcccatccagatcatcacgggttccgccggctgcaaggaggagcgcgagcccttctccaacgatttgcccatctggaatgcctaccatagcaatgattacggatacacccgcttgaaggcacataatggcacgcatcttcacttcgagcaggtgtccgatgaccagaacggcgccattgtcgactccttctgggtgatcaaggacaagcatggcgcatatccatcgccccaatga

SEQ ID NO: 22623 - protein, 450 aa, DROSOPHILA
MQRLQFALLASLLLLVLLLPGIRSTPIDQDVDIVHYQPEQVHLSFGDNLRDIVVTWSTRSSPNASVVKFSRNYLKDEPIMVNGTWQRFVDGGKKARTQYIHNVELKDLEPDTRYEYSCGSPLGWSAVFNFKTPPAGEKWSPSLAIFGDMGNENAQSMGRLQQDTERGMYDAIIHVGDFAYDMDTSNAAVGDAFMRQIESVAAYVPYMVCPGNHEEKYNFSNYRARFNMPGETDSLWYSFNLGPVHFVSFSTEVYYFLSYGFKLLTKQFEWLERDLAEANLPENRAKRPWIITYGHRPMYCSDDKEYDCNSQLETYIRQGLPMLKWFGLEDLFYKHGVDVEIFAHEHFYTRLWPIYDYKVYNGSAEAPYTNPKAPIQIITGSAGCKEEREPFSNDLPIWNAYHSNDYGYTRLKAHNGTHLHFEQVSDDQNGAIVDSFWVIKDKHGAYPSPQ

SEQ ID NO: 22624 - DNA, 5323 bp, DROSOPHILA
cgtcacctgcattcggatgggttcatggattagatgccttcgtttgcgactcttgctgcgtcgttactcacacgatgtatatactgggtggcctttttggctccaccatccacgaatttcgtgggcatttgcgtcgccttcactcgctgatgcagtccatcgatgccgaactcacagattgattcgttggtgttgtcgcgcgtgttccaggtgacgacaatgtcgagcacggtttctgcacaagcacactgattaactaggagcttaacactgagcatgtcacatatttacaacacttgtctacaagatgaagtcaactattaatggattcactcacaaaccatttgattgatcgttgaattctcaattgagttgttcccagttttatgatattgaattgttttatcccaaaacaataagcacaatgaaaagttcaagacatttattgtaaagatactaggcatttaaacaacaatcagtgtacaatcggattgccgtgactataataaacccggtaatcggatttcatgtacttattgataataaaaaccgatcgggtgcatatccattagtcctttaacattgatcctaataagtatatcaagtacatcccatacacattaaaaacaatttgcttaagacagcagttaccgagtaccagtttttgaacatcaagtaacatgcgacagagataagaaactaagttcatttacgttcttatcagcttatgttaaatgcacacttaaaagcgcttgcatatgtgtaaatgctgcgtttgttaaattggctaagtataaaactgtagtttgtttcgggctgggttgagatatttggataaggaatgtgccacgcttattgctatagtttgtgatcgaatcaggtcgaggcgaatgtgcgctactaatactgcctgttgctattgatgcgtgtaatgcctcgagagactcctttagcttgaattgattcggctcaggttatggttcagattgggaatgactatttagtttcggtagcttccatgcttggatttcaccaaccaaaagtcatcgatgatggcgccgttcttgtcgtcggacacctgctcgaaatggatatgtgttcgattgtgagccttgagccgtgtgtaaccatagtcctggctgtgaaaagcgctccattcgggtattttgcccttgaatggttctcttccctccttgcagccggcggatcctgtgacgatgtgcacaggggcactaggatcattgtacggcgaatccttcagcgttccattgcgcaccttgtaatcgtaaatgggccagagtctctcgtaggagtgctcgtgcgcccaaatggccacgtccacgccgaactcgtaaagcagcggctccaatccgaacatgtgtacaaatggccagcccacccgcgtgagagtctctgagtgggtgcagtcattgtcgttctcgttgctgcagtacatgggtcgatgaccgtacaagatgatccacggacgcttgttccgattctctggcagattggccttggccagatcctcacgcaaccattcgaactggaataccagcggctttaaaccatagttgagaaagtagtagacctccgtgctaatgcccacgaagtgcacgggtcccagatcgaagctgtagaacatgttctccgtacctcccggcatactgaagcgggcacgatagttcgagaagttgctgcaacaccaacaattagatcctgcttctaccaaaaaacactctactctctgctctactagctactcacaacttctcctcgtgattgccgggaaccaccatgtatggcaggtaggcagccaccgtttcgatctgccgcataaactcatcccccacgcgagcattcttcgtgttcatgtcgtaggcgaagtcacccacatggatgatggcatcgtacatgccgcgctgcgtctcctgctgcaatcgggccagggattgggcattctcattgcccatatccccgtagatagccagcgatggcgaccagtcaacggatgccgagggcactgtgcgaaactggaagatggccgaccagccaaaatcgctaccgcaatggtaagagtatgtggcatttggctccaggtccctaagcgtcacctaagcaaagtaaacaataagtttttctctctctttctggtacatcaactgcgatgtcaaggtggatcgattgattgttaagagatggagtgcaagcagtcctggctcattggttcttaatttggttctaagagccggattcaaggttgcattcctcttacattctcacatcaatctacttgaatcgtttgatcggttgcatactctatgcataccctgtggatgaactgcgtggcctgcttgtgaccgccgtccacgaatttagtagcctttccccgggcctgttgggtgagcctgacctgtccgtctaccagttgaccgtactccaccacgctgaccgcacccacttcctgatccggcggcaggctgcgcgtggaccaagtgacgactatctcgctatcggtgcgttctgcttcagaggacaagcggatatcgagaaacggggaagagtaaaagaaaaacaaacttgagcaatttcgttggtccaatgttggtacgtttcaaatgaaaggaaaacaaacaattagcccccatccggcatctaatatcatttagatttggcattaatactgattactaaacatgaaaatgtatagatttatagtataatataaacaatgaactcgaattccagatttgccacgataatgattcgcataattaaagttgattgaaacaagtgctacttggttactttaatgaataacttcaatcccattagcatcgcttgtgccaaattgaatttgaatctgtaacgggtgcagggtcgtccagtcattcatgaccaaatgttattgtccaataaaaccctgatatttttgctttgcagcgacgctccattgtttgcttcatccttatcgccaacccaacagaaactagaaactagaacacaaagccaaatggccggtgggatgacgatcgaccgtatcggcaaatatgaggccccacagggagccaaagtctatcaatctttgggttgcatttcagggttttgaagtttgcaatgcccgcgttgtcgtagacaacagtggaaccccaatatggcggaataatgctattttttttgggggggaatcacctgattacaaaaaagactggccgagcggctgacgtttttaatcttgttcagtttttcgccaatcgcactacacagcgattaattttagcattgtgcacgaacacattcacagtggcatacttaaattgtttgttaatgtttttgtgtttgacctgccacctcatcaggccttaaataagcttgaatttattgctgcttccaaaaattcggaattagatgttatcagttttggagttttatgggactttcgattattaatataaagctatatttatacaatatttggggaaaccttaggtattaccttgttgtaatttgtaggctgtaactaacgatcgtatagatattaactacaattaaatataactatgcattgcgcccgttattgtgggtgcatttgcatttgttcatcccatttataggggcgacgacactgataatcattttatgtagcaaatgattctgggcgggattggaaagcaagtattgatatcactcgataagtgcctctggaattgcgtactatacgatcaatgtttttcaaaaccatatgtgataatacacataaaggaaaatgtaagtacaatgtaaggtaatgtaaataaaataaactttcctacgtgatagatttgtaatattagaaacttatatgccaagctatcatttttctcccagtgtattctaacactaatgcaacgctgcaggtgagcaatttacataatgcgaaaagtaaagaagatcgcactcacctccaaaggacagatgcacttgctccggctgatagtgaacaatgtcgacgtcctggtcgatgggagtgctcctaatccccggaagaagcagcaccagcaggagcagcgacgctagcagagcgaattgcagtctctgcatttttaccgttttgtatttacttgtgtttgttgttgcacagtaacgcagtcagcaaaaacattgccaaatcacaattgcgtcgttgtcaaagtggggacacttggctcggggagtcgttggagttaaacgggggaatcgacaaattcgcttgcgggaacaacaaaaaatgagcactaatatggaaatatccagcaatttataagcgcagccacaacaaaaacaatccgggtgcagtgtgaccttggccgccgaacagcaaatgccagtggtaacgattgcacgctggcgacaactatcgatagaaagcgataagtgagcgcgcgatttgaacttgatacgtaaataaattacgtgaaaatgacaaatttatctaaagctgtttgaataaaaatgaaatagcgtttcaaattcaaaacagctcaattggttattctattgttaatacatttcgaccaattactcaatttcaattaaatcaatcaattagaaatgtacgcattattgcagaatatctttattatataacagcatatgaaatgttttggggaatgaagtccctctaagagctaaatgaaactacacacaattcgagatcctttgtcggtcccaattgaatgcttgaaaacatgcggatcgttttgttcatataagcgccttcttagcaataaacatagaagaatatatatatagatatatagattagggtatatgggtataaatacaggataacaatagagagagagagatagagagatagttttaacaatacatacaactaggataactggatatacgtatgtaaataggtttaaggataacattagcataacaactaaggacttttggcagccttatcgactttgtggcatacatgctgtgaaattggcaaagcaattccgctggacgtggaaatacatatgtatacgatacaggtaatacatctttcggacaaggaaacctaactacttctcggcgggggcaccactcgatcccgtggccgctgcactgggcatgctgctcttgcgctgtgcttgcgagatctgcacgatcctcgagagcggcgagtgggtgctgctggtgctgggtctcgttccggcgggcaagggcagcagccgttgagcggacgttccgccagactcgtcgatggcccccgctggcaaggcgcttccacttcctccgggcggcgacgtgggcgacagttcgcgggccagtggcgagggtcgcagcgagaggcgtcgctgga

SEQ ID NO: 22625 - DNA, 1590 bp, DROSOPHILA
aaggtcacactgcacccggattgtttttgttgtggctgcgcttataaattgctggatatttccatattagtgctcattttttgttgttcccgcaagcgaatttgtcgattcccccgtttaactccaacgactccccgagccaagtgtccccactttgacaacgacgcaattgtgatttggcaatgtttttgctgactgcgttactgtgcaacaacaaacacaagtaaatacaaaacggtaaaaatgcagagactgcaattcgctctgctagcgtcgctgctcctgctggtgctgcttcttccggggattaggagcactcccatcgaccaggacgtcgacattgttcactatcagccggagcaagtgcatctgtcctttggagaacgcaccgatagcgagatagtcgtcacttggtccacgcgcagcctgccgccggatcaggaagtgggtgcggtcagcgtggtggagtacggtcaactggtagacggacaggtcaggctcacccaacaggcccggggaaaggctactaaattcgtggacggcggtcacaagcaggccacgcagttcatccacagggtgacgcttagggacctggagccaaatgccacatactcttaccattgcggtagcgattttggctggtcggccatcttccagtttcgcacagtgccctcggcatccgttgactggtcgccatcgctggctatctacggggatatgggcaatgagaatgcccaatccctggcccgattgcagcaggagacgcagcgcggcatgtacgatgccatcatccatgtgggtgacttcgcctacgacatgaacacgaagaatgctcgcgtgggggatgagtttatgcggcagatcgaaacggtggctgcctacctgccatacatggtggttcccggcaatcacgaggagaagtttatgccgggaggtacggagaacatgttctacagcttcgatctgggacccgtgcacttcgtgggcattagcacggaggtctactactttctcaactatggtttaaagccgctggtattccagttcgaatggttgcgtgaggatctggccaaggccaatctgccagagaatcggaacaagcgtccgtggatcatcttgtacggtcatcgacccatgtactgcagcaacgagaacgacaatgactgcacccactcagagactctcacgcgggtgggctggccatttgtacacatgttcggattggagccgctgctttacgagttcggcgtggacgtggccatttgggcgcacgagcactcctacgagagactctggcccatttacgattacaaggtgcgcaatggaacgctgaaggattcgccgtacaatgatcctagtgcccctgtgcacatcgtcacaggatccgccggctgcaaggagggaagagaaccattcaagggcaaaatacccgaatggagcgcttttcacagccaggactatggttacacacggctcaaggctcacaatcgaacacatatccatttcgagcaggtgtccgacgacaagaacggcgccatcatcgatgacttttggttggtgaaatccaagcatggaagctaccgaaactaa

SEQ ID NO: 22626 - protein, 448 aa, DROSOPHILA
MQRLQFALLASLLLLVLLLPGIRSTPIDQDVDIVHYQPEQVHLSFGERTDSEIVVTWSTRSLPPDQEVGAVSVVEYGQLVDGQVRLTQQARGKATKFVDGGHKQATQFIHRVTLRDLEPNATYSYHCGSDFGWSAIFQFRTVPSASVDWSPSLAIYGDMGNENAQSLARLQQETQRGMYDAIIHVGDFAYDMNTKNARVGDEFMRQIETVAAYLPYMVVPGNHEEKFMPGGTENMFYSFDLGPVHFVGISTEVYYFLNYGLKPLVFQFEWLREDLAKANLPENRNKRPWIILYGHRPMYCSNENDNDCTHSETLTRVGWPFVHMFGLEPLLYEFGVDVAIWAHEHSYERLWPIYDYKVRNGTLKDSPYNDPSAPVHIVTGSAGCKEGREPFKGKIPEWSAFHSQDYGYTRLKAHNRTHIHFEQVSDDKNGAIIDDFWLVKSKHGSYRN

SEQ ID NO: 22627 - DNA, 4167 bp, DROSOPHILA
aaagtgctatgtaattcgttgtaatgatgcttaaaaaatgttcaataatgttcagcatgtaaatggcatctgactaatatgctgaataatttaaaatttatgccgaaggaagtccgcccttattgttaacatttgaataaagggtaaatgacagttctgccatatctgcggcaccatttttattctgtgatagccttcgaacgagcactaaaaacaatttatttatatttattcctggcttgttttgcaactgttagcttgtttcaatttatggcgaatttatgctttttatcggttggcctattaaacgcgccctgacagtccattcaaatcatgcacttaaagcccagattcaggttcagaatgaacttgcccccgatgcgggcaataaaaaatgtttatcaatcgctgccacaggcacgcctcgaatgctgcaatgcgaagccaaatttaaatgagccgcaaagcgaaaataaatgtttaaaaatatatatccctgccatgcacttgctgtaggtaactgcgtcaattaaaagcgggcagttaaaagtgcaatcaatgattatttcaaagtgtcgcgcacagccatggaaacttggaaattaatgctcgtggccaaaaagtccattaacataaatcgcttacagtcaacatattttatttaattctcttatggaattatacgatgatgcaatgaatattaaagtgtagtgttcttgtgtgttctgagattaaaatatgcggatatgcgatctagagcaagggaatctgtgcatattaattatttttccaggccaaacctttgtagccaatatggcaagtacatacgtagcgtgtcattgtcagaagtatttgtagttcacaaagcttattgttatttccaaagaaaaatatattttcagacggataacatacagaaaatctataattttgtctagtagcccaaaacaacgattatataactacaatagctacaatctattagctgcagtagtccctcctatgtccaaccgctggtcttctttgacagaatgaccttctgcatgtgctcatccgcggtgtgggtggtgtgacttccgcccgcgtgacgcggagtgcacttgaccatgggaacacccgaggctcctttagtccaggcactggtggagtgtgggaactcgtccttgcgatagtatcccatgatgcccgacttgcggatctggcccagttcgtaggtgacaatgggacccaggccggtggaacccttagcattgggcagcgagggcaccttggatcgctccacagttcgcattacacaggtggtgtcacaggccaagcaggccagatcctgcatgaccttcactcttccggcagctgcggcacaatcatcgttggtcatctccatgtacttctggagggcctcggctataatctgcacccgccgctcgatcatctcccggaagtccttgagacttagctccaatgcgtcgatgcccagtgtcattcgcagattgtcgatgatctgcaggacgttcttctcgttcaagctcacaatgtggcgcacctcgcagaacatctgctccaacctggccttgtactcctccagttgctccagggacactttagtggccaactgctggaagtcaaccttttcggccaacaaaagctccacctccgtcttgtcaatcttcacctcatccaaatgggatgccgatttctttaggacttgtatctggtatacgcagtcattgaggcgagtcatcatgccattggtagcctccttgttgctggccatgtagagcttaatatcccgcaccgtttccgagagatccttcatctggtccatcagtctctgggagtcctgtttcagcaaggctgcagcgagttcatttaccttgttggtcagagcacagaattgcgacttgaggtctagaagctcagtaagcattttctccggcgaatagcaaaggggctgttccaattcaagttcctcctcttcctcaggcttctccacctccgtgggcgcactagactccactgggacctcctcctctgacaggccctcctcttcgacaccgtccactatatccccactcgaccaactcacagaaacctcatcaccagtcgtcaccatcaggaccctcaactgcttggctatgtgacggagtaaccgaaacctctgcgggttcggcttgcgatcgatcaacaagtgggtcatattgttcacctgctccatcgtgatcttcagctggctggtgagattgctcacaaactgctgaacctccattgtggcctgttccttctgcagttcaatcttggagaggcgtctttcgagacgcaagagattattggtaagagatccgtccgtttgactgtgcgacttgtcgcgaccggaggatctcgaggagacccgtgaggcctgcggtgccagctcctctcccttggcctcggcaggcacatccattggtgcttttgaggtatctgcctcgggctcagaaggaggatgttcctcgggagccggagttgcagatggagttggttcatggttggaacccactggttctggagatggtgcggcagcctccgcaggagctgcttcttctgggactggctccgctggggcaggttcctctgcagcaggctctggagcaggttctggagcaggctctggtgctggatccgctgcgggaggctcttcgactggcgcagggggtgcctctgcctcctcggctgggggctctgccgccggctcggctgctgctccctcctcggcatccgcaccggcgaaaagacggaacttcgaggtgttacccaaggtcactatttagcaaaaacaaattctagtatcccaagtgcacttaacaggtgaacattcccacttacgtaaactgctttgcaagcgcacattggccaccatatagtcttcctgctcgacaacctcatcgaggacctccaatcgctgggcaaagcacgtgagcaggacatgcaaagcgtaaaagttaacgtgtcctgattccggggacccaatggcaacatctatgagttccttatacgtaaaagtcatttcgtgtaaaagtgctcgaatttagtggcagttcctgcgaaatatttgacaaatttttgagccacaaatgtaaagcaatatcgaaaatgcagagtaaaccaaatgtgaactgaaccgaacgagcttgttttgtgaattagaaaatgaattcaaagtcttgatggaaaattcacagccttgtttttcggaccagttactcaagggaatttaatgaaaaacatgactgatttctgtcaagctaagtgacgcaaaaaacaaaattaatatttaagggaaccattttcccatatctaatccattaggtcaactgttatagcagcattaggataaaccgaaattacttgaatattaaagataaatttgttattaattatattcgctcaaattgagttactcaactcccttaaactgcgcacaaacgatttaaattattcctcattgggtcggtgcgggtaaataaaaaatctgttttgctcgagctccgttttgtggctgcgtaaaatgctccacagctattagggcttaattaatttttacaccattttgtgtttaatattttcttccctggcagttattatgattgcgttcggttaatgaacatcatcaacaccattaagtttaattttatgaagcggcttcttcgcttttattttgatccagcagcaaccgagatgcaaaatgattgcagtgtgcgagtgaggatgatgcaattaagtggaatcgatgaaaagtgtctttcgagtcgttattgttcccaatccgattgagagacttggccattattaatgtttcaattagtatccgagtagccgagaacaaacggctttaaactaccaaagtctaagcacattggctacctttccaaggacaccagaaacccgcagactttgtgagataaccgggagtaaaatcccatttgtcatgctcgcaatgcaatcctctcgacttttgcgatgtgcggggcaatcggcggccctcaaattggatggtagtcaatgtttgtggcctcgtaaaatctaatttaaatgcaaacgcaaatgtcaaaattgtagaattaaaaatcacattcggtttgattcaggcagacagacgtaccagcatccagctcaactattgctcatggg

SEQ ID NO: 22628 - DNA, 622 bp, DROSOPHILA
gctcgttcggttcagttcacatttggtttactctgcattttcgatattgctttacatttgtggctcaaaaatttgtcaaatatttcgcaggaactgccactaaattcgagcacttttacacgaaatgacttttacgtataaggaactcatagatgttgccattgggtccccggaatcaggacacgttaacttttacgctttgcatgtcctgctcacgtgctttgcccagcgattggaggtcctcgatgaggttgtcgagcaggaagactatatggtggccaatgtgcgcttgcaaagcagtttactgaccttgggtaacacctcgaagttccgtcttttcgccggtgcggatgccgaggagggagcagcagccgagccggcggcagagcccccagccgaggaggcagaggcaccccctgcgccaatccgcaagtcgggcatcatgggatactatcgcaaggacgagttcccacactccaccagtgcctggactaaaggagcctcgggtgttcccatggtcaagtgcactccgcgtcacgcgggcggaagtcacaccacccacaccgcggatgagcacatgcagaaggtcattctgtcaaagaagaccagcggttggacatag

SEQ ID NO: 22629 - protein, 165 aa, DROSOPHILA
MTFTYKELIDVAIGSPESGHVNFYALHVLLTCFAQRLEVLDEVVEQEDYMVANVRLQSSLLTLGNTSKFRLFAGADAEEGAAAEPAAEPPAEEAEAPPAPIRKSGIMGYYRKDEFPHSTSAWTKGASGVPMVKCTPRHAGGSHTTHTADEHMQKVILSKKTSGWT

SEQ ID NO: 22630 - DNA, 4169 bp, DROSOPHILA
aaagtgctatgtaattcgttgtaatgatgcttaaaaaatgttcaataatgttcagcatgtaaatggcatctgactaatatgctgaataatttaaaatttatgccgaaggaagtccgcccttattgttaacatttgaataaagggtaaatgacagttctgccatatctgcggcaccatttttattctgtgatagccttcgaacgagcactaaaaacaatttatttatatttattcctggcttgttttgcaactgttagcttgtttcaatttatggcgaatttatgctttttatcggttggcctattaaacgcgccctgacagtccattcaaatcatgcacttaaagcccagattcaggttcagaatgaacttgcccccgatgcgggcaataaaaaatgtttatcaatcgctgccacaggcacgcctcgaatgctgcaatgcgaagccaaatttaaatgagccgcaaagcgaaaataaatgtttaaaaatatatatccctgccatgcacttgctgtaggtaactgcgtcaattaaaagcgggcagttaaaagtgcaatcaatgattatttcaaagtgtcgcgcacagccatggaaacttggaaattaatgctcgtggccaaaaagtccattaacataaatcgcttacagtcaacatattttatttaattctcttatggaattatacgatgatgcaatgaatattaaagtgtagtgttcttgtgtgttctgagattaaaatatgcggatatgcgatctagagcaagggaatctgtgcatattaattatttttccaggccaaacctttgtagccaatatggcaagtacatacgtagcgtgtcattgtcagaagtatttgtagttcacaaagcttattgttatttccaaagaaaaatatattttcagacggataacatacagaaaatctataattttgtctagtagcccaaaacaacgattatataactacaatagctacaatctattagctgcagtagtccctcctatgtccaaccgctggtcttctttgacagaatgaccttctgcatgtgctcatccgcggtgtgggtggtgtgacttccgcccgcgtgacgcggagtgcacttgaccatgggaacacccgaggctcctttagtccaggcactggtggagtgtgggaactcgtccttgcgatagtatcccatgatgcccgacttgcggatctggcccagttcgtaggtgacaatgggacccaggccggtggaacccttagcattgggcagcgagggcaccttggatcgctccacagttcgcattacacaggtggtgtcacaggccaagcaggccagatcctgcatgaccttcactcttccggcagctgcggcacaatcatcgttggtcatctccatgtacttctggagggcctcggctataatctgcacccgccgctcgatcatctcccggaagtccttgagacttagctccaatgcgtcgatgcccagtgtcattcgcagattgtcgatgatctgcaggacgttcttctcgttcaagctcacaatgtggcgcacctcgcagaacatctgctccaacctggccttgtactcctccagttgctccagggacactttagtggccaactgctggaagtcaaccttttcggccaacaaaagctccacctccgtcttgtcaatcttcacctcatccaaatgggatgccgatttctttaggacttgtatctggtatacgcagtcattgaggcgagtcatcatgccattggtagcctccttgttgctggccatgtagagcttaatatcccgcaccgtttccgagagatccttcatctggtccatcagtctctgggagtcctgtttcagcaaggctgcagcgagttcatttaccttgttggtcagagcacagaattgcgacttgaggtctagaagctcagtaagcattttctccggcgaatagcaaaggggctgttccaattcaagttcctcctcttcctcaggcttctccacctccgtgggcgcactagactccactgggacctcctcctctgacaggccctcctcttcgacaccgtccactatatccccactcgaccaactcacagaaacctcatcaccagtcgtcaccatcaggaccctcaactgcttggctatgtgacggagtaaccgaaacctctgcgggttcggcttgcgatcgatcaacaagtgggtcatattgttcacctgctccatcgtgatcttcagctggctggtgagattgctcacaaactgctgaacctccattgtggcctgttccttctgcagttcaatcttggagaggcgtctttcgagacgcaagagattattggtaagagatccgtccgtttgactgtgcgacttgtcgcgaccggaggatctcgaggagacccgtgaggcctgcggtgccagctcctctcccttggcctcggcaggcacatccattggtgcttttgaggtatctgcctcgggctcagaaggaggatgttcctcgggagccggagttgcagatggagttggttcatggttggaacccactggttctggagatggtgcggcagcctccgcaggagctgcttcttctgggactggctccgctggggcaggttcctctgcagcaggctctggagcaggttctggagcaggctctggtgctggatccgctgcgggaggctcttcgactggcgcagggggtgcctctgcctcctcggctgggggctctgccgccggctcggctgctgctccctcctcggcatccgcaccggcgaaaagacggaacttcgaggtgttacccaaggtcactatttagcaaaaacaaattctagtatcccaagtgcacttaacaggtgaacattcccacttacgtaaactgctttgcaagcgcacattggccaccatatagtcttcctgctcgacaacctcatcgaggacctccaatcgctgggcaaagcacgtgagcaggacatgcaaagcgtaaaagttaacgtgtcctgattccggggacccaatggcaacatctatgagttccttatacgtaaaagtcatttcgtgtaaaagtgctcgaatttagtggcagttcctgcgaaatatttgacaaatttttgagccacaaatgtaaagcaatatcgaaaatgcagagtaaaccaaatgtgaactgaaccgaacgagcttgttttgtgaattagaaaatgaattcaaagtcttgatggaaaattcacagccttgtttttcggaccagttactcaagggaatttaatgaaaaacatgactgatttctgtcaagctaagtgacgcaaaaaacaaaattaatatttaagggaaccattttcccatatctaatccattaggtcaactgttatagcagcattaggataaaccgaaattacttgaatattaaagataaatttgttattaattatattcgctcaaattgagttactcaactcccttaaactgcgcacaaacgatttaaattattcctcattgggtcggtgcgggtaaataaaaaatctgttttgctcgagctccgttttgtggctgcgtaaaatgctccacagctattagggcttaattaatttttacaccattttgtgtttaatattttcttccctggcagttattatgattgcgttcggttaatgaacatcatcaacaccattaagtttaattttatgaagcggcttcttcgcttttattttgatccagcagcaaccgagatgcaaaatgattgcagtgtgcgagtgaggatgatgcaattaagtggaatcgatgaaaagtgtctttcgagtcgttattgttcccaatccgattgagagacttggccattattaatgtttcaattagtatccgagtagccgagaacaaacggctttaaactaccaaagtctaagcacattggctacctttccaaggacaccagaaacccgcagactttgtgagataaccgggagtaaaatcccatttgtcatgctcgcaatgcaatcctctcgacttttgcgatgtgcggggcaatcggcggccctcaaattggatggtagtcaatgtttgtggcctcgtaaaatctaatttaaatgcaaacgcaaatgtcaaaattgtagaattaaaaatcacattcggtttgattcaggcagacagacgtaccagcatccagctcaactattgctcatgggga

SEQ ID NO: 22631 - DNA, 2106 bp, DROSOPHILA
aagctcgttcggttcagttcacatttggtttactctgcattttcgatattgctttacatttgtggctcaaaaatttgtcaaatatttcgcaggaactgccactaaattcgagcacttttacacgaaatgacttttacgtataaggaactcatagatgttgccattgggtccccggaatcaggacacgttaacttttacgctttgcatgtcctgctcacgtgctttgcccagcgattggaggtcctcgatgaggttgtcgagcaggaagactatatggtggccaatgtgcgcttgcaaagcagtttactgaccttgggtaacacctcgaagttccgtcttttcgccggtgcggatgccgaggagggagcagcagccgagccggcggcagagcccccagccgaggaggcagaggcaccccctgcgccagtcgaagagcctcccgcagcggatccagcaccagagcctgctccagaacctgctccagagcctgctgcagaggaacctgccccagcggagccagtcccagaagaagcagctcctgcggaggctgccgcaccatctccagaaccagtgggttccaaccatgaaccaactccatctgcaactccggctcccgaggaacatcctccttctgagcccgaggcagatacctcaaaagcaccaatggatgtgcctgccgaggccaagggagaggagctggcaccgcaggcctcacgggtctcctcgagatcctccggtcgcgacaagtcgcacagtcaaacggacggatctcttaccaataatctcttgcgtctcgaaagacgcctctccaagattgaactgcagaaggaacaggccacaatggaggttcagcagtttgtgagcaatctcaccagccagctgaagatcacgatggagcaggtgaacaatatgacccacttgttgatcgatcgcaagccgaacccgcagaggtttcggttactccgtcacatagccaagcagttgagggtcctgatggtgacgactggtgatgaggtttctgtgagttggtcgagtggggatatagtggacggtgtcgaagaggagggcctgtcagaggaggaggtcccagtggagtctagtgcgcccacggaggtggagaagcctgaggaagaggaggaacttgaattggaacagcccctttgctattcgccggagaaaatgcttactgagcttctagacctcaagtcgcaattctgtgctctgaccaacaaggtaaatgaactcgctgcagccttgctgaaacaggactcccagagactgatggaccagatgaaggatctctcggaaacggtgcgggatattaagctctacatggccagcaacaaggaggctaccaatggcatgatgactcgcctcaatgactgcgtataccagatacaagtcctaaagaaatcggcatcccatttggatgaggtgaagattgacaagacggaggtggagcttttgttggccgaaaaggttgacttccagcagttggccactaaagtgtccctggagcaactggaggagtacaaggccaggttggagcagatgttctgcgaggtgcgccacattgtgagcttgaacgagaagaacgtcctgcagatcatcgacaatctgcgaatgacactgggcatcgacgcattggagctaagtctcaaggacttccgggagatgatcgagcggcgggtgcagattatagccgaggccctccagaagtacatggagatgaccaacgatgattgtgccgcagctgccggaagagtgaaggtcatgcaggatctggcctgcttggcctgtgacaccacctgtgtaatgcgaactgtggagcgatccaaggtgccctcgctgcccaatgctaagggttccaccggcctgggtcccattgtcacctacgaactgggccagatccgcaagtcgggcatcatgggatactatcgcaaggacgagttcccacactccaccagtgcctggactaaaggagcctcgggtgttcccatggtcaagtgcactccgcgtcacgcgggcggaagtcacaccacccacaccgcggatgagcacatgcagaaggtcattctgtcaaagaagaccagcggttggacatag

SEQ ID NO: 22632 - protein, 659 aa, DROSOPHILA
MTFTYKELIDVAIGSPESGHVNFYALHVLLTCFAQRLEVLDEVVEQEDYMVANVRLQSSLLTLGNTSKFRLFAGADAEEGAAAEPAAEPPAEEAEAPPAPVEEPPAADPAPEPAPEPAPEPAAEEPAPAEPVPEEAAPAEAAAPSPEPVGSNHEPTPSATPAPEEHPPSEPEADTSKAPMDVPAEAKGEELAPQASRVSSRSSGRDKSHSQTDGSLTNNLLRLERRLSKIELQKEQATMEVQQFVSNLTSQLKITMEQVNNMTHLLIDRKPNPQRFRLLRHIAKQLRVLMVTTGDEVSVSWSSGDIVDGVEEEGLSEEEVPVESSAPTEVEKPEEEEELELEQPLCYSPEKMLTELLDLKSQFCALTNKVNELAAALLKQDSQRLMDQMKDLSETVRDIKLYMASNKEATNGMMTRLNDCVYQIQVLKKSASHLDEVKIDKTEVELLLAEKVDFQQLATKVSLEQLEEYKARLEQMFCEVRHIVSLNEKNVLQIIDNLRMTLGIDALELSLKDFREMIERRVQIIAEALQKYMEMTNDDCAAAAGRVKVMQDLACLACDTTCVMRTVERSKVPSLPNAKGSTGLGPIVTYELGQIRKSGIMGYYRKDEFPHSTSAWTKGASGVPMVKCTPRHAGGSHTTHTADEHMQKVILSKKTSGWT

SEQ ID NO: 22633 - DNA, 3324 bp, DROSOPHILA
agcccttaaatggaatgtggaggacggttagtgtggcacttacatccagcagatgcactgcatttgagcaccgggccaagtgcagcgaaatgcgcaggcactcacataattcctgccctcaaatgcagtaaatacaaatttattttgcactcttacattttcggttggccaaagaggcaagaaagggtggttttgtgcaatgacgatagggggtagtggctgggtagtggaatagtggtgctggaaacattgttgccagctttatgaggcaacaacaggcacaacaaccgacatgtacacaaaacaattattgcccgtaggtaatttagtggagaaaacattaccagcaaacccgaggagcaaacgagcccgctagagaaatgtttcatgtctgccaggtccctcgatgccacctctttctccagcgatttctgggccctccttctatttcttcttgcctgaagtgtgcgcttaaaataattccagttaaacatggcccacaatttgcttatggccccgaccggcatttcctcgcatttcgggaattgcctggccaaagtttgctggtctaggaaaagtaacagaagagctttcctcgctttcctggtctgtcattcaagcggagtttccatgcggatttcttttggccccaagacttgcggctgcagaagtgattatgtgattatatgaggccaagatctcagagggcaattccctgaaaacgagcgggaaagatggagctaaaagattggtaggaaatgttgttccacaatgtggttgattttctgtacgtttattactgtgcatagcaccaataacaccaatttgagtagcatgattattactataataaaatattttgtgtggagatacaagatagaaatgcatgcaatccattccatctattctgctgtttataattgtgagaagatctctgttggatttctaatttgatttgatttaaataacttatctacttttatgttttggtacacttgacttagacaaacgccgtactttctgtaaacgctccacaaagtctcagcttctccccggttacaatggccctcatgaactgtgggcccaaatatagacccttctctgtggtcttggtgtccccatccaatctaatgatgtaatccttgcttatcagtcggtcagccatgtcctcctccagtttgggtatgagtatgtcatacaaagtgccatcgccagctgcagtcagtcgtcgatttacaatcgtgcaacagttgtcattgcgaaggatctcctcgaactggagtttcacttgctgaagagagcttcttttcggatatcccgatagtcgttcgaaacacttgaactggtagaaccgtcgctccaactcggccaggtcatccaataagggttttattgacggaagttcatccgaatgggatcgtgagagacggcagagatcgctgagaagcttctcgatctgggaactgaacaaatcttccagttcggcattgcttagaatgtcctgtaaatatgtgttccttaacaattaatctttaaaaagtttcgagttacttacagctagtttgagtattgctgaatgcagtagtggaattactgtcagattgtagatctcgtgcatttttcgtgtctccaaatagtgaagaactttcagagcttcgttggtgtcgtcgaatagccttttttgcctgctaactggaacggcttgagcctgttcccagaccttctgccaggtgttgccctcagtggtcatccgtatactaagttgatgcttcacctggcccagttctttaataaaataaggtataaatatggagaaatgattcatccttatcaaatgaaaatcacgtaccatcagtcacctcctcccagtctttggggctataccagcgtataaagtcctccatgatgcccctgggattggcggccttgaaggcttccatatcggagagcaatgaagtacacatcatttgggtggtcaggcccgaaccgggtccaagtttcagcataacttctgcgtcgtcctgcagctgatcttcggtctttggaacgggctcctgggtatctgggatatacagatactcatcgggctcctccagcaatcgttcgttgttcaaacgcctcaggcgaccctcgggcttcagactaagaactgcttttgtgggtgagcccgcaccggcagtcagatcatcgcagtcaaagaactcgccctcgtcgtcatcctcatcctcttcctcctcggaactagcttttcccaccattccctcggattttcttttgctattcgcctcccgttgcacgcgacgctccacgcaaacgttaagcatctgtagtttctggtggaggaggcaggtgcgcgtgtcgggaaagccagcggaaattctgggggaaatccagtaaattcgaaggtgttagcatgttgagaacaacagcggaggtgttgatacattcacttaattaattagctttatgccgtttggtttcgtttatttgccttattggattctttcctctttagatatttaacaaaacttcttctgtgattgctttaatacgaaataaggtggttgtgcagcatttataaccttaactttgcttcttcctcgagtcacagtgttcaagtttaagatttcatctaagtcttaatttatgctccaaccttttcatggctgggccaaatcttccaccgccttgtgggcatatcagtcacattcttcgggccaatctcagtcgccgtgacaataaacccgacaaaggcggccaaaagcgagctctctgggccaagtcgccacgcatacatcagggcaaactatgggagggtcccacgtacagacacatacatgtatctatccccttctggtaaaccaattgatattcacgctcatcatggctgtcaacgcgtgcgtgcccctctggtcttgcatagccaatgagccccagaagtggaggtgactcagtccacagagttcggtgaacttttgcagcagagtaggttttgggcccggctacaggggcccccttaatgtaggggggaagtgagttatttggaccaggacagtgactgcctgttgggcaaccgaaaaaggggagccctgcagctcctgcacttggcatttgcataaaagttgccttattagtggctgcgtggacagctgcagcgcaggagcagctgcttaaaaggtttttaaagtggctaaaattgcactcaacttggcagcgggcgaccgagcaagctagctgacaaatggctcttggcttttattgacccaatgttggccacttgacaatgccccgctctctaggcatttggccacctcctcgacacgc

SEQ ID NO: 22634 - DNA, 1206 bp, DROSOPHILA
atgcttaacgtttgcgtggagcgtcgcgtgcaacgggaggcgaatagcaaaagaaaatccgagggaatggtgggaaaagctagttccgaggaggaagaggatgaggatgacgacgagggcgagttctttgactgcgatgatctgactgccggtgcgggctcacccacaaaagcagttcttagtctgaagcccgagggtcgcctgaggcgtttgaacaacgaacgattgctggaggagcccgatgagtatctgtatatcccagatacccaggagcccgttccaaagaccgaagatcagctgcaggacgacgcagaagttatgctgaaacttggacccggttcgggcctgaccacccaaatgatgtgtacttcattgctctccgatatggaagccttcaaggccgccaatcccaggggcatcatggaggactttatacgctggtatagccccaaagactgggaggaggtgactgatgaactgggccaggtgaagcatcaacttagtatacggatgaccactgagggcaacacctggcagaaggtctgggaacaggctcaagccgttccagttagcaggcaaaaaaggctattcgacgacaccaacgaagctctgaaagttcttcactatttggagacacgaaaaatgcacgagatctacaatctgacagtaattccactactgcattcagcaatactcaaactagctgacattctaagcaatgccgaactggaagatttgttcagttcccagatcgagaagcttctcagcgatctctgccgtctctcacgatcccattcggatgaacttccgtcaataaaacccttattggatgacctggccgagttggagcgacggttctaccagttcaagtgtttcgaacgactatcgggatatccgaaaagaagctctcttcagcaagtgaaactccagttcgaggagatccttcgcaatgacaactgttgcacgattgtaaatcgacgactgactgcagctggcgatggcactttgtatgacatactcatacccaaactggaggaggacatggctgaccgactgataagcaaggattacatcattagattggatggggacaccaagaccacagagaagggtctatatttgggcccacagttcatgagggccattgtaaccggggagaagctgagactttgtggagcgtttacagaaagtacggcgtttgtctaa

SEQ ID NO: 22635 - protein, 401 aa, DROSOPHILA
MLNVCVERRVQREANSKRKSEGMVGKASSEEEEDEDDDEGEFFDCDDLTAGAGSPTKAVLSLKPEGRLRRLNNERLLEEPDEYLYIPDTQEPVPKTEDQLQDDAEVMLKLGPGSGLTTQMMCTSLLSDMEAFKAANPRGIMEDFIRWYSPKDWEEVTDELGQVKHQLSIRMTTEGNTWQKVWEQAQAVPVSRQKRLFDDTNEALKVLHYLETRKMHEIYNLTVIPLLHSAILKLADILSNAELEDLFSSQIEKLLSDLCRLSRSHSDELPSIKPLLDDLAELERRFYQFKCFERLSGYPKRSSLQQVKLQFEEILRNDNCCTIVNRRLTAAGDGTLYDILIPKLEEDMADRLISKDYIIRLDGDTKTTEKGLYLGPQFMRAIVTGEKLRLCGAFTESTAFV

SEQ ID NO: 22636 - DNA, 12493 bp, DROSOPHILA
ggcaaatgcttctgtatctctgccattgtatccctatctgcctttgtatctgtatctgcgctcgcactcgtatctgcggtctaactgtttttttttgcagctcttgctctcctcttattattatgtattagcattattatttacccgcctctgtttttttttttttttgtggaagcagcgtggaatgagagattcgtggaattgggacacttgtgtgcagtgccagcgaattgttgttgtgtctgtttcaaatattttttccgctgtttgcttccccgttttctcggctttctttcaatgcaaaaagactggcaaaaaagtgctgttagtttctttcttgcgagttttttgcgcgtgtccgtcaatgtcaaagggaacaatttgtttttatcttgaattttttgtagtgcgaattgtttgggcaaatattttgactaagctgcacttgattttgcagtaagtttccactcattccatgtggcgtgtgagtaatattttgtgcgaaactcattcgttccgttgcagtttatcgcaactgtagaatatctgcttcttggtacaacttaaaatgctaaaaaaagagcaacaaatggttgttgcttttggttttatatacacactacgtgaaacttgaaatgcgcaagcaaaaatacccaaaaaaaaatcgcgcaaaaaattcaatttggcgagcaaacaaatacactcaaagattgcaaccaaggtcactgatgaataacagcaaatgcgctgttctctccatatatttgtgccagtcggtggagatctccacatgcagaccgcgtgagaggaagcgagatggttggcagtgtgcgacagagagggatggagccccgaaatgcgttctttatttttccttcgcctggctttctgggtttggcgtacaaagtaaataatttgtttgacagggaatttttgtcgggtggcgtcgggggtgttcgacgtcagttccacacatagatccgccttgaatacactgaatacgcgctgtattttattttagttgacttcatgtgtgcattgtcgttctgtgagtgcgcgaatccaactagagttccgcttcgtctctgccaagtagcgaagaagttttgcagttgtacattcgaaaaacaagcaggtgttgtgtttttacttgaaattttccatatagtgagccttgcattatacatggcgcccaatggggggcacaacattattggcgccctacgttggacatttaaaacaaaacaataagattagtgtttcatcttcaacttccttgctaaatattcccacataatcgtggtgatcgcagcggaataggttcccatcgttttgcatacatcatgtgcattaattgcttaattgactcacattttattcaattcgctcaatttcgtattcagtgccaaacacttcaccacacacacacactcccatttgctaagatccgagttcgcggagatctccagagaattattctcaccttttatgcatgcgcgactaattcctggaattcctttgactgactaacccaaaagtttgttgttctcacacgcgcagaatacgaatacaaaagacaagaaatggcgccgaatatccttgaaaaaggcaaaggaataaagaagcgaaacgaaggaaaaaaaatcaagcaaagctgtcggcgcagtcgcaggctgcagaccaacgaaaacaacaacacaactaaaacggaaaagataaatcaaaaagtagccaaacacactcacgctcacagatgcagtgcaaaaaaaggctaaaaaaccgaaaaaagagaccgaaaaaagcaagcaataaacagttgatccgctttttgtcttgtttttgagcaaataactgcatttgaccttgtttcgatctacctttgtatgggttagcttagaacaagcaagctatacaaacacaaacagtccatacaaacgtgtgccagagggagagggcgataccatgctgtgtgcatgcgaattcatatttgcgaatttttggtgcttgtttgctttgatttgcgttttcgctgcgcacgaaataggggaccaaagagaggtagaaatcggccataaagacagggcacaagtgtgttttcatggctaaaatattaggccttcgatttggggatcactaatggcaaactttcgatatagaataaatgtgaataataactattaatttattaaatagggtatttcgtagtcttaataactggaatcgtatcgtttcttataaacgtacatacatacatacatatatttttgcattcaattcagctgcgcatggcattatcagttttaaaataagaagagaactcccacaagaattcacgtttaatgggatttatcagaaatgatccccctatctttttctctaacgtattagcgttttcttttacgcggcaaatactgttttgctaattcttgtgttgctttgccaaaaacaaaaatgaagccaaaccaaatgtaggttaaatttacggaaattgcgacgagggcagacatatgtacatatagaaaaagtatgtgtatcggtgtgcgtggtataaaaatataaaaaagctataaggcaaaaacaaaccacaacagatacgaactcagatagcgcacacacacgtgcgcgcaaataaaagtggttgttgttcttgccgatgatgttctgtttttaatttcggacagtgtatgcgtagattatgcaataaacgaacgaagaaagagagagagagaggcaaagtaagatagtccaattgtgggtgactaatgatatacattcgagtgcaaacaggtgcagaaagcaagatataagtgctccagtggaaagcaaattctcattaacttacatatgtatttcttattgcggtgtgaaaagtgaacaactcagtctcgccatttgcgcgcatccaatcagaatgcattcattctggggggaacgagatggatgcacggtcgctgcattcttctcattcgttcgctcgttcggcttcgtttctgtcgttgcaattttatttcgcatgcgctttcggcttcgtgcattgaattccaattcgtccgcttggttttttgcacacacgaagtggcttcgtgatcgattggacttttttgttggcgcagctgttcggatttgcattgttctaattggacgacgcaattggaatgcagtcgtgagcaaagttgggttaatttatacattaacttaaatacatattcacaaaagtattagttcttatacataagtgcactaaataaaccattaactaactaatcttatgaatgttctcctttgctttctttgcaggtaaatactttcatcctcctggtaaaatacccaccctcagtgagcggtaagatatactatcttcagaattttctgctagtcatggctcagttgcacatattacatgccacgtcatgggcaaacaatcgggcagtctaaagtgcgttaaccaagtttagtagaacacccccgcccgctttcagtcaccatgaaaaccagatccatcatctgagaaaatggaaaagggggaacacgaagccaccaccaaaagcgaaacttcctcccggcttttgggatgcctttccgcttgcaaccaaaacaaaaatgcaatttctgaaatctcggcgccggaaaaaaaggaaaaacatccttcgggcacgtgctgataatgaacccgaccctttggtgcatgcgcaaccctcttttcgagtgttaggggtagctcctttcggtccttggtccttggcccttggtcgtaatcccctgactgcagcccagctgctgctgcatcaaaggatttctctggcgcccaaccctcgagtgcaactgcaacaattttcagcggggttaattaagcgttgcgtctttgttgcaatagccgcgaatatttttttgttaggggttgcaaggagcggtaagctgtccaaattgccaatgtgacaggcgctgcgcgtgtgccgcctcacaactaattgcagttcctgttcaggaaatcccaaaaaatacaaaaaaaaaaaactcgaaaggataatggaaagagttgggcggaaaacgggtttgtgttgtggccaggagttttcgtacaaagttgctttgctgtgatatttgaaatgtgagaacaaactataacgcgtcatttttgggattaatcgcgctggatgaaagtattaacaggatttaaagatttaagtaacaaatcacacgtaagctatttatttggtttatagatcgaggattagtgtagtatatcaaattaaaggtttcactctgctgaagtatccaaagctcacacctgaaagttttttgcctggcaaaagttcttcaagcagcaaataatttgttgtcatgtccgaaaaggaccctttcgtttccttttattgttgttctgtttttgcgtagacctacagagaatggccaaaagcaatcctgtcgaatcgacacgaaatgttgctgcctcaatttgacacattttcaatagtcaccctcggggatccgtttttcgcctccccaaattcctcaccaacactgcagctccctcatcaatctgcaagggcaaaaggaaaggaaaagaaaaacatttatcccaatgcctatgtacaagaaaaggaaaacggcgaggaaagccaaaggaagaaagagtcacgccttttcggggaaaactttgttgcaacattttgttgccgcctgtgctcgattgccgaacagcaacaacaacagcagcacgaagggcagactgttgtcctgaaggacttttttaataacaggcgaaaggagaatttaacttttgttgcttacgtcattggaaatgctactttttttttggcaagtgcgtaacttttttgtggtggcagttctggggaggagaaaagtcactttaatgacattttgttgtaggctcgttgttacaaaaaatagtaggaaaaaagtaggcaagttagaatgagagaaattgtgcagcttaagtaatgaatccgtttcgtttgaataacatttaaaattactcgtttgttttagcaattttccaaacgctttaaaatgcctacgacacttttgcaagtgtacccacctccccaaggaccttccccccactgatcccctcttgttttttgtgctttcctttgcacccttgtgctgctctcctcattcactgcacgtccaatgaaaatgattgtgtatacgcctcagtgccccgcggcaaatgcgtgcggcatgagtaattagcagacgcaggacactctgcaggatatacacccacacacacacacgcacacacatactaccatacctcctcataattgcctaattgcgttagcccaaaattatgctgcatttttgcacttcaaagacggcatggaactttttcggccatctcacgctcacgactttctctttcgtttctttgatttttatttttttcttttttttttttgttggccaaaactgggtgacaattcgctgcacaagtgcgtgacaaggagtgcgtgagctggtgtgtgtgcgtgtgcaacccccaaaaaacgcacaaaatacatatatagtacacatcccacccttagctggaaattgggcccgcaagaaaattgatttttccgcagttttcccgtttcctggctgcagtctgcgttttatgtgcgctcctttttggagtcctgcgagtgctttttgggctctggatccgtatgcggctcatctccttggagtccttgtacataggcataaattttgtgcgtgtgtctgggcgagaaaggtgtttgtgaggggggggaatggtggggagcggcaggacactgcgcctgtgcgcttttcgtattgttttgacacttttactcgaggtgatttgcagcagcatctgcaggagtgaaaagggacttaaagtgaacaaatgtattttccgatacttcatggaaaaatagtaagcagaggagaaacttttgggttcttcaacgatttatgttgtaattacagccaaagactactaccactttcaaaatgtatcaaaaatattgactgagaacgcttagaatcgtttgaatattaatcgactattgagattttaatattcaaaagactgcttgaacctcaaccttcactatcctccaattaatatgtaaataattattcgagtattcatattcgacaacaatttgtacagagccggatccgtttttttgtattcaatatatgaaataatctttttttttttttttttttttgattccgacaacccttaacaggttgtgtgcgtgtgttgccacgcccactcgccgaatgaaaatcacttgacttttcattaataaaattggcagcagacggcataagaaggggaaagttggagtccatggagtttcaatggacgagcttatatgcatctgatacttggtttgtacagagcccagcatttgcacccttttttcattgttaaatttcataaatttttttacgtccattcccgtttattttttgttttttttttcctctttttggccgcgtcaagtgagacacgcagaatgcggcttacccaaaagtgaaaggtaccgcgagtcgcgaatttccgaaacttcttttcaaaaacagcagacccaactcacacatcattgtgggctgcagcagcagcagcagcaaccccgaacgagattcattaaaaaaatgttgggaatataaaaaattgttttccatacgcattaatgcagcaatgcgtaagtaaagtaaacgtggttacggaatgggaaagtgtggtggccagacttggttatgactataaagccatgtggcataacatggggtagtcctccttgggatttgccagtctttgatatgcgacaaggagcagaaaattatttattactccctttacaggggtttttactaaagattgattaacggaaatgctttgtttcacggcaatgggagggcataattgattggggaatgggctccggtctaaatgagcttaaagaagtttaaaggcaggtagtgtttgaattggattattgattaacttaccccatagattgggtagcctttcattagctatgttgtggtaactctttgagaacagcttcaacaaccatccattaccaatgtttgttttcaactttaggcctatcttcgtggtctgaggtccacctcgccattacccgaatattcagcatttatcccccatcttcgccgagatcgctgttcaaaattcaatgagcaaagtgcggcatggacgttgaatttattgaaaaatcatgatatgtaaccatcaaataaccgcaggaaggggtccaaaaggagggattttgtggccgatagccaagcgagtctggccagaaaccgggtcctgaaatttgcggctcgagtttgagtttgattccgagttttcgagactgaggctgaggccggtcggttggcatcgtctggcatgcaaaagcgtcgatatgacagcttgactgaactaaaaccgcgttgccaatgctagacaaaaggccaaaacacacacaaggagctggaaaaaaaaggggggaaaacgtaaagtgggaaaatgggagatagcgtagggggaaactcacgcatgttggccaggaccagggaccaggaaatatgattttttcgtgcttgttgagcagcagttttagcgaggaggaggaaaatggctggagcctaccttgccacacgctgattgacgtgccttttattgatgctcttgattggtttttacctttttacacagacatgcgggcggtggcgccacctcttttccatccacctgcccacctttttttttgttctccttcaccgtccacctggtcgttagttcaatatgtgcgtcggtgtctggtgccacgcctcccggttatgatttttattacaggtgggagatgagttgagctgagcccacggatgatacaaaaaagcatcgttcctctgatgaattgctgctggtcctccgtatttgcctaaaaaaatgtccgcgcttttcagtttgcctcgtttttttttattttttagttctttattttttagcgctcagcatcgttgttggttaattttgtatgcacatagaggattacaggggggggagtgggcttcaaaatctatttgcgtttttaatcaaatcttcaaatgttgaacgcatatcgctgcgcatcgcataggcttctatggatatcccttggtttgtttaacttgtatatcgtaattgcatatctcttagaaaataaaagcgagcgagcgatggaaattggaaggccaaacaaactaatcaaatgtctgccatcgtcctgcgtctatcgccacttccgcttccgttttccactttttttttcgcaagggcagctcatccttgtcgattcgctaatgctttaatcctcgctgcgtccgcggtatcctgtatcccctggatatcctgctcctgtccgcgtgtattaaatcgatgaagtattaacgacttaattgcatgtttggcggacattctgcattgaccctcgcaccctccgtcatcagaagtttatgagaaattcgttgttatcctttctggactcgcaggaggcgttgcagttgagtcctgcggccaacgctcatttcgggaaatgtgaattcgattaaagtaatgactttttgagtagtcctttggggcggataagttgggcgagctcaggtgtttcgcttataaagggaattcggtatgaggaatgtaaggcctaaaaagtttccaagaaaaagggttattgattatgttgaaatcattttgaaattaccaaaaaacgacttgcttggttgtggtttaaaaatgtcttagatgattttcaagaatcttaaatcttaccttcttgcaaactttcaatttgattcatctgcactttttaggccttccaaccaccactcactgggctcaagccaaaacaaagtccttcaaaagcctacagtccttggtacttgtaattccaattcgaatcccctctaccgaatgcaaaacaacagcagcttaacgtactaattgacaagcaagcaaaaatatttacgtactcaagtccaaacattctaatcaatgcactgcgagggacaaaggatcggcctaaaaacacgagggaggccaggcgatgtggccgcccaatctgcaggcatagattcccagctccgaatgggggatggaggtattctattcgtatacagtataactgggggatggacaacgaaaacgaagcctttcaaacaaacaacaatcgttggggccagtgagattcatcaaagcgactcaaaccaggaagtgaagagggaccctctgtcctcaaagcctgctccattccctgtccaaatgtcaaaatgcgtcgaagcgaacatcattggatttgtgattgaacagaaatttccatacattgagagcgtcactactctccttttgcccgctttttcttacactgcccattttcatttaggaaatgcatgctggagtgataattccaaatcggcagtttgagtacggacagccgccttcatgagtccacgtactctcgccatcctctcgattttgtacttttttgttggtttcatttctttttttaccaggacatcgaaaatttatatttacggaattgtaagttatgcactcgaatgattctcgcactgtgaattgtctgtcaaatgtcgcgacgggcggagtttccccgctcgcactttttttcctagagtggttttccctgtttccaaaaacccacctatcctccccaaaaaaaactcttcgattcgacatcatggcatcctcgtctcgagcgttcaataattgtgtaaaacgctttcagttttacatttcaatcttaatttagtttctggcataacgtttgcttgccattctgaccgccggacaaagtccggccaaaaaggggttccgtccgaatttgggtatttacggatttattgcgaggggtaggcaaattgttatttttgttgttcgccatttggacggttgatcttttggctaatgaagtttgtcattgagctttatttaatttgctgatgatgcgaatggaaagaacaacagaaggaacgggtggcaatcaaacaaaggcctaaaaaggttcgattccagatgggttaatgattttaaaaaggaattattgatacagaagagtatcagcgattttgaaatttgaaagtaaaatctgtaaatttgtatattttaaatgaattaatatagttcagaatttagttactctattgttttatctactgcgaatgcaattcctgcaacatccccaactccaattagcatcgcttcagtttttcgctctcgaaatgtttccgtaaaagtttgacacttttcgaattcaagatgacaatttgagctgtcacacgcaaggctgtcacatggtctgggcttaagtgggggggtgggtagtagaggtcaattcttctattgcccacctgcagctgtcaggatgaagcctccaggcttcccactcctcgcagctttcgatctatctgcagaattgcttaaaacaattgcgcatacgacgcgtggcctgcgtgaaaattgcaacattacatcgtgtaggcagtcgtatcgcaaaggaggaggggctctaatttggtggaggctgggttctcggtctgtccatcgttcggacgttcctgccagttacctttttgacatttgattgagatttgttatcggcgaattcatcaatgatatatacaataaaaatacacacgcaatgctgcaaacggggggatggtttttttttcggccagaccgagacaaaaaaccacccaaaaaggagaaagatgtgaaggcctagaccattcatcctctgggtctgttggtgtctgctcctggcccagagtggttgcaaaaggggcggatgggggagtgactggaccatagttatcggcctggaccagtgacatttctggccaggcattcagctcgttcggctcctgtgtgttacttctattagattttccatgtgcaaaaaaagaaaaaacgaaaagtgaacgaaagaggactggccaagcagctgttgtttggacctgcccatcgcccactccaatccactatacgcttttcccccccagcttgttgtgtatttttgcaataaaccaggaaaaagcagactgggacagtagagctggccatgcgtacctttcgatccttgtgtgacatttgaattcggcagagagaactgtggaatcggggtggagttcgcagaggaggaggacttttctttcacataacttcggcggcgcacccagcgccccacccacttttgtaggccaacgtttgcgtatctattttttaattttgctgacgaggcacgaaaacatacaaaacgcaattgttccaacgtccacaatgcattccactaactctccgtgctccgtgtgcggctcctgtttttgtgtcctgacatgtgtgcgtctcatgctgataagcagtggcgccacactcgcaagggggggggggtggttctccgggggtggccaggaccccaggaccttcgctcctgcaaaaaacgaaatgccaaatgaaaagttaaactgtgtgacgcgctggcaagactctggagttggagcagcagtgccaggattggagaaaaccaaaacccaaacccaaatatcctgcatcctgcattctacctaccaatcccttaacccttttgttggcatggcgtgatgaatatttactgcgtgcgctaactgctaactacctacaggtattcccattttttgacatttttaattgggtttgagcagtcgcggcagccaccaaggggttaaaaggactacagtttttgccactttacgcttgtccatcgagacttgttcgccatgattgaatgcccgccattgaaccctaagaccccttcgattacaaacgtaacttagccctctattaaagttagactctaataagtcgttatcaaataacaaattgactgatcttaattgactgtttatgattgatacagtaaaaataaaagaaaatcctaagcttgcaaataaattcataaactaatttggtattcttttctctttttacttacaggtaactatgatcagccaagcgttttcccagtgggctcaaagttatcgtgtctgtgagtttagaatagaacacaattgtgtctcccctaattatgtttctctaagaataattaatttggggaacccatatgaatcttttgcctcatatactgtatatactgtggtgtagtatgtgcatatatcgagggtacactgtacctataagtacacagcaacacttagttgcattgcataaataaatgtctcaagtgagcgtgatataagatcacccatttatgctttaagctaagtcagcatccccacgctggccgctggccatatatgcgcataagctctctctctctctctcttatacatatatatatacgctgctcttctgccgctgtcgacggcggcgcagtcgcagtatttaggtaagatcagacactctgtagaggttaagcgggcagaaccgtttctgctactcgaagag

SEQ ID NO: 22637 - DNA, 234 bp, DROSOPHILA
acgcgctgtattttattttagttgacttcatgtgtgcattgtcgttctgtgagtgcgcgaatccaactagagttccgcttcgtctctgccaagtagcgaagaagttttgcagttgtacattcgaaaaacaagcaggtaaatactttcatcctcctggtaaaatacccaccctcagtgagcggtaactatgatcagccaagcgttttcccagtgggctcaaagttatcgtgtctg

SEQ ID NO: 22638 - protein, 51 aa, DROSOPHILA
MCALSFCECANPTRVPLRLCQVAKKFCSCTFEKQAGKYFHPPGKIPTLSER

SEQ ID NO: 22639 - DNA, 3182 bp, DROSOPHILA
caggacacagtaaacttcgccggatactccattaaaaatcagatcttcgccgaaatcaccaatgcaccagagaccgcatttctgaagtcccagctcgatggaattttgggattggggttcgccagcatagccattaatagtattaccccacccttctacaacttaatggcccaaggtctagtaaaccgatctgtgttttcgatctacttgaatagaaatggcaccaatgccattaacggtggggagctgatcctgggaggatcggattcgggtctgtacagcgggtgtttgacctatgtgccagtttccagcgcaggatactggcagtttacaatgactagtgccaatctgaatggatttcagttttgtgagaactgcgaggccatactcgatgtaggcacttccctaattgttgtgcctgagcaagtcctagataccatcaaccaaatattgggagttctcaacccgacggcttcgaatggagtctttttagtggattgctcctcgatcggcgatcttccggacattgtcttcaccgttgcgcgccggaagttccccttgaagtctagcgactacgtgctccgatatggaaacacttgtgtctcgggattcaccagcatgaacggcaactccttgttgattctgggcgagatcttcctgggcgcctactatacgacctacgatattgtctacaaactcattggactggcaccagcaattcattaggtcgttcaaactatatactcaaacaagttctttaacaattgtattctttgcattatttacccactttaataaataaccccccttggaaatactaaagctacacccattgaatttgcgtatcattgagctttccctataaatcacatattcgagtgccagtctcgagctttaacccacaatacgtgtgaatcgaaataaacatgaaccagataaatcccacatggaaaaactataaatcgggcgaagtgaccaggaacccaaccagtgaggcaccatgaatatacgtgtgattatcctacttttctgtctgattgtgtttgtaggcggtaagaaagtacacagatttcgactggagagacgatcccaccgtcaccacaagattcctcacgcccatctgcacctgcagtttcggaatgcgctgcgaaggaagtacggatttactccactccgtacggtgaatgctgtgaatgtgaccagcgagtccggtaagggagtcgtgataaccgagcccctgataaattcctacgataccaactttttcggggttgtgtcggtcggagatcaatcattcaccatgcaattcgacacgggttcctcggacttttgggtgcccagttcccattgcagattctgcatcaaaacgtgcgggaacaagtttttccggaagtccaattccaaatcctttcggtcaagtggaactccatttagcatcacctacggatcgggctccgtgaagggaatcgtggcctcggataatgttggcttcggcgatctaaagatccagaaccaaggcattggattggtcaacatatcggactcctgctccgttttcgatggaatcgctggcttcgcctttcagcaactctctatgaccaaatcggtcccttctttccagcaaatgattgaccaacagttggtggagcagccaattttctcgtttcatctgaaaagtgggtccagtgatgggggctccatgatactcggtggatcgaactcgagtctgtactacggtccgttgacctatacaaatgtgaccgaggccaagtactggagcttcaagctggacttcatagcggtccatggcaagggttccaggagctcccgcacggggaacaaggccatcatggacacgggaacctccctgatcgttggtcctgtcctggaagtcctctacatcaacaaggacatcggagccgagcacaataaaacctataacctgtacaccgtcgcctgtgaatcgattccccaacttccgatcatcgtctttggcattgctggcaaggagttcttcgtgaagccacatacctacgtcatcaggtacgataatttttgcttctccgcctttatggacatgctaggcctgcagtactggatactcggtgatgccttcatgcgggagaactatgtggagttcgattgggctaggagaagaatgggcatagcaccggctgtatgaggggattattcattttattatgactatcacaccttgcgtgataagtgaatttatttaaaaaaatattcggactataatttggtaaacaaatattaccaattgtataaatggcaatgacagaaaaaaattcaattacattgtaaaagttggacaaataaatgtgaattgttaatgggcgttaattccgatcgattggacattaggaaatctgacctcttagctatttggtgttacttgtgggttccaacttgatgttcctttccattttgtgcggtttgctgaccaccgttgcccccataaatgccacgtggcatgcgaggctgttgctgctgctgctgctgctgctgatgcagctgttgcaattgtcgcagctgcacttgttgctgaaactccagattcttgtagatcatggctgcagcagcagcagcattgttaggagcctgaggttgttgcggggcagcctgttgcgagtgttgctggttgtgctgcgaagcttgacgcagatttcgagcgatcaattgctgatacagcagagcaaagtccttgggattggcgttggacaatgcagctagatccccgacacttggacggtgaagctgctgctgatactgctgttgctgctgctgctgctgctgctgttgcggtggtggctgtggtgccacctgctgctgcttttgtggcatgtggatatgatggtggctgcgtggcgcattcaactgcggctgtggcggcgcttggtgtcgcatctgatggtaaaactggggaaatggtatctcattgaaatttttaaccgagttgcgattgtggctttcggtgccaagttgacgatgtggctgctgctgttgatgttgctgctgttgctgttgatgtttctgctgttgatgctgatgatgttgctgctgatgatgttgctgctgatgatgttgctgctgctgatgttgctgctgatgctgagggatctgtctttgttgttgctgaaagccgctctgaaacacaaaat

SEQ ID NO: 22640 - DNA, 1182 bp, DROSOPHILA
atgaatatacgtgtgattatcctacttttctgtctgattgtgtttgtaggcggtaagaaagtacacagatttcgactggagagacgatcccaccgtcaccacaagattcctcacgcccatctgcacctgcagtttcggaatgcgctgcgaaggaagtacggatttactccactccgtacggtgaatgctgtgaatgtgaccagcgagtccggtaagggagtcgtgataaccgagcccctgataaattcctacgataccaactttttcggggttgtgtcggtcggagatcaatcattcaccatgcaattcgacacgggttcctcggacttttgggtgcccagttcccattgcagattctgcatcaaaacgtgcgggaacaagtttttccggaagtccaattccaaatcctttcggtcaagtggaactccatttagcatcacctacggatcgggctccgtgaagggaatcgtggcctcggataatgttggcttcggcgatctaaagatccagaaccaaggcattggattggtcaacatatcggactcctgctccgttttcgatggaatcgctggcttcgcctttcagcaactctctatgaccaaatcggtcccttctttccagcaaatgattgaccaacagttggtggagcagccaattttctcgtttcatctgaaaagtgggtccagtgatgggggctccatgatactcggtggatcgaactcgagtctgtactacggtccgttgacctatacaaatgtgaccgaggccaagtactggagcttcaagctggacttcatagcggtccatggcaagggttccaggagctcccgcacggggaacaaggccatcatggacacgggaacctccctgatcgttggtcctgtcctggaagtcctctacatcaacaaggacatcggagccgagcacaataaaacctataacctgtacaccgtcgcctgtgaatcgattccccaacttccgatcatcgtctttggcattgctggcaaggagttcttcgtgaagccacatacctacgtcatcaggtacgataatttttgcttctccgcctttatggacatgctaggcctgcagtactggatactcggtgatgccttcatgcgggagaactatgtggagttcgattgggctaggagaagaatgggcatagcaccggctgtatga

SEQ ID NO: 22641 - protein, 393 aa, DROSOPHILA
MNIRVIILLFCLIVFVGGKKVHRFRLERRSHRHHKIPHAHLHLQFRNALRRKYGFTPLRTVNAVNVTSESGKGVVITEPLINSYDTNFFGVVSVGDQSFTMQFDTGSSDFWVPSSHCRFCIKTCGNKFFRKSNSKSFRSSGTPFSITYGSGSVKGIVASDNVGFGDLKIQNQGIGLVNISDSCSVFDGIAGFAFQQLSMTKSVPSFQQMIDQQLVEQPIFSFHLKSGSSDGGSMILGGSNSSLYYGPLTYTNVTEAKYWSFKLDFIAVHGKGSRSSRTGNKAIMDTGTSLIVGPVLEVLYINKDIGAEHNKTYNLYTVACESIPQLPIIVFGIAGKEFFVKPHTYVIRYDNFCFSAFMDMLGLQYWILGDAFMRENYVEFDWARRRMGIAPAV

SEQ ID NO: 22642 - DNA, 3257 bp, DROSOPHILA
aatctttgtagccgccaaaggctgtttttacaatgagtggtgatagaaatagtcgaaggaagaactcaattggaatcgaagtttttccgagttgcgggctgtgggcaaaaagcctgctttggctacactttgcctgcaattagcaaataaaacttggcttatttcggtgggtaaatgaggcgtggttgggcggtcgggcgtctcgagaaagttttgcaatcactttcgtttgcattcattattggtgaagggaaaaggatttgactgccagttttctattggcttgggtcaactcgaaagtcagcgaaaggatgtggcaattccttgcccattcagttgaaaactttttgttttaaccaatgactttgtcggtggaatttttaagagtgatttaattaatgttattaaatggcggaaagacgaaagatacactttaaagttaatacaaatgtattagcaaagttaatttattgttgtaatttatagtaatttaatatttcagaaattaaagtataaaaattattattacctttgaattaattaacaacttttaattaattttgattttgaaattcgaatggtgagcgcgaaatctttatacgaattttaaagcgccaagcatcggtaagtttcggaactaatacactgtcatgtagaattatattttacgttgactttctacgtcgacgtctacaccaacagcttgggttgtcttccgcctaggtggcgcttctatcagctttcaaccggatgaaaaatattaaataaactaatttgaagcatttactcaacaattattataaaacaataataatattaaatcacgtaaaaatagccaacatccggccacgtggcaagtcaattttattggactgacttgagcctcaagcaacaaaacgaaaatacctaaagctaacctgattaaaatggaatttgaccgaagttttctatatatacgtgacctcttttcgatttagggccaaagtgaggcccacgaacgatgcagtcttcgccgaaactcgcactggcactgaccttagtgctgatttggtgcctggcccaaagtcatgtggaatccagaagatggcgaaagtccgtgcaactgaaactgcacagggaaacgaaccacaccaaaatactgagcagtttccacaaccagaagcttagactcaaggaaaaactgagcccgaccagcgatttggcgatatcctcggtatctgtatatcaaacaaccgtgtcaaaagagaacctgatcaattcccacaacaccgagtactatgttacggccggtttcgggacgcccaagtcgcagccagtcactcttctggtggacaccgcctcggcgaatctgctggtctactcctcggagtttgtgaaacagtcctgtttgcaccacgatggctacaattccagtgagtcgcaaacgtatcaggccaatggatcgccctttcagatacagttcgcatcgcaggaaattctgacaggaatcctctccacggacactttcaccttaggagatctggtcattaagaatcagacctttgccgaaataaactcggcgcctacggatatgtgtaaacgatcgaatttcgatggcatcattggtctgggattctccgaaatcgccctgaatggagtggagacccctctggacaatattttggaacagggactcatcgacgaacccatcttctccctgtacgtcaaccggaacgcctcggatgccagtaatggtggcgtattgctgctcggaggatcagatcccactctttacagcggatgcctgacatacgtgccagtttccaaagtgggtttttggcagatcaccgtgggccaagttgagattgggtccaagaagctgtgctccaactgccaggccatcttcgatatgggaacctccttgataattgtgccgtgccctgctctgaaaatcataaacaagaaactgggcattaaggaaaccgatagaaaggacggtgtctatatcattgactgcaagaaggtgtctcatttgcccaagatcgtctttaatattggatggaaggacttcaccctcaacccgtccgactatattctcaactacagtggaacctgcgtatcagggttttctagtctctccgactgcaatggaacgcaaaccaatgatgatagtgaagacttgaacaacatctgggtgttcggcgatgtgtttttcggagcaatcttcacattgttcgattttggtctcaaattagttggcatggcccccaaagtttaagcaaatatgaatccgcaatgtataattcgaccaattttttgtaattatatcattaagattttgttcttcccttctagtagataacattcggtgatttttgatacctggggttaggcatttatatctattgtcaaaataaatacatataatggtgatgggaaacggaaagcgtagcttgtctgtaaattgtgttaacaagatatgcgcgcactatatttgattacaacgaacctaagtttattttcaattttgtgcaaaatatgcaattactttccagacattttcttagaaaattaaacgatttatagcgaaatttatcagaaatcccaaatgctgaatttgattgctttttgtttctctatgttctgcacgacaccaagccgtgtaaacaaaggccgaaatggataaggaccatcgatcatgtttgatatctttcttttggacagttttggacttatcaccgaccatatataaggcggtgtctgatgtttattttcttcagtctagccccagacgataaagagggcagcagaatatctttcgttagaaaagctcagagtactcattaaatcataatgctgaagtggctggtcctgttgaccatcttggcgttggtcagtgctgagatccaccgcatcaagatccacaagaaccaggatcacaagaacacccggcagcatcgcaagcaggctatccaggctctgaagctgaagtaccaccaacaggacgtagtcatcatttacgacgatggagtaccgatttacatgcagcccgactacggatacgattatcccagccagacctcggttgactacacatccgaggagctgggcaactcgatgaacatgtactactacggcctgattggcattggcaccccggagcagtacttcaaggtggtctttgacacgggttcggccaacctgtgggtgccatctgcccagtgcctggccacggatgtggcctgccagcagcacaaccagtataactccagtgcttc

SEQ ID NO: 22643 - DNA, 1257 bp, DROSOPHILA
atgcagtcttcgccgaaactcgcactggcactgaccttagtgctgatttggtgcctggcccaaagtcatgtggaatccagaagatggcgaaagtccgtgcaactgaaactgcacagggaaacgaaccacaccaaaatactgagcagtttccacaaccagaagcttagactcaaggaaaaactgagcccgaccagcgatttggcgatatcctcggtatctgtatatcaaacaaccgtgtcaaaagagaacctgatcaattcccacaacaccgagtactatgttacggccggtttcgggacgcccaagtcgcagccagtcactcttctggtggacaccgcctcggcgaatctgctggtctactcctcggagtttgtgaaacagtcctgtttgcaccacgatggctacaattccagtgagtcgcaaacgtatcaggccaatggatcgccctttcagatacagttcgcatcgcaggaaattctgacaggaatcctctccacggacactttcaccttaggagatctggtcattaagaatcagacctttgccgaaataaactcggcgcctacggatatgtgtaaacgatcgaatttcgatggcatcattggtctgggattctccgaaatcgccctgaatggagtggagacccctctggacaatattttggaacagggactcatcgacgaacccatcttctccctgtacgtcaaccggaacgcctcggatgccagtaatggtggcgtattgctgctcggaggatcagatcccactctttacagcggatgcctgacatacgtgccagtttccaaagtgggtttttggcagatcaccgtgggccaagttgagattgggtccaagaagctgtgctccaactgccaggccatcttcgatatgggaacctccttgataattgtgccgtgccctgctctgaaaatcataaacaagaaactgggcattaaggaaaccgatagaaaggacggtgtctatatcattgactgcaagaaggtgtctcatttgcccaagatcgtctttaatattggatggaaggacttcaccctcaacccgtccgactatattctcaactacagtggaacctgcgtatcagggttttctagtctctccgactgcaatggaacgcaaaccaatgatgatagtgaagacttgaacaacatctgggtgttcggcgatgtgtttttcggagcaatcttcacattgttcgattttggtctcaaattagttggcatggcccccaaagtttaa

SEQ ID NO: 22644 - protein, 418 aa, DROSOPHILA
MQSSPKLALALTLVLIWCLAQSHVESRRWRKSVQLKLHRETNHTKILSSFHNQKLRLKEKLSPTSDLAISSVSVYQTTVSKENLINSHNTEYYVTAGFGTPKSQPVTLLVDTASANLLVYSSEFVKQSCLHHDGYNSSESQTYQANGSPFQIQFASQEILTGILSTDTFTLGDLVIKNQTFAEINSAPTDMCKRSNFDGIIGLGFSEIALNGVETPLDNILEQGLIDEPIFSLYVNRNASDASNGGVLLLGGSDPTLYSGCLTYVPVSKVGFWQITVGQVEIGSKKLCSNCQAIFDMGTSLIIVPCPALKIINKKLGIKETDRKDGVYIIDCKKVSHLPKIVFNIGWKDFTLNPSDYILNYSGTCVSGFSSLSDCNGTQTNDDSEDLNNIWVFGDVFFGAIFTLFDFGLKLVGMAPKV

SEQ ID NO: 22645 - DNA, 3273 bp, DROSOPHILA
ggatgcctgacatacgtgccagtttccaaagtgggtttttggcagatcaccgtgggccaagttgagattgggtccaagaagctgtgctccaactgccaggccatcttcgatatgggaacctccttgataattgtgccgtgccctgctctgaaaatcataaacaagaaactgggcattaaggaaaccgatagaaaggacggtgtctatatcattgactgcaagaaggtgtctcatttgcccaagatcgtctttaatattggatggaaggacttcaccctcaacccgtccgactatattctcaactacagtggaacctgcgtatcagggttttctagtctctccgactgcaatggaacgcaaaccaatgatgatagtgaagacttgaacaacatctgggtgttcggcgatgtgtttttcggagcaatcttcacattgttcgattttggtctcaaattagttggcatggcccccaaagtttaagcaaatatgaatccgcaatgtataattcgaccaattttttgtaattatatcattaagattttgttcttcccttctagtagataacattcggtgatttttgatacctggggttaggcatttatatctattgtcaaaataaatacatataatggtgatgggaaacggaaagcgtagcttgtctgtaaattgtgttaacaagatatgcgcgcactatatttgattacaacgaacctaagtttattttcaattttgtgcaaaatatgcaattactttccagacattttcttagaaaattaaacgatttatagcgaaatttatcagaaatcccaaatgctgaatttgattgctttttgtttctctatgttctgcacgacaccaagccgtgtaaacaaaggccgaaatggataaggaccatcgatcatgtttgatatctttcttttggacagttttggacttatcaccgaccatatataaggcggtgtctgatgtttattttcttcagtctagccccagacgataaagagggcagcagaatatctttcgttagaaaagctcagagtactcattaaatcataatgctgaagtggctggtcctgttgaccatcttggcgttggtcagtgctgagatccaccgcatcaagatccacaagaaccaggatcacaagaacacccggcagcatcgcaagcaggctatccaggctctgaagctgaagtaccaccaacaggacgtagtcatcatttacgacgatggagtaccgatttacatgcagcccgactacggatacgattatcccagccagacctcggttgactacacatccgaggagctgggcaactcgatgaacatgtactactacggcctgattggcattggcaccccggagcagtacttcaaggtggtctttgacacgggttcggccaacctgtgggtgccatctgcccagtgcctggccacggatgtggcctgccagcagcacaaccagtataactccagtgcttcctccaccttcgtgtccagcggccaaaacttctccatccagtacggaaccggcagtgtctccggctatctggccatagatacggtgaccatcaacggcctggccatcgcgaaccagaccttcggagaggcggtttcccagccgggagccagcttcaccgacgtggcgttcgatggcatcctgggcatgggttaccagcaaattgccgaggacaacgtagtgccgccgttctacaatctctacgaggaaggtcttatcgacgagccagtctttggtttctacctggctcggaatggctctgccgtggatggtggccaactgaccctgggtggaaccgaccagaacctcatcgccggtgaaatgacctacacacccgtcactcagcagggctactggcagttcgctgtgaacaacatcacctggaatggaaccgtgatctccagcggatgccaggcaatcgccgatactggaacctccctgatcgccgctccttcggcagcctacattcagctgaacaacctgattggaggcgttcccatccagggtgattactacgtgccctgctccactgtttcctccctgcccgttctgaccatcaacatcggtggcaccaacttctacctgcccccctcggtttacatccaaacctacaccgagggcaactacaccacctgcatgtccaccttcaccgatatcggaacgggcttctggatcctgggcgacgttttcctgggtcaatactactccgaattcgattttggtcagaaccgtgtgggtttcgccactctggcttagagctttaacgaacgaacaaacgacatgctttctaggttaactctgcttataaaaatacaaaaaaaaaaataaatgatatacaattgaataactaatgagcggatagaaattgacccaagctaactatttctcctgctcgaaaagcgtttggacccactgtgtatattaattctacgcatgatacatgattgtcaacacaccaaaatatgttcgaatggaagcatgctctgcgttatcgcgtgtgaaattcttggcgaaatagtgtgaaaatgaagctcagctgcacaattggtggccatatcagacaacgaagccaggtcaagttgctgggctataaatacgtgaccgaataggcctcaattggcaaatcaaaatcgcagaccatgagagtcaggtggaaccatttcaagttattgctgttttggctaacggttttagctgtcttggcctttgaagccgaggccaggaagcgtgttaggattggattgcacaagaatcctgaaccaattgaggagaacataaagaacgaattgaagaccctttccattaaacacaatttaaatgttgatgatacaaaagctaaaacgaaaacagataccaaggtcccaggatcaaaagtcgcaacgctagaaaatctatacaacacggagtactacaccacattaggattcggaaatccgccgcaggatttgaaagtgctgatcgacactggttcggcgaatctctgggtgctgtcatccaagtgtccagactcggttgcaccctgtgccaatcgcataaagtacaactcaagtgcttccacaacctacagggctatcaataccgcattcaatattgcatacggttccaattcagaggaaggacctattgcactctccggctttcagtcccaggacacagtaaacttcgccggatactccattaaaaatcagatcttcgccgaaatcaccaatgcaccagagaccgcatttctgaagtcccagctcgatggaattttggg

SEQ ID NO: 22646 - DNA, 1273 bp, DROSOPHILA
agagggcagcagaatatctttcgttagaaaagctcagagtactcattaaatcataatgctgaagtggctggtcctgttgaccatcttggcgttggtcagtgctgagatccaccgcatcaagatccacaagaaccaggatcacaagaacacccggcagcatcgcaagcaggctatccaggctctgaagctgaagtaccaccaacaggacgtagtcatcatttacgacgatggagtaccgatttacatgcagcccgactacggatacgattatcccagccagacctcggttgactacacatccgaggagctgggcaactcgatgaacatgtactactacggcctgattggcattggcaccccggagcagtacttcaaggtggtctttgacacgggttcggccaacctgtgggtgccatctgcccagtgcctggccacggatgtggcctgccagcagcacaaccagtataactccagtgcttcctccaccttcgtgtccagcggccaaaacttctccatccagtacggaaccggcagtgtctccggctatctggccatagatacggtgaccatcaacggcctggccatcgcgaaccagaccttcggagaggcggtttcccagccgggagccagcttcaccgacgtggcgttcgatggcatcctgggcatgggttaccagcaaattgccgaggacaacgtagtgccgccgttctacaatctctacgaggaaggtcttatcgacgagccagtctttggtttctacctggctcggaatggctctgccgtggatggtggccaactgaccctgggtggaaccgaccagaacctcatcgccggtgaaatgacctacacacccgtcactcagcagggctactggcagttcgctgtgaacaacatcacctggaatggaaccgtgatctccagcggatgccaggcaatcgccgatactggaacctccctgatcgccgctccttcggcagcctacattcagctgaacaacctgattggaggcgttcccatccagggtgattactacgtgccctgctccactgtttcctccctgcccgttctgaccatcaacatcggtggcaccaacttctacctgcccccctcggtttacatccaaacctacaccgagggcaactacaccacctgcatgtccaccttcaccgatatcggaacgggcttctggatcctgggcgacgttttcctgggtcaatactactccgaattcgattttggtcagaaccgtgtgggtttcgccactctggcttag

SEQ ID NO: 22647 - protein, 405 aa, DROSOPHILA
MLKWLVLLTILALVSAEIHRIKIHKNQDHKNTRQHRKQAIQALKLKYHQQDVVIIYDDGVPIYMQPDYGYDYPSQTSVDYTSEELGNSMNMYYYGLIGIGTPEQYFKVVFDTGSANLWVPSAQCLATDVACQQHNQYNSSASSTFVSSGQNFSIQYGTGSVSGYLAIDTVTINGLAIANQTFGEAVSQPGASFTDVAFDGILGMGYQQIAEDNVVPPFYNLYEEGLIDEPVFGFYLARNGSAVDGGQLTLGGTDQNLIAGEMTYTPVTQQGYWQFAVNNITWNGTVISSGCQAIADTGTSLIAAPSAAYIQLNNLIGGVPIQGDYYVPCSTVSSLPVLTINIGGTNFYLPPSVYIQTYTEGNYTTCMSTFTDIGTGFWILGDVFLGQYYSEFDFGQNRVGFATLA

SEQ ID NO: 22648 - DNA, 3233 bp, DROSOPHILA
tcctgggcatgggttaccagcaaattgccgaggacaacgtagtgccgccgttctacaatctctacgaggaaggtcttatcgacgagccagtctttggtttctacctggctcggaatggctctgccgtggatggtggccaactgaccctgggtggaaccgaccagaacctcatcgccggtgaaatgacctacacacccgtcactcagcagggctactggcagttcgctgtgaacaacatcacctggaatggaaccgtgatctccagcggatgccaggcaatcgccgatactggaacctccctgatcgccgctccttcggcagcctacattcagctgaacaacctgattggaggcgttcccatccagggtgattactacgtgccctgctccactgtttcctccctgcccgttctgaccatcaacatcggtggcaccaacttctacctgcccccctcggtttacatccaaacctacaccgagggcaactacaccacctgcatgtccaccttcaccgatatcggaacgggcttctggatcctgggcgacgttttcctgggtcaatactactccgaattcgattttggtcagaaccgtgtgggtttcgccactctggcttagagctttaacgaacgaacaaacgacatgctttctaggttaactctgcttataaaaatacaaaaaaaaaaataaatgatatacaattgaataactaatgagcggatagaaattgacccaagctaactatttctcctgctcgaaaagcgtttggacccactgtgtatattaattctacgcatgatacatgattgtcaacacaccaaaatatgttcgaatggaagcatgctctgcgttatcgcgtgtgaaattcttggcgaaatagtgtgaaaatgaagctcagctgcacaattggtggccatatcagacaacgaagccaggtcaagttgctgggctataaatacgtgaccgaataggcctcaattggcaaatcaaaatcgcagaccatgagagtcaggtggaaccatttcaagttattgctgttttggctaacggttttagctgtcttggcctttgaagccgaggccaggaagcgtgttaggattggattgcacaagaatcctgaaccaattgaggagaacataaagaacgaattgaagaccctttccattaaacacaatttaaatgttgatgatacaaaagctaaaacgaaaacagataccaaggtcccaggatcaaaagtcgcaacgctagaaaatctatacaacacggagtactacaccacattaggattcggaaatccgccgcaggatttgaaagtgctgatcgacactggttcggcgaatctctgggtgctgtcatccaagtgtccagactcggttgcaccctgtgccaatcgcataaagtacaactcaagtgcttccacaacctacagggctatcaataccgcattcaatattgcatacggttccaattcagaggaaggacctattgcactctccggctttcagtcccaggacacagtaaacttcgccggatactccattaaaaatcagatcttcgccgaaatcaccaatgcaccagagaccgcatttctgaagtcccagctcgatggaattttgggattggggttcgccagcatagccattaatagtattaccccacccttctacaacttaatggcccaaggtctagtaaaccgatctgtgttttcgatctacttgaatagaaatggcaccaatgccattaacggtggggagctgatcctgggaggatcggattcgggtctgtacagcgggtgtttgacctatgtgccagtttccagcgcaggatactggcagtttacaatgactagtgccaatctgaatggatttcagttttgtgagaactgcgaggccatactcgatgtaggcacttccctaattgttgtgcctgagcaagtcctagataccatcaaccaaatattgggagttctcaacccgacggcttcgaatggagtctttttagtggattgctcctcgatcggcgatcttccggacattgtcttcaccgttgcgcgccggaagttccccttgaagtctagcgactacgtgctccgatatggaaacacttgtgtctcgggattcaccagcatgaacggcaactccttgttgattctgggcgagatcttcctgggcgcctactatacgacctacgatattgtctacaaactcattggactggcaccagcaattcattaggtcgttcaaactatatactcaaacaagttctttaacaattgtattctttgcattatttacccactttaataaataaccccccttggaaatactaaagctacacccattgaatttgcgtatcattgagctttccctataaatcacatattcgagtgccagtctcgagctttaacccacaatacgtgtgaatcgaaataaacatgaaccagataaatcccacatggaaaaactataaatcgggcgaagtgaccaggaacccaaccagtgaggcaccatgaatatacgtgtgattatcctacttttctgtctgattgtgtttgtaggcggtaagaaagtacacagatttcgactggagagacgatcccaccgtcaccacaagattcctcacgcccatctgcacctgcagtttcggaatgcgctgcgaaggaagtacggatttactccactccgtacggtgaatgctgtgaatgtgaccagcgagtccggtaagggagtcgtgataaccgagcccctgataaattcctacgataccaactttttcggggttgtgtcggtcggagatcaatcattcaccatgcaattcgacacgggttcctcggacttttgggtgcccagttcccattgcagattctgcatcaaaacgtgcgggaacaagtttttccggaagtccaattccaaatcctttcggtcaagtggaactccatttagcatcacctacggatcgggctccgtgaagggaatcgtggcctcggataatgttggcttcggcgatctaaagatccagaaccaaggcattggattggtcaacatatcggactcctgctccgttttcgatggaatcgctggcttcgcctttcagcaactctctatgaccaaatcggtcccttctttccagcaaatgattgaccaacagttggtggagcagccaattttctcgtttcatctgaaaagtgggtccagtgatgggggctccatgatactcggtggatcgaactcgagt

SEQ ID NO: 22649 - DNA, 1233 bp, DROSOPHILA
atgagagtcaggtggaaccatttcaagttattgctgttttggctaacggttttagctgtcttggcctttgaagccgaggccaggaagcgtgttaggattggattgcacaagaatcctgaaccaattgaggagaacataaagaacgaattgaagaccctttccattaaacacaatttaaatgttgatgatacaaaagctaaaacgaaaacagataccaaggtcccaggatcaaaagtcgcaacgctagaaaatctatacaacacggagtactacaccacattaggattcggaaatccgccgcaggatttgaaagtgctgatcgacactggttcggcgaatctctgggtgctgtcatccaagtgtccagactcggttgcaccctgtgccaatcgcataaagtacaactcaagtgcttccacaacctacagggctatcaataccgcattcaatattgcatacggttccaattcagaggaaggacctattgcactctccggctttcagtcccaggacacagtaaacttcgccggatactccattaaaaatcagatcttcgccgaaatcaccaatgcaccagagaccgcatttctgaagtcccagctcgatggaattttgggattggggttcgccagcatagccattaatagtattaccccacccttctacaacttaatggcccaaggtctagtaaaccgatctgtgttttcgatctacttgaatagaaatggcaccaatgccattaacggtggggagctgatcctgggaggatcggattcgggtctgtacagcgggtgtttgacctatgtgccagtttccagcgcaggatactggcagtttacaatgactagtgccaatctgaatggatttcagttttgtgagaactgcgaggccatactcgatgtaggcacttccctaattgttgtgcctgagcaagtcctagataccatcaaccaaatattgggagttctcaacccgacggcttcgaatggagtctttttagtggattgctcctcgatcggcgatcttccggacattgtcttcaccgttgcgcgccggaagttccccttgaagtctagcgactacgtgctccgatatggaaacacttgtgtctcgggattcaccagcatgaacggcaactccttgttgattctgggcgagatcttcctgggcgcctactatacgacctacgatattgtctacaaactcattggactggcaccagcaattcattag

SEQ ID NO: 22650 - protein, 410 aa, DROSOPHILA
MRVRWNHFKLLLFWLTVLAVLAFEAEARKRVRIGLHKNPEPIEENIKNELKTLSIKHNLNVDDTKAKTKTDTKVPGSKVATLENLYNTEYYTTLGFGNPPQDLKVLIDTGSANLWVLSSKCPDSVAPCANRIKYNSSASTTYRAINTAFNIAYGSNSEEGPIALSGFQSQDTVNFAGYSIKNQIFAEITNAPETAFLKSQLDGILGLGFASIAINSITPPFYNLMAQGLVNRSVFSIYLNRNGTNAINGGELILGGSDSGLYSGCLTYVPVSSAGYWQFTMTSANLNGFQFCENCEAILDVGTSLIVVPEQVLDTINQILGVLNPTASNGVFLVDCSSIGDLPDIVFTVARRKFPLKSSDYVLRYGNTCVSGFTSMNGNSLLILGEIFLGAYYTTYDIVYKLIGLAPAIH

SEQ ID NO: 22651 - DNA, 5525 bp, DROSOPHILA
attctgttacacaaagccgcatgtatgttcccagtgcagaaaggtctctcgaactcaactcgtatccaaaaccacttttctgtgcgctcgtccaacgagaattgagtgagttgctccgctgggttttgagcactttgaacgacccattttcgtggtgccaaactggtagtggaagtggcagccggtcgaagaaggacaggccccaaatggaagtgagtgcatccgctttggctgaatttttggacacagaggctatcattccgttacgattagggcgcacttaatgcccctgccctaggtcaatgaacagcgatcggtgggctagagtaaacatttagctgccgcatgtggcaaaagctaaagtcgcctgcagctgcagcggcacagtgtcaacatctggtgtttgttgcacttttttgcatcctcgcacatgtgcaacgctggcgcaacgcatgcgccctgcttgaggttgtttttttttttttgaaagcatagaactaaaaccaaagacgtgcagatacgggtataaataaagtatgtaaatgcgacgcagcaattttgacatattagcagctagctagctgagttgcatcctgagtgcattgaccgcacacaagccacacatgtcacatagcatgtgctccacggtgggggtacagtaggctctgggcattggcgtacaccacgaggatatgtttgcaaaatatgacaactctttaataaattcacttttggcttttttgtacagagtatgtttgttgtggtagacaaaagttacgtagtcacatagaactgcagttaacaacagtatactatcaaaaatataaaaatgttttcttttcggccatcgaacatgccaaaaggggaatatcaccgttaaacgccttacgaacaaggactaatacaaacttaagatactaatagctatgtagtataccccacagatgcaacacatttcaaaggtatctgatacctgggagattgtcgaccagatcagaagtcatggcagctcgtaggcacgttctgaaaggaaagttcggtaagtaaagcttaatctctttgtcctccgattcactgcttactcttaaggctcagcaatttgttggcatggcgacgtagattctcttggttgggattgcgcaggacttcagccgccgcctccttaatcatgccctcgatgctctgcagcagccattccttattggggcacgtaatagccagacggtaatcgccatccggtgtccgcgacacgttccactctgcggcggagtcgtcgcagtctcggctatcattgctctccgtgtcctccgtctttatagcaatgcaccgacgcaccttggacggctcatcttcttcggcggcttccggcacggacttgcgcttcttgctattgagctggcgttcgtcttggatgcgatcccgcttggggcacgtacatattttaacatgtataacatgctgtcccacgatatcgccgctgcaagaaagaaaacacgttaagctttgttctagccatctagagttttgctgtcaccttaccatgctttctccaggcagaagactaaggaagtttcttttcgcccgatacacgagttttggcagacgaacttgaaggccagggtctggcgcgtgagcccactgcgggttacagaccggctcatgttcagggggactacaacggaaaaacgctcggaaattcccttgccctgagcatttccacaatatacactgttgggattctcgctgcgcagcaagctctcgcgcatttttgcgttattggccgtcactaaaggtttgtacaaatgatagttaaataatcctgttcgatctgtattgttatcttcacttacaaggctcaacgctaaggtgattttgacagcggaccacgggagcactcacatcattggagaagcaaaggaacacacgcaaattaagtggttggatgggcattttagacttgaactgaacgtccacgttgaaggccttgttcatccggatgtagagcttgttcagcggaatcgagtacatccaaagagacttgggcggctcatccagaaccatgctgaagcaataaccaccgatgttgtgattctctagcttgggcagcgtgttcgcctggatctgaatgtcctgcagcatcatttcgcgcagcacggattgctgtaagcaaaaacaagatattatttgaatgtcaacttaactcgcaatcatataagggttcacactttgcgctcatagagctgatagagcttcatgttccagcttgctcgagttacaaatggactggcgatttgttttgtattctattctatttttcacaagtgcttgaaattctcgctaaacgatgacgacgggaaggagtgcaccgtgctaatcggctagataagagtgttttgttctgtcctccaactgaaagtgaacttcgaagcgactttgacgtcatgtcgctcttatgaaattgcaggcagcggctgagtcacgcaaggaatgccgcttccctcacgcttcttatgctcttttgtttgtggctagtagtagcacaacgcatgctcagttggtttctggacggccggtgaaatacatgcgtttcgcgatgtgtcccgatagtgtccggctacttgacaggtcctctagatggcatcagttgggtagttggaaaacaattaagcagatattaatgctgtggaaagtgcgctcacagtttgtattaattgttcgagagaaatggacttcaccagcgactacgcgcatcggcgtatggtgaaatttctgacgatcatactgataggctttatgaccgtcttcggactcctggccaatcgatatcgggcgggccgtcgtgaaagattccgcttctcaaaggcaaatctggcctttgcttcgctgtgggcaattgcattcagcttggtttacgggcggcaaatctacaaggagtaccaggagggtcagatcaacctgaaggacgccaccactctgtacagctatatgaacattacggtggctgttattaactatgtgtcgcaaatgataatcagtgaccatgtggccaaggtgttgagcaaagtgcccttctttgataccctaaaagaattccgtctggacagcaggtcgctgtacatatccatcgttttggctctggtcaagaccgtggcttttcctctaacaattgaagtggctttcatactgcaacagaggcggcagcatcccgagatgagcttgatctggaccttgtaccggctgtttcccttaattatttcgaattttctcaataactgctactttggcgcaatggtggtggtgaaggagattctgtacgctctgaacagacggctggaagcgcagctgcaggaggtgaatctgctgcagaggaaggaccagctaaagttgtacactaaatactaccgcatgcagcgattttgcgccttggcggatgaactcgaccagctggcgtatcgctataggttgatatatgtgcattcgggaaagtatctgaccccaatgtccttgtccatgattctgtcgctcatatgccacctgctcggaataacggtgggtttctacagtctgtactatgccatagcggacaccttaatcatgggcaagccgtacgatggtcttggatcgctgatcaatctggttttcctctccatctcgctggcggagatcacattgctcacgcatttgtgcaaccacctattggtggccacccgaagatcggcagtcattctccaggagatgaatctccagcatgcggacagccgctaccgtcaggcagtccacggctttactctgctggtcacggtgaccaagtaccaaattaaacccttgggcttgtacgagctggacatgcgactgatcagcaatgtcttctcggcggtggccagcttcctgctgatcctcgtgcaggccgatctgtcccagcgcttcaagatgcaatagctaatcgatgttacccacctggctgaactgcatcagattcccggactgcggggaataatattaaatagttagtaagctatagctttgcacattaaaagcacaactcacgtttaatccctgcaagaaggccatgggttccgtggtcctggaataataaaaacaataatagttagcaaccaggcaaaccacatgtgaccacgtgaccaggtactcacaattccgatcccgatacctccaccgttttcggaatatcctccttgatatcgacctccgtggagtcatcctcggaatcagtgctaaagtgtaaaagggaaataaaaacttagtggcaaactgcgccttggctggataaacaaacacaaacaagttggccgcgcgaatgatgcaagtacaagcgtgttgctacatgcaaggtttctactgttcgatcatcaatttgttgccgcactgtacctttctttgtgccacgacattggctgtgatatatacatcttagtcggctatatctgatcaagcgatcttgttggggaaggaggctaaatattaaaaattcgctaacaaaaaactacagaatcgtagtggccaccgactatttggattttgccattcgccacgcagcgcgaacaatcgccgtagccaatgtttatcgattggagcgcgtgttttgaatttgctcaccccttgtggcagacgaatttgttgcatgcattaattttgttattgccatcggaattattgttggccaaaatttccagattgttcgtgaactgcatcatgttgttcgtgttgttgcctccgtaggctggatccacaggcgtagccaggtgggcatattcgttggattcgttgccaaaactctgcggcaagttgaaagctccgttgctggagacccgaactgctgactctgcagaaacttcgttgccgatatcccaaaaatccaggaactccttgaaagcttcaaaaattgtgcgactattgctacgcgaaacaatcgaagtgtttctgcaaaaaggcgcaacattattttgttgggtaagaccgaataaaatatctccgctcactggttaaaagtcaagctaaacgacgcggacttgtgaagactcatggctgtgcactcaaataaataaattttatttagcagttgcgatttgtgtccgcaagaatcttccgtgctccagggatgtcaactaaccggaaattggctaacttaatgtcatatatccatggctatcgataagctatcgataaggatttggccgagtgcgaacagtgctgcccattgtgcggcaagttagaatttctgttttgaaattttttcaatacttcaatctatttattagtttgcaaataacgcgccgtatgcagcaaattggtttcactgcacagccctttgaatggtcgagcaatgtaccgtatgatttctggctcctacaaaaaattaagttttatttaatggtgaaattccaaattttagtcaaactaaatttcaattaaaacgcacgaattatacaaagcttaggcagctacggcatacggatatatttacaattctaaaaatgtacataaagcgctactggcacaaaagt

SEQ ID NO: 22652 - DNA, 1253 bp, DROSOPHILA
gtggccactacgattctgtagttttttgttagcgaatttttaatatttagcctccttccccaacaagatcgcttgatcagatatagccgactaagatgtatatatcacagccaatgtcgtggcacaaagaaagcactgattccgaggatgactccacggaggtcgatatcaaggaggatattccgaaaacggtggaggtatcgggatcggaattgaccacggaacccatggccttcttgcagggattaaactccgggaatctgatgcagttcagccagcaatccgtgctgcgcgaaatgatgctgcaggacattcagatccaggcgaacacgctgcccaagctagagaatcacaacatcggtggttattgcttcagcatggttctggatgagccgcccaagtctctttggatgtactcgattccgctgaacaagctctacatccggatgaacaaggccttcaacgtggacgttcagttcaagtctaaaatgcccatccaaccacttaatttgcgtgtgttcctttgcttctccaatgatgtgagtgctcccgtggtccgctgtcaaaatcaccttagcgttgagcctttgacggccaataacgcaaaaatgcgcgagagcttgctgcgcagcgagaatcccaacagtgtatattgtggaaatgctcagggcaagggaatttccgagcgtttttccgttgtagtccccctgaacatgagccggtctgtaacccgcagtgggctcacgcgccagaccctggccttcaagttcgtctgccaaaactcgtgtatcgggcgaaaagaaacttccttagtcttctgcctggagaaagcatgcggcgatatcgtgggacagcatgttatacatgttaaaatatgtacgtgccccaagcgggatcgcatccaagacgaacgccagctcaatagcaagaagcgcaagtccgtgccggaagccgccgaagaagatgagccgtccaaggtgcgtcggtgcattgctataaagacggaggacacggagagcaatgatagccgagactgcgacgactccgccgcagagtggaacgtgtcgcggacaccggatggcgattaccgtctggctattacgtgccccaataaggaatggctgctgcagagcatcgagggcatgattaaggaggcggcggctgaagtcctgcgcaatcccaaccaagagaatctacgtcgccatgccaacaaattgctgagccttaagaaacgtgcctacgagctgccatga

SEQ ID NO: 22653 - protein, 385 aa, DROSOPHILA
MYISQPMSWHKESTDSEDDSTEVDIKEDIPKTVEVSGSELTTEPMAFLQGLNSGNLMQFSQQSVLREMMLQDIQIQANTLPKLENHNIGGYCFSMVLDEPPKSLWMYSIPLNKLYIRMNKAFNVDVQFKSKMPIQPLNLRVFLCFSNDVSAPVVRCQNHLSVEPLTANNAKMRESLLRSENPNSVYCGNAQGKGISERFSVVVPLNMSRSVTRSGLTRQTLAFKFVCQNSCIGRKETSLVFCLEKACGDIVGQHVIHVKICTCPKRDRIQDERQLNSKKRKSVPEAAEEDEPSKVRRCIAIKTEDTESNDSRDCDDSAAEWNVSRTPDGDYRLAITCPNKEWLLQSIEGMIKEAAAEVLRNPNQENLRRHANKLLSLKKRAYELP

SEQ ID NO: 22654 - DNA, 3938 bp, DROSOPHILA
ttaatgtttccctcaagatttcatttttagtcgtaaatttagttgcttaaagttataatgttcaatattttagttaattgtcgcaattttgaatttgtaacgtacgccgcatggcgcgaaatttaaaatttgattagtagtggaagtgttatgtataaatatgatgaaaaataaacaaaataaatgcatgtattactttaagcaaatacaatacaaaatacaatatattttatttatttatttgtgttaatacccatatccacaacttgacaactcttaaattgcatttctctggcattcccttttgcttgaaatcatctgagatttattctatttttatctgttacaagaaagtgcagcaagtcaattgcaattcgctaattgaggtaagtgttttgtaaatcatagtagtctgtgaaatattagggagaatagaaagtatacttaaaacgtgacaacaaattcactgcaacaaagacactgcttgaatattgcttttctattttattcagcagttacataagagacctaggcaaaaatggctctacccgatggactttccaacaaaatgaaggttttccaggttggatatatctatgatatcttcgcatatgtattaagactcataactcataatttttgcaggccgttaacgagctgcccgtttttctgaaaggcggacctgcggataagattttatttggcattacggctggactgtgtggccttggcattgttagctttgtccacctggtctacacaatgggattcgccaaaaagaaggcctaagttatgtgtttaaatactttttcgattaaagagaaactaatgtaattaaacaagttgttttatttcgaaattcaaaaagaccgcgcaattagtattcctataaaattagtagagcaacactctttttggctcacgcaagtgtgagttaggcattttctgcatatatctcctctggtcacacgctcactggaggaaattaaaaatatcgaagtgcgataggccccgatagtttcgcctccaaataaaaacaaagaaaattcggttttcttgaccgaatttagcgtaatctaacacggaaaatcagccaaatggagcccaacgatgaggtggtggagcgacagaagctggtgaacgacgtggaaacggaggaggaagcccaaagcgcaccgaaatcggccacacccgcctcgcccgccgttccgaatgtaagataccctgggattctgctgcggaagccacttttcatcctcgtttcttgcagatcaaaatcaaaggcatatccagcggcgagaccactcgcagcagaaactcggcctcctgctccatcgagaggacgatatccgaaaaggagaaggacaagagccagggccagggtcaagcggccaccaaggtgacctatgtgaatgagcgccggccacgcccgcaggcgcacggcggcagtggcgggggtgccggcgacgaaagattcgagttcaagacccggccgcgcaaactcctgaaaggtgggtgcagccaaaaagtccactaacccatcgcttctacctttcagtcgctgtggatcgcggtttttggtgtcagctgggaaggcttcggtgttagagattacctaaacatatcaggacaaacaaacaaacattcttctactcatcaaattaatttaacaccatattttgagtacattataacccctcactcatcgcgcatgtagaaattcacaagctgccttatgtttcgccattaatgataaaatatgcggctaattgccggctatcacggccaccattgaccttcgtccgcgatgacgcactttttcggtggccatatggccggaatacatcacatttcattattcacagcccatatacacacgcttcccacccaaattcgctcgcacacagacactttgataggtgcttataatttcaattattgaaattacaagccttcgagcctctcgccgccacagctgtgtgtcctgacttttctttccaatcggttcgcttgacacggcggttgaggtttagttacagtcacttattctaagttttgagtcataatttgtaacattaatattcgtttacttataaccatagtagttgtatagcaaaatatacctttatttagtttaaatttgttcttatcttacaattgtgcaccgttttagttcatttgatgtaactcttacttatgatttcctcgtttcgtttttattttattatttgtacttccatattcccgcacttgatttgttgaccatctcatgtcgagaccagatcgtgatgagttggaacccaccaccaacagtgccaacagcctgaacgccatcaccttggtgagcagcgagtggctagcacctgatcccacagccacagacaatcacaacacccccaagaacaacaacaacgatagcacgaaacccaacaataacaatcagcacagcaatagcaatcagaacacaccgcgattgcagcgccgcaagaatcccacagcgtcgatgccaaacgccagtgcccacagcgataagttcgacgatcgtccaataaaacatcattcctttgtctccgaagttcccgatgttaagcacatggaaagagctctcctcggactgctggacgactttcactccggcaagctgagggcattcggttagtgcagtctgcaacttgtcacctttaaggtttgccaatcctttgcctttttcccagcaggctccggctgcacaatggaccagatgaccaagattcgcgagcagcaggagagcctggccaaattgcatttcgaactggctgccgccgaggaggattcgctggagcacggcaacgagttcaacaccaacaaggcgcaggagaacatgctgcagctgatgcagcgcctggaacagctatccatctccatcgagcagctgcagacgagccacacgggtctctgagatttggcccagccgcaggcctgggatcaacgcctgctctggctctgagcacacctatggggaaacgaggaatgccaaagtggagctggattgggatttcacacaagactagcgacttttcgacggtgcggacagttgggatactgtgtaaatattttaagttgtacgcttaagtgggcggattcgatgggcttctcatgctaaatagtttagcgaactcgcagtgattgtgaaactaatttagattgtcttcgcgtagccatagccatagcgttaaattattactataatagaccaagggtgccaaggggtggtgctaaaacgaattatttcattgcaattcgattcgactcgatttgattgatgtgtgtgctgcaggttatcaggcttcgataatgatgcgaatctgttccgcttattgtttgttatagttatttgcaatatacatagacacctaatcatacacatgtacgaaactcggacccattaaagttatcatttttataaatacacctttaagacttatgttgcaaagtcagttggtggaaacaaacaacgattataggtagtttaagtgaccaatagcaaacattcgaatggcctcaaaatgatttattttatgagcgatttgaaagcgtccttagtattcgcatcactcctccttcgtggcgcttggagtgccagaatttttaccagcctggtgttctaaggaaacggaattccccacaatcgagtcgcccccattccgctcccgaagacgcccactctgcatgcacaattccatttcgggatgggcacatcaattgcgagaactgaacctttggacaagtgcatgcgtacataggaaatttcagtccgccgccgcttcttgcggcttaatttatgcattcgtattcagccggtgtgctccgttccctgggctgtcatggcgatggcgatagcgcagtcgcagccgttccaagctcatgttgttgtaatccgactttaatgttgtggctta

SEQ ID NO: 22655 - DNA, 1048 bp, DROSOPHILA
tgcgataggccccgatagtttcgcctccaaataaaaacaaagaaaattcggttttcttgaccgaatttagcgtaatctaacacggaaaatcagccaaatggagcccaacgatgaggtggtggagcgacagaagctggtgaacgacgtggaaacggaggaggaagcccaaagcgcaccgaaatcggccacacccgcctcgcccgccgttccgaatatcaaaatcaaaggcatatccagcggcgagaccactcgcagcagaaactcggcctcctgctccatcgagaggacgatatccgaaaaggagaaggacaagagccagggccagggtcaagcggccaccaaggtgacctatgtgaatgagcgccggccacgcccgcaggcgcacggcggcagtggcgggggtgccggcgacgaaagattcgagttcaagacccggccgcgcaaactcctgaaagatcgtgatgagttggaacccaccaccaacagtgccaacagcctgaacgccatcaccttggtgagcagcgagtggctagcacctgatcccacagccacagacaatcacaacacccccaagaacaacaacaacgatagcacgaaacccaacaataacaatcagcacagcaatagcaatcagaacacaccgcgattgcagcgccgcaagaatcccacagcgtcgatgccaaacgccagtgcccacagcgataagttcgacgatcgtccaataaaacatcattcctttgtctccgaagttcccgatgttaagcacatggaaagagctctcctcggactgctggacgactttcactccggcaagctgagggcattcggctccggctgcacaatggaccagatgaccaagattcgcgagcagcaggagagcctggccaaattgcatttcgaactggctgccgccgaggaggattcgctggagcacggcaacgagttcaacaccaacaaggcgcaggagaacatgctgcagctgatgcagcgcctggaacagctatccatctccatcgagcagctgcagacgagccacacgggtctctga

SEQ ID NO: 22656 - protein, 316 aa, DROSOPHILA
MEPNDEVVERQKLVNDVETEEEAQSAPKSATPASPAVPNIKIKGISSGETTRSRNSASCSIERTISEKEKDKSQGQGQAATKVTYVNERRPRPQAHGGSGGGAGDERFEFKTRPRKLLKDRDELEPTTNSANSLNAITLVSSEWLAPDPTATDNHNTPKNNNNDSTKPNNNNQHSNSNQNTPRLQRRKNPTASMPNASAHSDKFDDRPIKHHSFVSEVPDVKHMERALLGLLDDFHSGKLRAFGSGCTMDQMTKIREQQESLAKLHFELAAAEEDSLEHGNEFNTNKAQENMLQLMQRLEQLSISIEQLQTSHTGL

SEQ ID NO: 22657 - DNA, 3650 bp, DROSOPHILA
tgtttccctcaagatttcatttttagtcgtaaatttagttgcttaaagttataatgttcaatattttagttaattgtcgcaattttgaatttgtaacgtacgccgcatggcgcgaaatttaaaatttgattagtagtggaagtgttatgtataaatatgatgaaaaataaacaaaataaatgcatgtattactttaagcaaatacaatacaaaatacaatatattttatttatttatttgtgttaatacccatatccacaacttgacaactcttaaattgcatttctctggcattcccttttgcttgaaatcatctgagatttattctatttttatctgttacaagaaagtgcagcaagtcaattgcaattcgctaattgaggtaagtgttttgtaaatcatagtagtctgtgaaatattagggagaatagaaagtatacttaaaacgtgacaacaaattcactgcaacaaagacactgcttgaatattgcttttctattttattcagcagttacataagagacctaggcaaaaatggctctacccgatggactttccaacaaaatgaaggttttccaggttggatatatctatgatatcttcgcatatgtattaagactcataactcataatttttgcaggccgttaacgagctgcccgtttttctgaaaggcggacctgcggataagattttatttggcattacggctggactgtgtggccttggcattgttagctttgtccacctggtctacacaatgggattcgccaaaaagaaggcctaagttatgtgtttaaatactttttcgattaaagagaaactaatgtaattaaacaagttgttttatttcgaaattcaaaaagaccgcgcaattagtattcctataaaattagtagagcaacactctttttggctcacgcaagtgtgagttaggcattttctgcatatatctcctctggtcacacgctcactggaggaaattaaaaatatcgaagtgcgataggccccgatagtttcgcctccaaataaaaacaaagaaaattcggttttcttgaccgaatttagcgtaatctaacacggaaaatcagccaaatggagcccaacgatgaggtggtggagcgacagaagctggtgaacgacgtggaaacggaggaggaagcccaaagcgcaccgaaatcggccacacccgcctcgcccgccgttccgaatgtaagataccctgggattctgctgcggaagccacttttcatcctcgtttcttgcagatcaaaatcaaaggcatatccagcggcgagaccactcgcagcagaaactcggcctcctgctccatcgagaggacgatatccgaaaaggagaaggacaagagccagggccagggtcaagcggccaccaaggtgacctatgtgaatgagcgccggccacgcccgcaggcgcacggcggcagtggcgggggtgccggcgacgaaagattcgagttcaagacccggccgcgcaaactcctgaaaggtgggtgcagccaaaaagtccactaacccatcgcttctacctttcagtcgctgtggatcgcggtttttggtgtcagctgggaaggcttcggtgttagagattacctaaacatatcaggacaaacaaacaaacattcttctactcatcaaattaatttaacaccatattttgagtacattataacccctcactcatcgcgcatgtagaaattcacaagctgccttatgtttcgccattaatgataaaatatgcggctaattgccggctatcacggccaccattgaccttcgtccgcgatgacgcactttttcggtggccatatggccggaatacatcacatttcattattcacagcccatatacacacgcttcccacccaaattcgctcgcacacagacactttgataggtgcttataatttcaattattgaaattacaagccttcgagcctctcgccgccacagctgtgtgtcctgacttttctttccaatcggttcgcttgacacggcggttgaggtttagttacagtcacttattctaagttttgagtcataatttgtaacattaatattcgtttacttataaccatagtagttgtatagcaaaatatacctttatttagtttaaatttgttcttatcttacaattgtgcaccgttttagttcatttgatgtaactcttacttatgatttcctcgtttcgtttttattttattatttgtacttccatattcccgcacttgatttgttgaccatctcatgtcgagaccagatcgtgatgagttggaacccaccaccaacagtgccaacagcctgaacgccatcaccttggtgagcagcgagtggctagcacctgatcccacagccacagacaatcacaacacccccaagaacaacaacaacgatagcacgaaacccaacaataacaatcagcacagcaatagcaatcagaacacaccgcgattgcagcgccgcaagaatcccacagcgtcgatgccaaacgccagtgcccacagcgataagttcgacgatcgtccaataaaacatcattcctttgtctccgaagttcccgatgttaagcacatggaaagagctctcctcggactgctggacgactttcactccggcaagctgagggcattcggttagtgcagtctgcaacttgtcacctttaaggtttgccaatcctttgcctttttcccagcaggctccggctgcacaatggaccagatgaccaagattcgcgagcagcaggagagcctggccaaattgcatttcgaactggctgccgccgaggaggattcgctggagcacggcaacgagttcaacaccaacaaggcgcaggagaacatgctgcagctgatgcagcgcctggaacagctatccatctccatcgagcagctgcagacgagccacacgggtctctgagatttggcccagccgcaggcctgggatcaacgcctgctctggctctgagcacacctatggggaaacgaggaatgccaaagtggagctggattgggatttcacacaagactagcgacttttcgacggtgcggacagttgggatactgtgtaaatattttaagttgtacgcttaagtgggcggattcgatgggcttctcatgctaaatagtttagcgaactcgcagtgattgtgaaactaatttagattgtcttcgcgtagccatagccatagcgttaaattattactataatagaccaagggtgccaaggggtggtgctaaaacgaattatttcattgcaattcgattcgactcgatttgattgatgtgtgtgctgcaggttatcaggcttcgataatgatgcgaatctgttccgcttattgtttgttatagttatttgcaatatacatagacacctaatcatacacatgtacgaaactcggacccattaaagttatcatttttataaatacacctttaagacttatgttgcaaagtcagttggtggaaacaaacaacgattataggtagtttaagtgaccaatagcaaacattcgaatggcctcaaaatgatttattttatgagcgatttgaaagcgtccttagtattcgcatcactcctccttcgtggcgcttggagtgccagaatttttaccagcctggtgttctaaggaaacg

SEQ ID NO: 22658 - DNA, 531 bp, DROSOPHILA
ataggccccgatagtttcgcctccaaataaaaacaaagaaaattcggttttcttgaccgaatttagcgtaatctaacacggaaaatcagccaaatggagcccaacgatgaggtggtggagcgacagaagctggtgaacgacgtggaaacggaggaggaagcccaaagcgcaccgaaatcggccacacccgcctcgcccgccgttccgaatatcaaaatcaaaggcatatccagcggcgagaccactcgcagcagaaactcggcctcctgctccatcgagaggacgatatccgaaaaggagaaggacaagagccagggccagggtcaagcggccaccaaggtgacctatgtgaatgagcgccggccacgcccgcaggcgcacggcggcagtggcgggggtgccggcgacgaaagattcgagttcaagacccggccgcgcaaactcctgaaagagttcccgatgttaagcacatggaaagagctctcctcggactgctggacgactttcactccggcaagctgagggcattcg

SEQ ID NO: 22659 - protein, 142 aa, DROSOPHILA
MEPNDEVVERQKLVNDVETEEEAQSAPKSATPASPAVPNIKIKGISSGETTRSRNSASCSIERTISEKEKDKSQGQGQAATKVTYVNERRPRPQAHGGSGGGAGDERFEFKTRPRKLLKEFPMLSTWKELSSDCWTTFTPAS

SEQ ID NO: 22660 - DNA, 2738 bp, DROSOPHILA
gcgccgaaccgatttcgccaagcgagaaaaatacccagaacggatgcggaaaagcacaaaaaataaggggactgcaacacttgactttccatgttgtttgaagcaataaaatgctattctcaagcagtcgcattgatatgccgccactggggaaaatggaggaaatggaggagcgcggaaaatatacttggtatacgataacaatgccagctcctctcagctgagctcctgctaaggataagaaccgggctcagtgcagcggagcgcatcaattccgccatttccatttcacaattcaaaatgcgaaatccgttgccaggacgagagatgcacaattgcaacacaaattattacttggcttcgctccagaaggccttaaattacaatttgcgaaatatatgtatacgtcttgcacagcaggtttcccagggaaagcgggtagcggaaggcggaaaaactgcagccacaggaagccatttagttcggcttttcacccccacggcgtggccataattctttcataaaaatcaacagccaaatggcaactgttgtctgtcgcccgaaagataaactttgctcaccacttttgtaaataatttattttcactggtcaccactgagtatgcttgataatcgtaattactgtaagaggttcccaagaaatggcgaaagaaaagcatttctctgggaaattaatggctgcaactctcacagctatatttgaacagccaatttgctatgaaaaaagtatttataacaccgcagcaaaaaaatatgttaatttaaatgatataaccaattactatgccaacctgactacgaatttatctgcctccacaatcatgctctaaaatttgaatcagtaaatctaaagtcgtatgtaaaacgaaagcgtgactaaacaaaaatatcaaaattactctatataagataaagcaaaatgcattttgttagtagtctgtgatctctacgcggtggttgtagaaagtatttcttcaaaatgctgctcaaaggcattcttctattagtttccattgctcaaatagcagcagatttcaaatcgattggcattgaacaagctccctggcaggcttccgttcaaataaacgacaaacatcactgcggaggagtgatatacagcgaagatatcatcctgaccattgccgagtgtgtgagaaaggccagattggaattcatctcggtgcgagtggggtctgcccaggaaaacgccggtggcactgtgctgaaggtcgagaagatgaggctgcaagtacttggcctgcgtcccagtgatgtggccatactccagctgagatcgccgctgtacttggacggcggaattcgggccattcccttggccaccataccattagtgccgggaacgaatgcctccgtttcgggttggggtcaactctctgccatgaatccttcgtcggaagttttactgagagtcgatgtaaaaatccaagatcaattgatgtgcgcgacaaaccttgctctgaagggcagacttatgagtgtgggcgagatctgcgcagcacctgcgggagaaattccctacgcctgtcaaggattcgtcggcggtcctttggttgccaataatcggctgtatggaatcctttcctggcaaagtgcctgcgacgtcctcaataaatctagtgtctatgccaatatcgcgatgttcaaagtgtggattgaatccactgttaagctaatgaatttcttcagaataggctaggcattttaaaacgacctttaaaatatacgtttaaaaaatcaacagtttgtgctgcacaaaattggtcaaattgttttcgctcaaccataaaacgcacacacatcgttttttatttgctggtttcgctgcgaaattgaaatttaattcatttgcattttttctatgatctgggagagagcggcacagatgaacattattaatacggcccataagcccaataaatgctcatgattccccgcgttgttctcattttggttcctgctctcgctgtatggctgtgcattttttatggttatgagcctcattgtgttggccattaaaattggtattgttatgaccgttgtcagccatgagtcatgaggggtttgacccacagcggaggccagagccactaaggccagggatgcagctggcgatcaggaggggattttaaaacgaacatctagatagataaaggatatttaagaaatacattgctatatctggtaacttaactcaagatcatcttaaaatttaattttctttcagtaagaattataatctggagctattttatgaatataaaactatacttatacttaaaactttacttatttctctccatccaagacaaaaaaacacagttttgatttcagcctggattggtttaaaatcggcttaactgcaaccctgcaactcaaatcagcgggaagagcagcatctgcattgtcagcttaataattacaacacgcatacgagcgcacacacacacacactgacaaacaatggccgctgcatctgtgtgcaatttgaacatgggatattcgctggcgaagtgaaaaactgaagggaaaaacctgctggaaaactggcagacatttgcacgtcgtcagcgtcgacacattaaaataaatgagacttttgcctttaagcagctgctcttgttggtgtttctgttcttgttgttgctgttgttggttgctgctgctgttgttgcagttgcaattattattgccgctgt

SEQ ID NO: 22661 - DNA, 738 bp, DROSOPHILA
atgctgctcaaaggcattcttctattagtttccattgctcaaatagcagcagatttcaaatcgattggcattgaacaagctccctggcaggcttccgttcaaataaacgacaaacatcactgcggaggagtgatatacagcgaagatatcatcctgaccattgccgagtgtgtgagaaaggccagattggaattcatctcggtgcgagtggggtctgcccaggaaaacgccggtggcactgtgctgaaggtcgagaagatgaggctgcaagtacttggcctgcgtcccagtgatgtggccatactccagctgagatcgccgctgtacttggacggcggaattcgggccattcccttggccaccataccattagtgccgggaacgaatgcctccgtttcgggttggggtcaactctctgccatgaatccttcgtcggaagttttactgagagtcgatgtaaaaatccaagatcaattgatgtgcgcgacaaaccttgctctgaagggcagacttatgagtgtgggcgagatctgcgcagcacctgcgggagaaattccctacgcctgtcaaggattcgtcggcggtcctttggttgccaataatcggctgtatggaatcctttcctggcaaagtgcctgcgacgtcctcaataaatctagtgtctatgccaatatcgcgatgttcaaagtgtggattgaatccactgttaagctaatgaatttcttcagaataggctag

SEQ ID NO: 22662 - protein, 245 aa, DROSOPHILA
MLLKGILLLVSIAQIAADFKSIGIEQAPWQASVQINDKHHCGGVIYSEDIILTIAECVRKARLEFISVRVGSAQENAGGTVLKVEKMRLQVLGLRPSDVAILQLRSPLYLDGGIRAIPLATIPLVPGTNASVSGWGQLSAMNPSSEVLLRVDVKIQDQLMCATNLALKGRLMSVGEICAAPAGEIPYACQGFVGGPLVANNRLYGILSWQSACDVLNKSSVYANIAMFKVWIESTVKLMNFFRIG

SEQ ID NO: 22663 - DNA, 7003 bp, DROSOPHILA
tttataacatatttttatgaacatatcaaagcaaagagtaaaagaactctaggaagatgcgaatttttagttcttgattaaataccgtaaaataacaattttttaatatacatataaataattagcaaataaaaaatttcaaaatttccacgaattcgttaaatctaaattgagatcttataagcatactattaatattattaatatccatctggaaacaacacaaaaaaccgaaacgcaaacatatcatgcccaaagtaatatttttaagagataaattgtaaatgtggatactacagaagttttaaattgaaataaatgttctcgaattttaatattattggcaaatctttaatataatatgttttttatggtgtcaaggggttaaagtattgaaaggatgggaaacatattcatacgtcattattttcacgattttttccgtcaagtttgtatatattttcgtgaccacgggccagcaaatattcacgatatattttcttttgagtttattttatgtgactgcggattttttcattgccagaatttgggcgtttttaaaatttatggcaatcaccaatatagatttatttatggaactacaactaagtggtacacttagagcttctattgctgtgacatttttgaactagtattaaaaaagccctgcggttaatcacatgaaaattaggcgcgccatggaagcgataaataataactcatttgtttaaaccattattaacaaccccattgtctgtgtgataattgaatttgttgaccaaatatttgccagtgatttaatgatttcatttgggtctagaggtgtttagatctggaacattttatagactcataaaattgttgctataaccacactatagtcgttctatagtgtttgccccagataacatatctaagacaatttaaatttcggaaatctcggctccatagggccatccacataatttagctgacattttcacagaagagaccagccagcatggacacctacagattcggaacggttgactacacggtcttcctgggcgtgaccatactatccatcgccataggattgtatttcggttggattaagtgagcaggatgctgcatattaatactacaaactaattttaactattgaatgcaccatagaaaaaccaaaaaggagatggaatccagcccagcggataccccggagatatccattccgaacttcggatcgaaaaagatgaacgagtatctgatgggttcgggccatctgaaggttttcccagtggcaatgagcctgatagcgaggtgagaaaatcggctacactggatattatattattgtataatattattccttctgtttagtttcatttcgggcgttgcaatactgggaaatccttccgagatatactactatggaacccaatattccctgattgtcctagcaattgtcatccaaggattggctgtttcatacatctacttgcccgtgttttcggcccttcaagtgcggtcatcctatgaggtacgaatgccagcaaattgctcctatattttcttaacgtgtttttacctagtacttgggaatgcgctttcatccgcttatacggaatatagtatcaataatgtttgtcatcgaagtggtaagttgtactcatctgcaaattccagacagtattcaatagattatacatttcagctactttatacgccttttgtggtctttgtgccagccctcgcattgaatcagggtaagaactattcgaacgactctcgcatgattcaacttgaactttgtgttgtctacagcttccggtctaaatattcacatgatagaggtgctgatcattgtggtgtgcgttatatacactctattggtaagataattcccaaagttcacagcactttgaagcttatgaccaacttatcacctgcagggcggtctcaaggcagtggtgcatacggacatctggcaggtggttatcatgtttgcctccgttgtggttgtggccattctggccacctgctacatcaccgacctagatgacttcttcgaaagcctggtggacggcggacgcctcatatttggcaacatcaatccctcgccgtatgtgcgcaatacggtttggagcgtggtgatcggcggcgctttctactggacctcgattacggcggtgcaccagactatggtgcatcgctacatgtccttgcccaacttaaaaatggccaggacttccattgccttttttgtcctcggatcgatcatcttttactcggttctcagcttcttgggactgctcatctttaacatgtacaaggactgtgatccattgagtgctggacaaatcatggtgggcactcgaactgtttttcaattgttaaggacatgcgtctataatgtttttttttcgatatgagcagaataacgatcagctggtgcccctcttcgtggtccagagtgtcggtcacatctatggaatcccagggcttttcatagccggtatttttggagctggcctgagttcgctttccgtgttcctaaactccacctccttggtcatcctgcaggacatagtccgtggctgtttcaagatgcagccgggcgaaactgcatccgcgattatcgttaaagccacaatcgtgatcatgggcgcattggtattcggtgaggtgcttctgctggagaaagtgagtggcatcctgagcatctgcatgtccctggtggccatcgcaactagttccaccttcggcatatttaccctggcagtgctggttccctgggcgaatacagtgggcactgcggtgggcggaatcgctggcttcctcctgaccggatggataactttcgggtcgcaaattgcggcggcatccggacaactgcatcaccatcggcttcctgtgtccgtggcaagttgccccggtaatgtgactgctcgcgaaaatgtttgggtggacgaggagcaggtgtttccacttttccgactctcattccactggataaacccaattggggcacttacggttgtcgttgtgggttctctggtctctctggtgaccaaacccacggatatcaagagcctcgactcggatttgatatctccagtgatccacaggtaaaacttaaatgtgaagacacatttattacaaatattaaggtttttgtttcaactctttgttttagattccttccaaaagaatgctttaaacaacgcaatcttgataaaagtgaggcaaccgatatttacactatcacctaaaattagcttttatattgtttataaaagtaatgaatgtggaaaacgtgtgttccataaaatattccgctgacctaatttatgtgacactttcgatttcaaacataaaacgctataattctatttatagatttaaaagaaacctatacaatacgtaaaaaatgttgttcttttctcaagattttaatgaaaattctagtagtttaccatcaccagactttttctcgagggcattgaaaatatatggtttgttttaatatttctacaagataagttaattctgcttaaagctttcgttggtttgacactttagcagaaatattaaaataaatcacattaaaataggcgatccatggaaccggtaagtagaaactcgtttgtttaaactactatttaaaaatccattttctgtagacgacattttttggcagtgctttacgcattttagaggtgtttagacctggagcaatttatttgactcacaaaagtggttataaaaaagttttcataaaaactctttagtgttcggcgcagataacatatctaagacaattcaaatttctgaaatctcagctccattgggccctcgacataatttagttggcattttcacagaagagaccaaccagcatggacacctacagattcggaacggtcgactacgcggtcttcctgggcgtgaccatactatccatcgccataggactgtacttcggatttattaggtaagctgcattaaattaggtaaattgaatatatcatattgatatgttacttctttatattaatagaaagagcagaaatgggccaaaaaccacgacgccaactaatgaggcacctgaaaggcgtcatcagaactttggatcgaagaagatgaatgactatatgatgggatcgcgcaatcttagggtttttcccgttggaatgagcttgatagcgaggtaagctcatgaccttagaccatcttattccttacctaataacttaaaacctcttatttattcgtttttagctgtatatctgcggtggcgatcataggcactccttctgagatttataattatggcacgcagtactgctttatagtcatagctctggttctccaaggacttgcagtatcgtatatctatttacccgtgttttcggctcttcaagtaacctcttcctacgaggtatgtagctctgcaggcaaacctattagctcctaaattgtttatgtaataaccagtacttggagatgcgttttcattctgccatcagaagcatagtttcgatcatcttcatcctggatgtggtaggtaaaatctaaatataagctataacttttcgttggctaattaataagttttaggttctatatttgccgttcctcgcttacctgcccgccttggccttgaatcaaggtaagtctaataacagttgcaagctccactttactcgaattaatcactattatttaccgcagtttctgggatgaacatgtacctaattgaagctttcatcatagtgatttgcgttatttatactgtcttggtaagctacttcattggaatgctaactaattaatattgaatcaactttcttgaagggcggtctaaaagcagtggttcatacggacatctggcaggttgtgatcatgtttgcttccgttctaacgattgttgttctggccacctgttacatcgacgaccaagctgactttcttgaaggtcttgtgcgcggaggtcgtctgatatttagcgagaccaatccctcgccctttgctcgtcacaccgtttggagcgttgtcatcggcaacaccttctactggacctcactgaatgcggtgcaccagaccgtggttcatcggtatatgtccttgcccactctgaagatggcacgagcctccatcgccttccttgtagttggagctgccttctttatttcacttctctgctatttggggttactcatattccatgcctacagggattgcgatccgttgagtgcgggattgatcatggtgagtaaactcaagatgagatggtggtcagaatgctaattctttgccccgttccagaacgacgatcaactggtgcccctcttcgtggtcaacagcttaggccatgtctatggaatgcctggtctatttattgccggcatttttggagctagcttgagttcgctgtccgtgtatctaaactcaacgtcactggtgattctgcaggatctagtacgtggttgtttcaaaatggagctaggggaatgggcatccacgatagtggtcaagggcagcattgttgtattgggacttctcgcgtttgccatggtattcgtccttgagaaggtgagtggcgtccttagcatatccgtctctttggcggccattgcggctagctccactttcggcatcttcaccgtgggtatgctggttccttgggcaaatacagtcggcacggcagtgggcggcatcgccagtgttctgctaacaggatggatatccttcggatctcagttcgctgcggcatcgggacaactgggatcccaacgacttccggtctctgtggaaggatgcttggccaatgctagtgttgctgaaaacgcttgggtggccgaagaggaggtgttcccactttaccgtctttcctaccactggataagtcccatcggagtgcttacagtcgtcgttgtgggctccttggtctcgctggtaaccaagcccacggatatcaagagcctcgactcggacttgataactccagtgattcacaggtaattgcatgaggataaacattatcagtatagtttatagaaatccatattcatttcaggtttcttcctaaagaatgcttcgaacagggaaatgcggaggaaaactctgtcaaggataacccactgttattttaaaaaaaggattaaatgtttaaccaactaactaacatttggggaatcatcttttaaatatcttagaaagtattaaacaagttgaatatttaaaatttcaagattgaatctctttcgaccattgagaagagagaactgcatttgcattgcaattatatttgtttgtgccgctctcgcacacactgacacaaaagcgcatcaccggaggggcaacaaaagcaagagtgataaagcaaacgagagcaaagaccgcgccaaaggcaaaaaacagcgcaagcgagggaagtggtgtggagtcattgtagtccgtgtgggagagcgggggaggggcaaccatggtggggagaaccagagcgcaagtatgccgcacacacacactcgcacagccagcgaagcagtcagagtggggagcgagagtggggggggggcatcgcgcaatgagcgcgtgtaccgtactgagaacagcgtaatgtaaaatcgtcgctctccccaaaactgagagcctgttggcattcagtacattttgttacttttgtgcacgcagctctcgaccgatgatgggaaaagcaacaaaagtgaagcaggagcgcgcatttgcaaggggaatttacgtggctcgcaggagaatgtggagttgtaatgtgggggccctggcctgctccttcggacgggttcttcatttttgctgctctcgtaaggcccccttacgagatcctgtaaaaaaagcaccgtacatatgtgtcgtaatggaccctaggggcaatcttcgctcgcatggtgcatggttgtgttacattgggaaaaggagcccagatttcgcagccgagcgatgcacttgccaggcgaaaaaaatcacagtcggcgcgagcgag

SEQ ID NO: 22664 - DNA, 3000 bp, DROSOPHILA
atggacacctacagattcggaacggttgactacacggtcttcctgggcgtgaccatactatccatcgccataggattgtatttcggttggattaaaaaaaccaaaaaggagatggaatccagcccagcggataccccggagatatccattccgaacttcggatcgaaaaagatgaacgagtatctgatgggttcgggccatctgaaggttttcccagtggcaatgagcctgatagcgagtttcatttcgggcgttgcaatactgggaaatccttccgagatatactactatggaacccaatattccctgattgtcctagcaattgtcatccaaggattggctgtttcatacatctacttgcccgtgttttcggcccttcaagtgcggtcatcctatgagctactttatacgccttttgtggtctttgtgccagccctcgcattgaatcaggcttccggtctaaatattcacatgatagaggtgctgatcattgtggtgtgcgttatatacactctattgggcggtctcaaggcagtggtgcatacggacatctggcaggtggttatcatgtttgcctccgttgtggttgtggccattctggccacctgctacatcaccgacctagatgacttcttcgaaagcctggtggacggcggacgcctcatatttggcaacatcaatccctcgccgtatgtgcgcaatacggtttggagcgtggtgatcggcggcgctttctactggacctcgattacggcggtgcaccagactatggtgcatcgctacatgtccttgcccaacttaaaaatggccaggacttccattgccttttttgtcctcggatcgatcatcttttactcggttctcagcttcttgggactgctcatctttaacatgtacaaggactgtgatccattgagtgctggacaaatcatgaataacgatcagctggtgcccctcttcgtggtccagagtgtcggtcacatctatggaatcccagggcttttcatagccggtatttttggagctggcctgagttcgctttccgtgttcctaaactccacctccttggtcatcctgcaggacatagtccgtggctgtttcaagatgcagccgggcgaaactgcatccgcgattatcgttaaagccacaatcgtgatcatgggcgcattggtattcggtgaggtgcttctgctggagaaagtgagtggcatcctgagcatctgcatgtccctggtggccatcgcaactagttccaccttcggcatatttaccctggcagtgctggttccctgggcgaatacagtgggcactgcggtgggcggaatcgctggcttcctcctgaccggatggataactttcgggtcgcaaattgcggcggcatccggacaactgcatcaccatcggcttcctgtgtccgtggcaagttgccccggtaatgtgactgctcgcgaaaatgtttgggtggacgaggagcagaagagaccaaccagcatggacacctacagattcggaacggtcgactacgcggtcttcctgggcgtgaccatactatccatcgccataggactgtacttcggatttattagaaagagcagaaatgggccaaaaaccacgacgccaactaatgaggcacctgaaaggcgtcatcagaactttggatcgaagaagatgaatgactatatgatgggatcgcgcaatcttagggtttttcccgttggaatgagcttgatagcgagaagcatagtttcgatcatcttcatcctggatgtggttctatatttgccgttcctcgcttacctgcccgccttggccttgaatcaagtttctgggatgaacatgtacctaattgaagctttcatcatagtgatttgcgttatttatactgtcttgggcggtctaaaagcagtggttcatacggacatctggcaggttgtgatcatgtttgcttccgttctaacgattgttgttctggccacctgttacatcgacgaccaagctgactttcttgaaggtcttgtgcgcggaggtcgtctgatatttagcgagaccaatccctcgccctttgctcgtcacaccgtttggagcgttgtcatcggcaacaccttctactggacctcactgaatgcggtgcaccagaccgtggttcatcggtatatgtccttgcccactctgaagatggcacgagcctccatcgccttccttgtagttggagctgccttctttatttcacttctctgctatttggggttactcatattccatgcctacagggattgcgatccgttgagtgcgggattgatcatgaacgacgatcaactggtgcccctcttcgtggtcaacagcttaggccatgtctatggaatgcctggtctatttattgccggcatttttggagctagcttgagttcgctgtccgtgtatctaaactcaacgtcactggtgattctgcaggatctagtacgtggttgtttcaaaatggagctaggggaatgggcatccacgatagtggtcaagggcagcattgttgtattgggacttctcgcgtttgccatggtattcgtccttgagaaggtgagtggcgtccttagcatatccgtctctttggcggccattgcggctagctccactttcggcatcttcaccgtgggtatgctggttccttgggcaaatacagtcggcacggcagtgggcggcatcgccagtgttctgctaacaggatggatatccttcggatctcagttcgctgcggcatcgggacaactgggatcccaacgacttccggtctctgtggaaggatgcttggccaatgctagtgttgctgaaaacgcttgggtggccgaagaggaggtgttcccactttaccgtctttcctaccactggataagtcccatcggagtgcttacagtcgtcgttgtgggctccttggtctcgctggtaaccaagcccacggatatcaagagcctcgactcggacttgataactccagtgattcacaggtaa

SEQ ID NO: 22665 - protein, 999 aa, DROSOPHILA
MDTYRFGTVDYTVFLGVTILSIAIGLYFGWIKKTKKEMESSPADTPEISIPNFGSKKMNEYLMGSGHLKVFPVAMSLIASFISGVAILGNPSEIYYYGTQYSLIVLAIVIQGLAVSYIYLPVFSALQVRSSYELLYTPFVVFVPALALNQASGLNIHMIEVLIIVVCVIYTLLGGLKAVVHTDIWQVVIMFASVVVVAILATCYITDLDDFFESLVDGGRLIFGNINPSPYVRNTVWSVVIGGAFYWTSITAVHQTMVHRYMSLPNLKMARTSIAFFVLGSIIFYSVLSFLGLLIFNMYKDCDPLSAGQIMNNDQLVPLFVVQSVGHIYGIPGLFIAGIFGAGLSSLSVFLNSTSLVILQDIVRGCFKMQPGETASAIIVKATIVIMGALVFGEVLLLEKVSGILSICMSLVAIATSSTFGIFTLAVLVPWANTVGTAVGGIAGFLLTGWITFGSQIAAASGQLHHHRLPVSVASCPGNVTARENVWVDEEQKRPTSMDTYRFGTVDYAVFLGVTILSIAIGLYFGFIRKSRNGPKTTTPTNEAPERRHQNFGSKKMNDYMMGSRNLRVFPVGMSLIARSIVSIIFILDVVLYLPFLAYLPALALNQVSGMNMYLIEAFIIVICVIYTVLGGLKAVVHTDIWQVVIMFASVLTIVVLATCYIDDQADFLEGLVRGGRLIFSETNPSPFARHTVWSVVIGNTFYWTSLNAVHQTVVHRYMSLPTLKMARASIAFLVVGAAFFISLLCYLGLLIFHAYRDCDPLSAGLIMNDDQLVPLFVVNSLGHVYGMPGLFIAGIFGASLSSLSVYLNSTSLVILQDLVRGCFKMELGEWASTIVVKGSIVVLGLLAFAMVFVLEKVSGVLSISVSLAAIAASSTFGIFTVGMLVPWANTVGTAVGGIASVLLTGWISFGSQFAAASGQLGSQRLPVSVEGCLANASVAENAWVAEEEVFPLYRLSYHWISPIGVLTVVVVGSLVSLVTKPTDIKSLDSDLITPVIHR

SEQ ID NO: 22666 - DNA, 2874 bp, DROSOPHILA
ttgttttccttttttttttgtaagaaagcaaacgtgtttaatatttacaactcccacttaaaatgctgcgcaaaacaccaaaacctgcaatttggaaattcatcaaaggaagtgccaaaacactgtttgtcctcgaggcagtctgcttcgcagccagctacggcgtttattatcgcatgaacacgaatcgaggtgggaggatatttatataattattttgatcgttaataacaatccgctcctagagtttcgtcagcatattcacgagaactatcccttcgttttggactattactacaaaattggtgaaatcgtcggagacagcacagtgcgacaggcggatgcgagttattggagtgctttgaagaaaagcgactagaggagaccgcttccaaaatgcttagtaatccctactttaagtccgttttgtggctgattggcttcggaggaatggggtacggcctaatggtgttaaccgagccgaacgtcgacaagttagagcgcatcaaagcctccgtttcaagtaccaaactgagtgcggatgagcagcgaaaggctctgtttatgaagaagctccaggaggcgtccaccaccagtgccccaatctacaggtcatcgtccgagaaataggatagttaggaagcttaatcgtcatcaatttatcaatttgttatactttttaaatacaaatgttaagcatttaatcttaattggttgggtagggtgattcattagaagaaaattcgattcgtacaagaatgcgaaataggaaaaaggaaataaaattactaaattgttaatattcacgttttaaatgtttacagagcccttactacttctgttacttttaacataatctgttaggaatcttgaccacccctactcgcagtgctcgtaaacgtccgattcttaacagcgaatctaatctaagcgcaattgcattttaatggtaatttaattgccattattgacagagtttatggcaacgaagacgcacacaatgtccgcgggggatgtccccttggtggcgatggccaaggttccgccgaccattcagtttgaggccacaaagaactttcactcgcacaccgagcagaaggaattggacagtgctttcctgggctacaatcgacgtccttgggttcgccaaaaggctcacagggacacacgccgggagagggagatcctcaacggtctactgtgctctaccagcgtggaaacggactacgccagcacctgtgtggacaaacttattgccgagaacattaactatctggatttggcctctctcaccgacgaagatttggaactcttcgggttcaagtgtcgaaagcaacggcaacagctcctggagatgttcgaaaagattcccaaccagaatcccagttacgaatacatttgcaaccatcctgaagccgaaaactacaacaatcagattctgggcaatgctggcaaccactttatgtccctgcgcgcttctttagcggccaccaactacaagctgcaggtctccactcccgaggacgtcgtggtgggcgacaaacgatatgccagctgctttgcccaggaaactctaaaaagcgtgaatcagatcaccgaagagattgccaaggatctcgcgaaaatcgaagctaatgcccagaacgcaaggagccagaagaaagtgcagggcaacgagagtcacaagaaggtgaatatagcaagcaataagaaattattttcctttatacaaatttgcattgcagaagaagtggagcctggctactattttgtattacaccaccttggctgtgggattttcgtgcgcctggttctggtggtggaccaagttccgcagcgctccccgactggagcggatctccgttcagacttaaaaaaaacgcacaacgatgcatttaatagttacattccgattttctcataggacctaagtttatagaatttacttattacttctttaagcattcgcttaatctaaagctgtaatgaagttttactgcccaacatgaacatttgatagaaaccatatgttgtattaagttgaaaaattgtttaatttattgccttaaactgacttcttcggcaaggagaagaaaccccagatggacataggagtccacgtgctcgggaaattcccataaagttgtgtgcgcaatgagctggcttctttcagtcgagtgagcaatgttacctataagaaaagtaacatgattatatttaagatggtaaatcgaatttgagaaattaatctgtgcttctttgaattttcaaacgtattaaaggggctgctttcgacaaagaggagctttattattcctaccggcaacttccattttgaccagagcctccttctcatatctttcggatagctccttcgcgaaaaccacgaattgctgcaacttccaggacctgtagaatatcgtatccgctgcagatcccggtaattttaatatgcctctcagttgtcttagtatctcctttgtattatttgcgatatccccgaaaatagaggctatgatggccaacttgttgcagggaagtaggagatcatctgggtaaagggagctgccttcatcctggcttttctccagacacttggtcttcttggcttcgatagtatagcaaatagaggtgccccgctgatgggccagctgccatttagcgtagttatcctggagttgtttgactattgtttccaatctggttttgcaggtggctaaattcgcatcgtgactcgtgggcgattgcaggcgctggctgtccaaatctggaaacgatgcaaagaaataataaccttttttgtctttggagccaacttacatcgaactggtgtgaaggaaccatttatattcggttcacttgctttttgcggcg

SEQ ID NO: 22667 - DNA, 819 bp, DROSOPHILA
atgtccgcgggggatgtccccttggtggcgatggccaaggttccgccgaccattcagtttgaggccacaaagaactttcactcgcacaccgagcagaaggaattggacagtgctttcctgggctacaatcgacgtccttgggttcgccaaaaggctcacagggacacacgccgggagagggagatcctcaacggtctactgtgctctaccagcgtggaaacggactacgccagcacctgtgtggacaaacttattgccgagaacattaactatctggatttggcctctctcaccgacgaagatttggaactcttcgggttcaagtgtcgaaagcaacggcaacagctcctggagatgttcgaaaagattcccaaccagaatcccagttacgaatacatttgcaaccatcctgaagccgaaaactacaacaatcagattctgggcaatgctggcaaccactttatgtccctgcgcgcttctttagcggccaccaactacaagctgcaggtctccactcccgaggacgtcgtggtgggcgacaaacgatatgccagctgctttgcccaggaaactctaaaaagcgtgaatcagatcaccgaagagattgccaaggatctcgcgaaaatcgaagctaatgcccagaacgcaaggagccagaagaaagtgcagggcaacgagagtcacaagaagaagaagtggagcctggctactattttgtattacaccaccttggctgtgggattttcgtgcgcctggttctggtggtggaccaagttccgcagcgctccccgactggagcggatctccgttcagacttaa

SEQ ID NO: 22668 - protein, 272 aa, DROSOPHILA
MSAGDVPLVAMAKVPPTIQFEATKNFHSHTEQKELDSAFLGYNRRPWVRQKAHRDTRREREILNGLLCSTSVETDYASTCVDKLIAENINYLDLASLTDEDLELFGFKCRKQRQQLLEMFEKIPNQNPSYEYICNHPEAENYNNQILGNAGNHFMSLRASLAATNYKLQVSTPEDVVVGDKRYASCFAQETLKSVNQITEEIAKDLAKIEANAQNARSQKKVQGNESHKKKKWSLATILYYTTLAVGFSCAWFWWWTKFRSAPRLERISVQT

SEQ ID NO: 22669 - DNA, 6779 bp, DROSOPHILA
atctgctcgacctagtcaagtatggactgcccagcacggagaacttgtacgtccataaggactacgtggtttcgcaggacctgcgcacgaacggcgtcagatggatttgtgagcatttccgtggggattatcaaagggtatcgtcggatggaggcggatatagcaccatgaatcttcgctacaatgatgtgtatgtgctgagctgcggttcgatgagcatatgcaaggcgttcaagcggaaaatctggaacgatctggagaactacgtgtccagcatggccaaggagtttggctcagtgtacgcctacactgggccgatatacaccccaacatgttacgagattggcaaatggaccatgaagtatgaggtgtttgactggattccgataccagtgccatcccatttctttaaggtattaatcgtggagagtggagttccgggatcccaacccttcatggaagcatttatcatcgaaaacagccgaagggttggcggcaagttgaatgaccaccgcgtcaaagtaggcgaaatagagcgttacacaggactgcgatttaacaagatcatgcaacccgtagtccaattcgggaaggactcatttacggtggacaccagggcttgggccggcaggttggaggaaatttctgagcctttggtaacatttcctcccgaccagaaattaaatttaatataaacccctgaatgtaaggaatattttgataaaattgtgaaaatatacatatttattttaaatgtactttgattatatcttattcacttatttattttaacccaacgtatttaatgacgtcactgcattctattgcaccaccttacacataacataactcgcagctgttcgctaacagcagcgctgttaagttcaacacgattatcgattcggcgatggcagccgaaagagcacaatcgattgacattcgattttccactgccgattaccgatagcttacgtggcaaggcaaaaagagcaaaaaagatcgaattagggaactgacgtggaagttcgtttagctcgaaattattcttgtttttcaaccagcgatcgtccgccgcggccgtcgagagttgaggccaacaccgagtggccaaaatcgaggagtcagtggtcaggaatcaggccgagcagcccccgaaattgctaaatcgccgtggcgaactttgagccaatccgtgtgtgttttctcttcgttttccgtgaaagttgtttgttggcttagcgtcgaccctctccgctaaaacccaggtgattaatccgggccagaaatgaatccgaatatgtacgggccaccgcccacgcagttccagcagcaaccccagtttggggctcctcctccgaattccggaggttggccaccgcagcaacaacaactaccgcagcagcagccgccgcagcaacaactgcctccgcagcagcagcaacaacaaccacagtacggagcaccaccaccaacgtcggcggcatcccagccttacctcaatggcaactaccagcagcaggtgaatagatagccttaaccatggcagctttgacgagaatcggaagacaatccggttgcacacgtcaaatatatgtgtattcccttcagcttcattctggcaatagcctattgagctagtcgataataagaatagggttagaatctgaaaagcattgcagaattacgttactcttttgaaccaattggccaccttgatatacagatattcaatgggaagtatctcaatgacgcacaggaatacctaaaccaagacagtatttttaagtttagaaatttcggctgcgagcacttcattcagtaaaagaggtcatccgtgatttcataatagaagagtgaagctgagcttgtagataagaaaaatgaagtgaaattaataaaaaaaaaaaaaaaacattctctcttgcagttggccacgtcgatgggaggtttgagtgtgggtggcggtgtcggtggggccaatcccctgaagccaccactcccccaaggagctcccgctgctgcggcaccaccgccaaccggtttcaatcagtttaactctaatgcagcacctcctccgaccaacaacaacaatgctgcattcggtgctccaccaccgacgcaagctggaagttatgtcaacggagccctaccgcccagcagtactccacaaagcgtggccagtgggattaatcagatgagcttgaacagcgccactttggcgggattgccgcacatgccgccaccgaaagcggcaacgccgggagcagcacctggtcagcctccgattccagcagctggatctacttctcagccgcctctacccggacaaccgccacttcccggacagccacccttttccggtcagattcccacatcccagcctgccccaagtccgtatggagtaccgagctcacgaccgggtcaaccccagctacctcctggagccactcctccaacttacacgcaacccggattgccacctcagcagcagcagggaatcccgccattgcagcagccagggataccacagcagcagccgggatttcccccacagcagcctggactgccaccactatcccaacccgggttgcctccgcaaccaggagcgccttacggagctccccaacaaggcggatattcaggtggctttccaggtcaggctcccggaggcttccctggagcacctccaccgcttccaggtcagcaagcagctgctccgccgcaattcggagctccacaacctggttatccgggccagcaaccgggctatcccccacaacccggtcagcagccgatgccaggatatccgccacaaccgggacagcaactaggaggaccaggatatccacctcagccaggtgccggttttccaggtcagccaggacgtcctggctttaatgtaagtcatgattattatttgtaacaaggttttaactaattgctttataactattttagcaacctcccatgccaggagcaggaaatatgtatcaacaggctccgcaggcacgacgccttgatcccgatcaaatgcccaatcccatccaggtgatgattgagaaccagcgattgtctggaggaccgtttgtgaccaaccagccaggattgctgcctccattggtgaccaccaaattcgtggttcacgaccaaggcaactcttcaccccgcttcctgcgctcctcgctctattgcatccccaacacgggtgatcttttgaagaccacagctctacccctgacattgaacatctcgccgctggccaaagttggcgagggggaaatggagccaccgattgtgaacttcggcgaaatgggaccaattcgttgcaacaggtgtaaggcgtacatgtcgcccaacatgcagttcgtggatgccggccgccgattccagtgcctgatgtgcaaagtaacttcggaaggtaagcgatcttgggcgcaattaatgatgccttaattaaatgttgaactattttgcagttcatcagaactactatcagcacctggatcacactggacagcgtgtggacaagcatgaaagacctgagttactgctgggaacttacgagtttctggccaccaaggattactgtcgggtaagttatacatatattggaaatactactaataatatttctagacaccaaaatgtggtgcttttaaaaatagctatttttgaaaatggaacagcttttctgaacatattccaataaatatgttgaacatatggcatgtttgttaatagatcatgtatttccacagaatgaaaatttgtctcggttgtttttaatgataatcatttttagagtagatacacactaaactgatttttaattatttccctttgccgcagaacaatactcccccggaggttcccgcctttatcttcatcatcgacgtctcctacaacaccgtgaagtcgggactggttcatctgctctgctcccagatcaagaacatactcaagcatttgcctgtcgaccagggtcaagacaaatccaaggtgcgggtgggcttcatcacgtacaacagcaccgtgcatttctacaatatcaagagcagtctggcccagccgcaaatgatggttgtgggcgatgtccaggagatgttcatgcccctgctggatggattcctgtgccacccagaagagtcggctgctgtaatcgatgctctgatggaagagatccctcgtatgtttgccgacaccaaggaaaccgaaacgattctgtaccctgccattcaagcgggtttggaggcactgaaggcatcgaatgcagctggaaaactgctggtgtttaactcaacgctacccatcgcggaggcgcctggcaagctaaagaatcgcgatgatcggaagcttctgggaactgataaggagaaaaccgtactcactccacaaaccactgcatataacacactgggccaggagtgcgtccagcagggttgctccgtggacttattcgtgtttaacaacgcctacatcgacttggccacgattgggcaggtttctcggctgactggtggagaggtgttcaagtacacctacttccaggcggacgtggatggcaagagactaatacaggatatcattaagaacgtatcgcgaccgatcgccttcgacgcggtgatgagggtgcggacatcggctggcattcgacccacggagttttatggtcacttcttcatgtccaatacaactgatgtggagctggccagtattggtatgcaatcacggctacattttggttttatatatgttaataatattcctttcgatttccagatgccaccaagtcgataagcattgagatcaagcatgacgacaagctggcaccagaagagaacgtgtaccttcaagtcgcactcttgtacacctcgtgcagcggccaaaggcgtctgcgaattcttaaccttgctctgcgcgttacaacaacgattgcggatgtctttaagtgctgcgacctggacgcgatgatgctgttcttcgccaagcaggcctgcttcaagttgatggagcattcacccaagcaggtgaaagacaacctaatccatcgatcggcgcaaatcctggcctgctatcgcaagcactgcacctcgccgacctccgccggccagttgattcttcccgagtgcctgaagctgctgccactgtatgcctcgtgtttgctcaagaacgatgctatttccggcggttcggacatgacgctagacgatcgatcttatgttatccagtttattctgtcgatggacttaaaccaatccgtcagctacctgtatccccgtttcattcccatccacaacgttgtacccgaggagacagatctgccgactcccgttcgctgcacgcacgaaaagacgcaagaggatggcgcctacatcctggagaatggagtccacctcttcgtctggctgggccaggcattgtcgcctgattttgtgcagtccgtgttcggcgttcagggtcttcagcaaatagctttggagcggtttaacattgttccagaaacgccgctggccaagcgcatacacggcatcctagagcagatcatgaaggagcgctcgcgatacatgagggtgcgtatttgcagtgatcaaatctttgccttcgtggaaatgtgtaacgatcttaatcttttcttcagataacttggttgcggcagaacgacaaactggagagcgtgttccgacacttcctcgtggaggaccgcggtacagacggttccgccagctacgtggatttcctgtgtcacatgcacaaggagattaaggatctgctgagttagcacgccggctactccggcacatacaagcccgagcagcgatgggcggacagttattcccaaaacagggctcggatgcgtcgtctgtcgtccatgcgcagtcgcctcggaaaataagaaatgcaaagggtttaggatcagaagcagaaactggcgctgaaagctgttggaacttcaattatatttacatcaaaatacatatacatatatattaattaatggctatcatttcgagcgtatcaattcttccattaattttattaaagttttcatattttgctttgttttactttatatatatatatttgtatgtattttttttgatcggctgcgctagaaacgaaacatttgttaaacgaggcaactgcttatctgcaaaattagaaaaaaattattctcttataaaattccatgaatatgtttaattgtaattacaaattacttgcaaattttccacagttgaaaactgctagttgatttaacggatagtataagagcacttctttgttcacatcctttttggcctaatgtatttttgcaataatttgtgcgctgcgccctgctttttatcatactttatgtcattgaaagattattatattataacctaaatgtttcgtgtgagaattactcgacttatatggtatattgccccttcaactatcgaaagaaatgcaaacactgcaaaacaaaaacacatttattgagaatgaaaaacggaataaaaactgtattaaaaagcgaatcaaaaattgggctatgctttcaagtagataagttaaatcggattggtcgtcacaccggaaagaatcctatttctcctccgacgattgtccacttttgctttcccccttttattaaaactcatcacccatttttcattaaatgttttatatttttcctctgatttatggaggggtacaaccgaaattgcaataaactttcaattttgcgtcagttatatattttatatttgtattttattaggcctttaaatatctaa

SEQ ID NO: 22670 - DNA, 3880 bp, DROSOPHILA
cgaattagggaactgacgtggaagttcgtttagctcgaaattattcttgtttttcaaccagcgatcgtccgccgcggccgtcgagagttgaggccaacaccgagtggccaaaatcgaggagtcagtggtcaggaatcaggccgagcagcccccgaaattgctaaatcgccgtggcgaactttgagccaatccgtgtgtgttttctcttcgttttccgtgaaagttgtttgttggcttagcgtcgaccctctccgctaaaacccaggtgattaatccgggccagaaatgaatccgaatatgtacgggccaccgcccacgcagttccagcagcaaccccagtttggggctcctcctccgaattccggaggttggccaccgcagcaacaacaactaccgcagcagcagccgccgcagcaacaactgcctccgcagcagcagcaacaacaaccacagtacggagcaccaccaccaacgtcggcggcatcccagccttacctcaatggcaactaccagcagcagttggccacgtcgatgggaggtttgagtgtgggtggcggtgtcggtggggccaatcccctgaagccaccactcccccaaggagctcccgctgctgcggcaccaccgccaaccggtttcaatcagtttaactctaatgcagcacctcctccgaccaacaacaacaatgctgcattcggtgctccaccaccgacgcaagctggaagttatgtcaacggagccctaccgcccagcagtactccacaaagcgtggccagtgggattaatcagatgagcttgaacagcgccactttggcgggattgccgcacatgccgccaccgaaagcggcaacgccgggagcagcacctggtcagcctccgattccagcagctggatctacttctcagccgcctctacccggacaaccgccacttcccggacagccacccttttccggtcagattcccacatcccagcctgccccaagtccgtatggagtaccgagctcacgaccgggtcaaccccagctacctcctggagccactcctccaacttacacgcaacccggattgccacctcagcagcagcagggaatcccgccattgcagcagccagggataccacagcagcagccgggatttcccccacagcagcctggactgccaccactatcccaacccgggttgcctccgcaaccaggagcgccttacggagctccccaacaaggcggatattcaggtggctttccaggtcaggctcccggaggcttccctggagcacctccaccgcttccaggtcagcaagcagctgctccgccgcaattcggagctccacaacctggttatccgggccagcaaccgggctatcccccacaacccggtcagcagccgatgccaggatatccgccacaaccgggacagcaactaggaggaccaggatatccacctcagccaggtgccggttttccaggtcagccaggacgtcctggctttaatcaacctcccatgccaggagcaggaaatatgtatcaacaggctccgcaggcacgacgccttgatcccgatcaaatgcccaatcccatccaggtgatgattgagaaccagcgattgtctggaggaccgtttgtgaccaaccagccaggattgctgcctccattggtgaccaccaaattcgtggttcacgaccaaggcaactcttcaccccgcttcctgcgctcctcgctctattgcatccccaacacgggtgatcttttgaagaccacagctctacccctgacattgaacatctcgccgctggccaaagttggcgagggggaaatggagccaccgattgtgaacttcggcgaaatgggaccaattcgttgcaacaggtgtaaggcgtacatgtcgcccaacatgcagttcgtggatgccggccgccgattccagtgcctgatgtgcaaagtaacttcggaagttcatcagaactactatcagcacctggatcacactggacagcgtgtggacaagcatgaaagacctgagttactgctgggaacttacgagtttctggccaccaaggattactgtcggaacaatactcccccggaggttcccgcctttatcttcatcatcgacgtctcctacaacaccgtgaagtcgggactggttcatctgctctgctcccagatcaagaacatactcaagcatttgcctgtcgaccagggtcaagacaaatccaaggtgcgggtgggcttcatcacgtacaacagcaccgtgcatttctacaatatcaagagcagtctggcccagccgcaaatgatggttgtgggcgatgtccaggagatgttcatgcccctgctggatggattcctgtgccacccagaagagtcggctgctgtaatcgatgctctgatggaagagatccctcgtatgtttgccgacaccaaggaaaccgaaacgattctgtaccctgccattcaagcgggtttggaggcactgaaggcatcgaatgcagctggaaaactgctggtgtttaactcaacgctacccatcgcggaggcgcctggcaagctaaagaatcgcgatgatcggaagcttctgggaactgataaggagaaaaccgtactcactccacaaaccactgcatataacacactgggccaggagtgcgtccagcagggttgctccgtggacttattcgtgtttaacaacgcctacatcgacttggccacgattgggcaggtttctcggctgactggtggagaggtgttcaagtacacctacttccaggcggacgtggatggcaagagactaatacaggatatcattaagaacgtatcgcgaccgatcgccttcgacgcggtgatgagggtgcggacatcggctggcattcgacccacggagttttatggtcacttcttcatgtccaatacaactgatgtggagctggccagtattgatgccaccaagtcgataagcattgagatcaagcatgacgacaagctggcaccagaagagaacgtgtaccttcaagtcgcactcttgtacacctcgtgcagcggccaaaggcgtctgcgaattcttaaccttgctctgcgcgttacaacaacgattgcggatgtctttaagtgctgcgacctggacgcgatgatgctgttcttcgccaagcaggcctgcttcaagttgatggagcattcacccaagcaggtgaaagacaacctaatccatcgatcggcgcaaatcctggcctgctatcgcaagcactgcacctcgccgacctccgccggccagttgattcttcccgagtgcctgaagctgctgccactgtatgcctcgtgtttgctcaagaacgatgctatttccggcggttcggacatgacgctagacgatcgatcttatgttatccagtttattctgtcgatggacttaaaccaatccgtcagctacctgtatccccgtttcattcccatccacaacgttgtacccgaggagacagatctgccgactcccgttcgctgcacgcacgaaaagacgcaagaggatggcgcctacatcctggagaatggagtccacctcttcgtctggctgggccaggcattgtcgcctgattttgtgcagtccgtgttcggcgttcagggtcttcagcaaatagctttggagcggtttaacattgttccagaaacgccgctggccaagcgcatacacggcatcctagagcagatcatgaaggagcgctcgcgatacatgagggtgcgtatttgcaataacttggttgcggcagaacgacaaactggagagcgtgttccgacacttcctcgtggaggaccgcggtacagacggttccgccagctacgtggatttcctgtgtcacatgcacaaggagattaaggatctgctgagttag

SEQ ID NO: 22671 - protein, 1192 aa, DROSOPHILA
MNPNMYGPPPTQFQQQPQFGAPPPNSGGWPPQQQQLPQQQPPQQQLPPQQQQQQPQYGAPPPTSAASQPYLNGNYQQQLATSMGGLSVGGGVGGANPLKPPLPQGAPAAAAPPPTGFNQFNSNAAPPPTNNNNAAFGAPPPTQAGSYVNGALPPSSTPQSVASGINQMSLNSATLAGLPHMPPPKAATPGAAPGQPPIPAAGSTSQPPLPGQPPLPGQPPFSGQIPTSQPAPSPYGVPSSRPGQPQLPPGATPPTYTQPGLPPQQQQGIPPLQQPGIPQQQPGFPPQQPGLPPLSQPGLPPQPGAPYGAPQQGGYSGGFPGQAPGGFPGAPPPLPGQQAAAPPQFGAPQPGYPGQQPGYPPQPGQQPMPGYPPQPGQQLGGPGYPPQPGAGFPGQPGRPGFNQPPMPGAGNMYQQAPQARRLDPDQMPNPIQVMIENQRLSGGPFVTNQPGLLPPLVTTKFVVHDQGNSSPRFLRSSLYCIPNTGDLLKTTALPLTLNISPLAKVGEGEMEPPIVNFGEMGPIRCNRCKAYMSPNMQFVDAGRRFQCLMCKVTSEVHQNYYQHLDHTGQRVDKHERPELLLGTYEFLATKDYCRNNTPPEVPAFIFIIDVSYNTVKSGLVHLLCSQIKNILKHLPVDQGQDKSKVRVGFITYNSTVHFYNIKSSLAQPQMMVVGDVQEMFMPLLDGFLCHPEESAAVIDALMEEIPRMFADTKETETILYPAIQAGLEALKASNAAGKLLVFNSTLPIAEAPGKLKNRDDRKLLGTDKEKTVLTPQTTAYNTLGQECVQQGCSVDLFVFNNAYIDLATIGQVSRLTGGEVFKYTYFQADVDGKRLIQDIIKNVSRPIAFDAVMRVRTSAGIRPTEFYGHFFMSNTTDVELASIDATKSISIEIKHDDKLAPEENVYLQVALLYTSCSGQRRLRILNLALRVTTTIADVFKCCDLDAMMLFFAKQACFKLMEHSPKQVKDNLIHRSAQILACYRKHCTSPTSAGQLILPECLKLLPLYASCLLKNDAISGGSDMTLDDRSYVIQFILSMDLNQSVSYLYPRFIPIHNVVPEETDLPTPVRCTHEKTQEDGAYILENGVHLFVWLGQALSPDFVQSVFGVQGLQQIALERFNIVPETPLAKRIHGILEQIMKERSRYMRVRICNNLVAAERQTGERVPTLPRGGPRYRRFRQLRGFPVSHAQGD

SEQ ID NO: 22672 - DNA, 2738 bp, DROSOPHILA
ccggaacgaatcgtgggaggcgacttgataaccattctatcagttccctggcaggcttccattcttaggcttggacggtttcactgcggtgcagccatctacagtgaagacatcgtcataacggcagcccactgcctcaccgaccgcgagaccgagttcctctcagtgagagtcggctcatcgttcacattcttcggtggtcaggtggtgagggtatccagtgttctgttacacgaggaatacgaccagtcctggtccaacgacatagccgtgatgaggcttcagtccaagctccggctgggaagtgcagtcagtgtcattcccttggccgatactcccccggccagtggatcacctgccaccgtttctggatggggagccattggttttaagaagaattaccccatgtccatactgtccgcttcggtggacattgtggaccaggatcagtgtcgtaggtcgtacggaagaaaaatcaccaaggacatgatctgtgcggccgctccaggaaaggatgcctgctccggcgattcgggaggtcctctggtctccggtaacaagctcgttgggatcgtgtcctttggcaaggagtgcgctcatcccgaatatcctggagtctacgctaacgtggctgagctgaagccctggattttgggcgctatcgaaagaataactaaatctgaataaattaatttacttaactgtacggggattttacaacatatttaagccatgtgcagatccttgttttcctggacttcaaagaaatttaggttcaaagaattttaatgatttattgagcacgtgcctagctgtagtggaatttcttatttttaactactgatattcattctgctattggtttctgctatgtgtgggcttcgtaaaatgttcattaaaattcttttcttaattatttcttccaagtgggctattcggaaccctttaaaagcgggactagcccggatcgaagtcattctcagcattagtcgcgttcgcaatgctcctccactggcttgttctggtcgccagcgtcaccctgatctcggcaggatcttctccggagcgaatagtgggtggccaccctgtgcttatttcagaagttccttggcaggcggctctcatgtattcggaaaaatacatttgcggtgcagttatctacagtgacaagatcattataacagcagcccactgtgttgaaagacccttcgatacactgtattccgtcagagttggatccgtatggaaaaacttgggtggacagcacgccagggttgctgtaattcggaagcatgaagactacgtatcttccaccattttgttcaacgatatagccgtaattagactggtggacactctaattttcaatgccgaagtaagacctatccaactggccgatagtgcacccgcagctggaactgaagcttcggtttctggttggggagaaatcggaatcctctggctacaacctacatctctattgaaaacctcagtgaaaatactagacccgaatgtttgtaagcggtcctatcagtacatcaccaaaactatgatttgcgccgccgctctcttaaaagattcctgtcatggagactccggcggacctctcgtctccggtggccaactagttggcattgtctcctacggcattggatgcgccaatccgttctttcccggagtctacgccaatgtggctgagctgaaaccttggatcttaaatgctattgaacagctttaagtataagcatacgattcaagacaactacttaactatttagcatttgtaaaaatacttatgacatttatattgacatcttaatagatacattttaaagcatttaaattgaaggcatagtgaaaattcctttatttaatatcatctttgtatgcactgcacttccttcctttcgatccccaagaagaccgttgtattctcccccttttcaaggattgcctgcaagttaatatcctcgccgagtttggggcaagaaaaagcgatttccgagtcattgggcaatgcaaactatgcagtataatcgcatgatatatgcctaatctctgctgcaagccccacatcgccgggaaaatggaaaacggagcccggggaaaatacccagccgctaagccagagaggaagttgcctctggagagtcaattccagcgattaaattaagaatgcataacttgcagggttaacaatgttgccaggcgctggctggagtgcaaagagtcggggtatcggaggaaggacctctggaacagggcgcaattgccttgacaggagcacgaaccgagtccctgatttttatttgccattctctttgcagccatttctcggctctttcgcgggagaaagaaaaaggaaagtgggcagttgtgcaacttctgctacttatctgcttttttcaatgtgcgatttgtttgctgcagccacttccattaagacactggaagaaaaactaaagaaatctcttttaagcctacattttcagtgaatgtcggcttcatctatttgaactacttaaaatgtgattattatacgctttccatatatttccacaaattctttcaccacatatactacatattttcctcagtgtacgcttcctgacctcagcgccattttcctccgccctctcttcgctcgcatcgagaacgtcgtgtcggaggcgtcctgtttctggttccccttcctgtttgcttatttgtttgcactcctggacatggaacgtgcccgg

SEQ ID NO: 22673 - DNA, 738 bp, DROSOPHILA
atgctcctccactggcttgttctggtcgccagcgtcaccctgatctcggcaggatcttctccggagcgaatagtgggtggccaccctgtgcttatttcagaagttccttggcaggcggctctcatgtattcggaaaaatacatttgcggtgcagttatctacagtgacaagatcattataacagcagcccactgtgttgaaagacccttcgatacactgtattccgtcagagttggatccgtatggaaaaacttgggtggacagcacgccagggttgctgtaattcggaagcatgaagactacgtatcttccaccattttgttcaacgatatagccgtaattagactggtggacactctaattttcaatgccgaagtaagacctatccaactggccgatagtgcacccgcagctggaactgaagcttcggtttctggttggggagaaatcggaatcctctggctacaacctacatctctattgaaaacctcagtgaaaatactagacccgaatgtttgtaagcggtcctatcagtacatcaccaaaactatgatttgcgccgccgctctcttaaaagattcctgtcatggagactccggcggacctctcgtctccggtggccaactagttggcattgtctcctacggcattggatgcgccaatccgttctttcccggagtctacgccaatgtggctgagctgaaaccttggatcttaaatgctattgaacagctttaa

SEQ ID NO: 22674 - protein, 245 aa, DROSOPHILA
MLLHWLVLVASVTLISAGSSPERIVGGHPVLISEVPWQAALMYSEKYICGAVIYSDKIIITAAHCVERPFDTLYSVRVGSVWKNLGGQHARVAVIRKHEDYVSSTILFNDIAVIRLVDTLIFNAEVRPIQLADSAPAAGTEASVSGWGEIGILWLQPTSLLKTSVKILDPNVCKRSYQYITKTMICAAALLKDSCHGDSGGPLVSGGQLVGIVSYGIGCANPFFPGVYANVAELKPWILNAIEQL

SEQ ID NO: 22675 - DNA, 2747 bp, DROSOPHILA
aacttgatatccttggtcatctagccgattgccttcctcatcaaaaaaacaatgggccgcagtaacgatgatattttcgctgtaaatggagccgccgcacacatggtcgccaaaatattgcaaagacacctgccagggaacctgttcgattccaatgggttctccgccgatgatacgttgttcccatcggtttacttgtcctgcggacaggaagtctagcgccaggagcagcaggaagctttcgatgaacatatcgaccagattggatgattctttgggttgcagtggctttacctccaaaataacaagtcttttatatgcttcagatagtagtattctatttcggctatctaattggaatgctgctgcaactaaatttaaaatagtaattaaaatagttcttgaagtttttgaaaaacactccattcgctaaatatagacatcatatatacataatttagttcctttttggtttaaaaatatcaaattacttttctgtaaatatgcatgcagaagccataccattactggaagttactaattagaaaagtttggaatttggtctgttctgaatttaaaaaaaaatgtgttgtgaaaaattcaatattttaacagatttttttattatattaaaaaaattgcacagggaatggaatgccttattaagacggccagatatctaagccgatgcttacttttccactcctgtttattttcagagatattttgtcatttcgtacctaaaattcctttctattttaaggacctaaaataaataagaaatacaagaaagtattagccatattttttcacttagcgcgtgtcatacatttagatattcatgtaatcgatttattttagtgtcagttgctcacaatatccattaacattcctctactacaataccacaagtacgaaattccccattccaccgaggtatacctataaaaaaagatccaaacctttggtggaatcactcgtaacttcaccactagttgaaatgtttgtgcagtggattttcctggccttcagcgtcaccgtggtttcctctaattggattccggaacgaatcgtgggaggcgacttgataaccattctatcagttccctggcaggcttccattcttaggcttggacggtttcactgcggtgcagccatctacagtgaagacatcgtcataacggcagcccactgcctcaccgaccgcgagaccgagttcctctcagtgagagtcggctcatcgttcacattcttcggtggtcaggtggtgagggtatccagtgttctgttacacgaggaatacgaccagtcctggtccaacgacatagccgtgatgaggcttcagtccaagctccggctgggaagtgcagtcagtgtcattcccttggccgatactcccccggccagtggatcacctgccaccgtttctggatggggagccattggttttaagaagaattaccccatgtccatactgtccgcttcggtggacattgtggaccaggatcagtgtcgtaggtcgtacggaagaaaaatcaccaaggacatgatctgtgcggccgctccaggaaaggatgcctgctccggcgattcgggaggtcctctggtctccggtaacaagctcgttgggatcgtgtcctttggcaaggagtgcgctcatcccgaatatcctggagtctacgctaacgtggctgagctgaagccctggattttgggcgctatcgaaagaataactaaatctgaataaattaatttacttaactgtacggggattttacaacatatttaagccatgtgcagatccttgttttcctggacttcaaagaaatttaggttcaaagaattttaatgatttattgagcacgtgcctagctgtagtggaatttcttatttttaactactgatattcattctgctattggtttctgctatgtgtgggcttcgtaaaatgttcattaaaattcttttcttaattatttcttccaagtgggctattcggaaccctttaaaagcgggactagcccggatcgaagtcattctcagcattagtcgcgttcgcaatgctcctccactggcttgttctggtcgccagcgtcaccctgatctcggcaggatcttctccggagcgaatagtgggtggccaccctgtgcttatttcagaagttccttggcaggcggctctcatgtattcggaaaaatacatttgcggtgcagttatctacagtgacaagatcattataacagcagcccactgtgttgaaagacccttcgatacactgtattccgtcagagttggatccgtatggaaaaacttgggtggacagcacgccagggttgctgtaattcggaagcatgaagactacgtatcttccaccattttgttcaacgatatagccgtaattagactggtggacactctaattttcaatgccgaagtaagacctatccaactggccgatagtgcacccgcagctggaactgaagcttcggtttctggttggggagaaatcggaatcctctggctacaacctacatctctattgaaaacctcagtgaaaatactagacccgaatgtttgtaagcggtcctatcagtacatcaccaaaactatgatttgcgccgccgctctcttaaaagattcctgtcatggagactccggcggacctctcgtctccggtggccaactagttggcattgtctcctacggcattggatgcgccaatccgttctttcccggagtctacgcc

SEQ ID NO: 22676 - DNA, 747 bp, DROSOPHILA
atgtttgtgcagtggattttcctggccttcagcgtcaccgtggtttcctctaattggattccggaacgaatcgtgggaggcgacttgataaccattctatcagttccctggcaggcttccattcttaggcttggacggtttcactgcggtgcagccatctacagtgaagacatcgtcataacggcagcccactgcctcaccgaccgcgagaccgagttcctctcagtgagagtcggctcatcgttcacattcttcggtggtcaggtggtgagggtatccagtgttctgttacacgaggaatacgaccagtcctggtccaacgacatagccgtgatgaggcttcagtccaagctccggctgggaagtgcagtcagtgtcattcccttggccgatactcccccggccagtggatcacctgccaccgtttctggatggggagccattggttttaagaagaattaccccatgtccatactgtccgcttcggtggacattgtggaccaggatcagtgtcgtaggtcgtacggaagaaaaatcaccaaggacatgatctgtgcggccgctccaggaaaggatgcctgctccggcgattcgggaggtcctctggtctccggtaacaagctcgttgggatcgtgtcctttggcaaggagtgcgctcatcccgaatatcctggagtctacgctaacgtggctgagctgaagccctggattttgggcgctatcgaaagaataactaaatctgaataa

SEQ ID NO: 22677 - protein, 248 aa, DROSOPHILA
MFVQWIFLAFSVTVVSSNWIPERIVGGDLITILSVPWQASILRLGRFHCGAAIYSEDIVITAAHCLTDRETEFLSVRVGSSFTFFGGQVVRVSSVLLHEEYDQSWSNDIAVMRLQSKLRLGSAVSVIPLADTPPASGSPATVSGWGAIGFKKNYPMSILSASVDIVDQDQCRRSYGRKITKDMICAAAPGKDACSGDSGGPLVSGNKLVGIVSFGKECAHPEYPGVYANVAELKPWILGAIERITKSE

SEQ ID NO: 22678 - DNA, 2756 bp, DROSOPHILA
ccactgtattaaagaaggtgaacgctcaattcgagcaggatcctcgctgcatgatagcggaggagttgtggtgggagtggaagcatatatcattcacccacaatttgataaacataacatggagaacgacgtggctgtcctcaaactgagcagtcctttaagtttttccgattccatacaaacaattcccttggccgagacggatcctcccacgtcgtcttcggcgctagccactggctggggacgtggaaattttttaattcgaccacgacaacttcagggagttgaaatccttattcggccgctgatcgtgtgtaaattgaaatatggcaacggtgtgttcaatgaggacatctgcgcgggaagaatgggaaaaggcggctgttatggagattccggtggacccttggtcttcaacggccagctagtggggatcacatcgagaacgggaaacattgtttgcttgggatcttctctgtacgctagtgtggcgcgttatcgtaactggatccttagtgccatcgatgtattgcattttcaagcacccgctacaaatgtgtaatttacgacattccaacttaacgttcgcagcaacaattactgttgttcataaatcaagttttataaaataaatacattgaataattttacaaaactacactttttacgttctttctattacaacaacactgatgtggcagtatagaatctgaaactgccctccaattacttttttatatataccatttttgtgagtatacatatcttattaacgattcgaaatggttaataaataaagataagacacaaacatttaaaaatcaaatatataatgataaataataactagatgtaataatttattagatgtgattaaagtaaaactaaaaaaaatcgtatattaatataatttgcaagctaaaagtctaaacacacttatagttttgctttatttatatttatttatttatttatctcgtttcgctgacatacgaccattttactgaattgaggcaatagcatttaagatccattcacggaaataaggaacactgacgaagaatgcactggatacgcaaccttttcgaccccaggagacaacacccacaagttgtttgttgaccaccaatggtcctccagagtcgccatgacaagcggttcttccataagtgcctgcgcatagtagtgaaggatcaaagagtctgcaggagaaaatgcttttgatgtgcagggctaatccttgaagatgtgttgggtataaattcgtcgaatcgtttaagatataagacactccccagccagagacgagggcaatcgatctaggataaggattcgtcttagccaaaggaatgggttgaactttgcttgtgaactcaagtggcgtacttaacctcacgattgcgatgtcgtttatattaagatcaaacgcatattcttcgtggattattaaagcggccacatcgacaagagttccattggaatctgttagggcggatcctgcgcgaacttgatatccttggtcatctagccgattgccttcctcatcaaaaaaacaatgggccgcagtaacgatgatattttcgctgtaaatggagccgccgcacacatggtcgccaaaatattgcaaagacacctgccagggaacctgttcgattccaatgggttctccgccgatgatacgttgttcccatcggtttacttgtcctgcggacaggaagtctagcgccaggagcagcaggaagctttcgatgaacatatcgaccagattggatgattctttgggttgcagtggctttacctccaaaataacaagtcttttatatgcttcagatagtagtattctatttcggctatctaattggaatgctgctgcaactaaatttaaaatagtaattaaaatagttcttgaagtttttgaaaaacactccattcgctaaatatagacatcatatatacataatttagttcctttttggtttaaaaatatcaaattacttttctgtaaatatgcatgcagaagccataccattactggaagttactaattagaaaagtttggaatttggtctgttctgaatttaaaaaaaaatgtgttgtgaaaaattcaatattttaacagatttttttattatattaaaaaaattgcacagggaatggaatgccttattaagacggccagatatctaagccgatgcttacttttccactcctgtttattttcagagatattttgtcatttcgtacctaaaattcctttctattttaaggacctaaaataaataagaaatacaagaaagtattagccatattttttcacttagcgcgtgtcatacatttagatattcatgtaatcgatttattttagtgtcagttgctcacaatatccattaacattcctctactacaataccacaagtacgaaattccccattccaccgaggtatacctataaaaaaagatccaaacctttggtggaatcactcgtaacttcaccactagttgaaatgtttgtgcagtggattttcctggccttcagcgtcaccgtggtttcctctaattggattccggaacgaatcgtgggaggcgacttgataaccattctatcagttccctggcaggcttccattcttaggcttggacggtttcactgcggtgcagccatctacagtgaagacatcgtcataacggcagcccactgcctcaccgaccgcgagaccgagttcctctcagtgagagtcggctcatcgttcacattc

SEQ ID NO: 22679 - DNA, 756 bp, DROSOPHILA
atgttcatcgaaagcttcctgctgctcctggcgctagacttcctgtccgcaggacaagtaaaccgatgggaacaacgtatcatcggcggagaacccattggaatcgaacaggttccctggcaggtgtctttgcaatattttggcgaccatgtgtgcggcggctccatttacagcgaaaatatcatcgttactgcggcccattgtttttttgatgaggaaggcaatcggctagatgaccaaggatatcaagttcgcgcaggatccgccctaacagattccaatggaactcttgtcgatgtggccgctttaataatccacgaagaatatgcgtttgatcttaatataaacgacatcgcaatcgtgaggttaagtacgccacttgagttcacaagcaaagttcaacccattcctttggctaagacgaatccttatcctagatcgattgccctcgtctctggctggggagtgtcttatatcttaaacgattcgacgaatttatacccaacacatcttcaaggattagccctgcacatcaaaagcattttctcctgcagactctttgatccttcactactatgcgcaggcacttatggaagaaccgcttgtcatggcgactctggaggaccattggtggtcaacaaacaacttgtgggtgttgtctcctggggtcgaaaaggttgcgtatccagtgcattcttcgtcagtgttccttatttccgtgaatggatcttaaatgctattgcctcaattcagtaa

SEQ ID NO: 22680 - protein, 251 aa, DROSOPHILA
MFIESFLLLLALDFLSAGQVNRWEQRIIGGEPIGIEQVPWQVSLQYFGDHVCGGSIYSENIIVTAAHCFFDEEGNRLDDQGYQVRAGSALTDSNGTLVDVAALIIHEEYAFDLNINDIAIVRLSTPLEFTSKVQPIPLAKTNPYPRSIALVSGWGVSYILNDSTNLYPTHLQGLALHIKSIFSCRLFDPSLLCAGTYGRTACHGDSGGPLVVNKQLVGVVSWGRKGCVSSAFFVSVPYFREWILNAIASIQ

SEQ ID NO: 22681 - DNA, 7027 bp, DROSOPHILA
ccacttgcctttcgtgggcctgtcggctggtgcacggctgctcgtcctccaacttaacggaaatgggaggttcctgctctggctgatcttttttgtccttggagtgatcggttacgatgccctgctccttgatcttctgttgccgccttcgttccgcccgacgatgagccggattcctcagtcggatggtttctttggccaaggtggccgccgtgcgctctggcaaatgattttggatgacaacagggcgcttgccaacgatttttttaatggctggatgcagtggcagctgcggagcggctatgtcgtccccaaaaaggctgtcgccgcgcactttcgcaatatccgcgccggtgagggggacctgctgctttcggtaatattcgctgaccacctgatagcgtagtctgtccaacagttgtcgtccttgcagcagtcgtcggtcgatctcggccagctgctcgaccttctgagagatttcgcgctggaactccagacgaagcagctcccggatgcgctgaaatttgtcggacaacggcagcatgccatccgactgttccgtcttggtccactttctttgaccgggcgactcggcttctgcgcaggtttcttcctcatcctggctagaaacttccgtttgctgataatctggatcgtggtactcgctgtgcctgcgtttttttggcggcgtcgcttgttgctggtccatgtgcgtggtagctggcacacgcacaggacttgtatcacgttagttcggaggggaacagcttcaagtttggcccgaatcgctccgtgcacatttaggccggggtaattggctgttatttataaaaatgtgtaaacaattgatgcgaacgaggcggcgcaaacagaattgagtgggggagttgccacatcgctggtgtagatgcgtgcacgctggccttgtccaacactgttcagccagctgtttactctttacgcgggaagcaaagacgccgaaatctagacggaaaatcaaaagtgcccaccaagtaaaagcagataagcagcagcaaaatggtcgagcgcatcgaggatcttaacctgccgaatgccgtgattggccggctcatcaaggaagcactgccggagtcagctagtgtcagcaaggaagcgcgagcagcgatcgcccgagcggcatctgtgtttgccatcttcgtgacatcctcgtcgacggcgttggcccacaagcagaaccacaagaccatcacggccaaggatattctacagaccctcaccgagctagacttcgaaagcttcgtgccctctctgacgcaggatctcgaggtctatcgtaaagtggtcaaggagaaaaaggagagcaaggccagcaagaaggattccaacactgccgaaaatgccaacgccagtgccaccgcaacagcagaggaagcccccgagtgattacgaataggagaaactatacggatcaattatcctcttcagtcattaagaacaaagctagtattgagcattaacaaaaaacattaaacataggcattatctaagaacttcacttgtgttttgtcactttcctcaaagactaaattatgttgttagtcaacgtttacatgggattaatttgggattgtaagtgacggttggaattacacccttaaataatgccgcatttcaatccagtccgatctagttttttacgccttcattcaaagtatataaaggtgtcagaataatatttaagtatttcagtaattatttgtttatatatgtgatcagaaaatcactgttttaaaaatcatccagatagataaccgcgtgttctttccagcactggaaacagctgtttaaaaaagcgcgtcttatcgcaacaaaaagtttagttagttattattttgcatgttttatacaattaatattttagtagaaaatgggagttacgggcttgtggaagctcattgagccgtgcggcaagccagtccccgtagagactttggagggcaaaatcctagcagtgggtaagcatcgtttttcgccacctaatgaaatacttgctgattggagtacttttcgtcctgcagatatatcgatttggttgcatcaggttgtgaagggctttcaggacaacaagggatcggccctgagtaatgcccatttactgggtctattccatcgtctctgtaaattgctatactatcgtgtgcgaccggttttcattttcgatggatgcgtgccgcagcttaaaagggacactattgtgagttataataggggaatatatcaaattcactctctaaattaaatcctctttatgtcaccccttcaggcacgtcgccagcagcagaggaataagctcagcaacgaagctgatcgcattcaggctttgctccttcaatccctggccaaagaaaaagtagtgcagcaagcgctgggcaagaatgcagagctactgttgaaatccccggttaagcgaccgcctccagctaagaagaacgacgaggatgacttgtttaagcttcccgaactgccggctgcatcggtgcaagataatcaagatgaaagcgagcaggacaccagtgccagtgcctcagacagctcctttgacgagtcaaccgctcgacattcttacaactctagcttacaggccatcgatgtaaagagtcagcattttcggaatctgccagccgatgtgcgacacgagatccttacagacatcaaggagacgcgcaagcaatcgtcgtggggccgtctgcacgagttgcccgcccgcagcgatgacttctgctccttccagatgaagagactcctcaagcgccgagccgttcaggaaagcttagagcaggcggaacaggagatgggcggacatacgcttacctatgcagagttgtgtgactttttcaatgaggagggcattctcaccccaacggccattgaacagtgcacccgacaaattagctcggatgaacatacacgattcctgctggtcagggatcttaaaaagaaagcaatggagagcaccaaacaagaggttaaaatggagatgattgaggaggtacccgctgaggaggaggatgagaagccaagcacttccaccaagaaagaggctgtgaaaagtgtggacctaggcacagagttcgatgaagatttggccaaagcactgtctatgtcaatggaggagaccaaggtgtacgatgaaaaggactacgagtacgactcggaccaagagttgcgcctcaatcgagctcaaaccaagcaattgcgccatgcggccaagggacctgcacgggcctatatgattgaatacggcggaatgaacgacgaggaagttggcaacatcatggaggccactcagttcaatgacactcaaagccttgaaaagttgctagagatcacgacagtcccgaccgacatggctgacaactcgattgaggaggccaaacttatttcacaagctattgaagagagcaaacaactatcccaagcaattgaggaaagcaagaagaatcttaacgaggacaaggtggagattgtagatactgataccgactcagacttggaggaagtaatggaagttcaggagctggataaaggcaagaagaatcttgagatttgtgttgatattactggccaagcggattcgaatgatctgtttgcggatatttttgaggatggagaggcaaataaaatagagaaaactataagcgtcgaggaagacgatgactttatagaagtgaaagacagtgaggaattaaaattggatactgaagatgaaaataaaccaataacgaataagagtattaaagaaagtaatgaagtcaagccgttcattgatgaaattatcgaagtgaaagatagccaagaagcggttcctgcagaacctaatctcaaacccgatctggaatcaattttaaatgatctgaaaaaacaaacggctgcggttaaagatattcagctaaacgtaaatgaagaagaaaaaccaaaaccaaaggtggaaatcagttctatattggatgagctaaaagtaaagatggccgacgttaaaaacatcactctagataacgtgaaattaagcaatagtgtccctatcatactatcctccgatgacgaaagtaccttgaaatcctcgaaaatagttccgaagcaagagctaattgagttgtgcgacagcgacgataataaaaacaatcgcctatcaccgaacaaaacgccaagcaaaaacaagtccattaaggacttttttgagaccagttacgtggtcaagcgaactcccgacaaatctcaagcgtcaaacgaaacttcgccgggaacaccaaagaccccgaagcccttcttcagaaagagaaccccgaagtccggacggaaacgagctagtgatgccaatgaggacagtgatgaggaagtttcgcccactaaaaggtccagtaaggcctcgaagtctctcttcgagccaaaggagccggaagaagaaaagactgtagatccggaggtgtgtattgttctgattaatatgccagagtctcttaatattattcattattatattattctctttattcatgtaatgttttacccctacaggagattatcaaagatgctgcagaggctcttaaatctcaaaagacctcagaagaactgcaggagttggctacaaacttagctcaggagcgaaaggaacttgaaatcgagcggaatcggcaagaccgaatgggcatgtccatcagccagcgcatgagcatcgattgccaggagctgctgcgtcttttcggcattccgtacattgtggctcccatggaggcagaggcgcagtgcgcctttctcaatgccacagatcttacccacggcaccatcacggatgatagtgatatctggctttttggtggtcgaactgtctacaagaacttctttgcacaaaacaagcacgtgatggaattccgggcggaacagatcgagcaaacgtttaactgcaacaggggtaaactgatccagttggcctgtttggtgggcagtgactacactacaggaattcatggcattggtgctgtaacggccctggagattttggcctccttttccggacaggatgcgaatgggccaggtatctgcaatcaatcggtgcttcaaacgctaatcaagttccgcgactggtggcaagcacacaagtgcagcaatcttccacctggcagctcggctcgccttgctctgcgcaaaaaacttaagaacatcgaactgcacgagggttttcccagcggtgcagtggtggaggcatatttagcgcccacgatcgacgacaatcgggatgcatttagttggggcacaccggatgtggaatcaatcagagaattcacgcgaaaatctttcggctggactacttcaaaaacggacgacattctgatgcccgtgatgaaaaaaattaacgagaagaagatacagggttccatacgcaactactttacggcaaagagtgctctgcgagttcaacaaccgcacgtcagcaaacgtgtccaattggcaattgacaagatgtccggaaagatcgatgagacgccggagaaaccgaagaaggtgacacgcacaagacgtgcaaaggcagctccgccaacagatgatgatttggccatcgcggatgtcgcgacaaaagctgcccgtcccaaacgcggcaaacgaaaagctgcacctgaatcggtagttttggatggggaacttccttccacatcgcagtcgataccgaagcctgaaaaatgtcctcgaatacctagcagcgttgaagttatacctcaaagggaaaaggatctggagcagatgcgcctcaataaagcaaaggcggcagagattcttaaaaattcagcgaaagccaataggaaataagcttaacaaatctattaaatataactttatagaaatcatctagtgaggtttgcattttgtatttagtgtttcacagcaacctttaaaaactacgtctgttttttttttatattttttcgttgttttttttttattgtaaaactaagtactataagcacaacctaaacatgatttttaaacgatataatgtacgacctgctgcctaccgtatatataacaaatacctttcaatgaggggtttcagaaggcgcaggacaaaagcgtttagattgcaaaaaatcttaaatcatcttttgagtgaggagggcaatttgattaacagaatccaaaagatgtccaagcataaaacccgggccattttggctgaatccattaaattgatacagcaaaaaaatcgtgaacttcaaacaaattatcggcaagatgaaaagaatgaaaaaagactgaagaaactattacgaaaattaaactatcataaaaaacaaagcttatttctcaaaaaaatgttaagttatctgaaaatgcaaattaatgatcacgattgcagtcaaacaactaaacttaatatgggagaaatgttaaggtctcaactaagagtaatgaaaaatcgaaccataggcaacataaaagaagcccaagaatgtatttatgttgcaaggagtttatgggcaagccatttacgatatatgagaagaagtaggtcttggagacgcaaaccaaaatattcatttaataaatccatatggatgttcttaaactcactaaaatttcaaacgaatgtcaaaacaacaaaggataaggacaacaacaaaaacgttttgcattcaaaaggaccctacacggtgactagaaaattgaattttttcgcttcgggagaagatataaatgtaaagtcaagtagaaaacatattcatagacgacgcattgtgcggccaaaacaattaaacccaataaactttgatttattgaaggatccaaatgaagtttctcaaaaaagaagcattcataacttaccagcatcaaggctaaaggttaaagtttatccccgaaaaaagattgaaacatacaatgcagcggatgaagaaatatcaccttacacagatttaacacaagcgaaaatcgcatttggcgataaaacattcaataaagaagaaaaccaggaggaaacctggagcaggccaca

SEQ ID NO: 22682 - DNA, 4803 bp, DROSOPHILA
aagtgcccaccaagtaaaagcagataagcagcagcaaaatggtcgagcgcatcgaggatcttaacctgccgaatgccgtgattggccggctcatcaaggaagcactgccggagtcagctagtgtcagcaaggaagcgcgagcagcgatcgcccgagcggcatctgtgtttgccatcttcgtgacatcctcgtcgacggcgttggcccacaagcagaaccacaagaccatcacggccaaggatattctacagaccctcaccgagctagacttcgaaagcttcgtgccctctctgacgcaggatctcgaggtctatcgtaaagtggtcaaggagaaaaaggagagcaaggccagcaagaaggattccaacactgccgaaaatgccaacgccagtgccaccgcaacagcagaggaagcccccgagtgattacgaataggagaaactatacggatcaattatcctcttcagtcattaagaacaaagctagtattgagcattaacaaaaaacattaaacataggcattatctaagaacttcacttgtgttttgtcactttcctcaaagactaaattatgttgttagtcaacgtttacatgggattaatttgggattgtaagtgacggttggaattacacccttaaataatgccgcatttcaatccagtccgatctagttttttacgccttcattcaaagtatataaaggtgtcagaataatatttaagtatttcagtaattatttgtttatatatgtgatcagaaaatcactgttttaaaaatcatccagatagataaccgcgtgttctttccagcactggaaacagctgtttaaaaaagcgcgtcttatcgcaacaaaaagtttagttagttattattttgcatgttttatacaattaatattttagtagaaaatgggagttacgggcttgtggaagctcattgagccgtgcggcaagccagtccccgtagagactttggagggcaaaatcctagcagtggatatatcgatttggttgcatcaggttgtgaagggctttcaggacaacaagggatcggccctgagtaatgcccatttactgggtctattccatcgtctctgtaaattgctatactatcgtgtgcgaccggttttcattttcgatggatgcgtgccgcagcttaaaagggacactattgcacgtcgccagcagcagaggaataagctcagcaacgaagctgatcgcattcaggctttgctccttcaatccctggccaaagaaaaagtagtgcagcaagcgctgggcaagaatgcagagctactgttgaaatccccggttaagcgaccgcctccagctaagaagaacgacgaggatgacttgtttaagcttcccgaactgccggctgcatcggtgcaagataatcaagatgaaagcgagcaggacaccagtgccagtgcctcagacagctcctttgacgagtcaaccgctcgacattcttacaactctagcttacaggccatcgatgtaaagagtcagcattttcggaatctgccagccgatgtgcgacacgagatccttacagacatcaaggagacgcgcaagcaatcgtcgtggggccgtctgcacgagttgcccgcccgcagcgatgacttctgctccttccagatgaagagactcctcaagcgccgagccgttcaggaaagcttagagcaggcggaacaggagatgggcggacatacgcttacctatgcagagttgtgtgactttttcaatgaggagggcattctcaccccaacggccattgaacagtgcacccgacaaattagctcggatgaacatacacgattcctgctggtcagggatcttaaaaagaaagcaatggagagcaccaaacaagaggttaaaatggagatgattgaggaggtacccgctgaggaggaggatgagaagccaagcacttccaccaagaaagaggctgtgaaaagtgtggacctaggcacagagttcgatgaagatttggccaaagcactgtctatgtcaatggaggagaccaaggtgtacgatgaaaaggactacgagtacgactcggaccaagagttgcgcctcaatcgagctcaaaccaagcaattgcgccatgcggccaagggacctgcacgggcctatatgattgaatacggcggaatgaacgacgaggaagttggcaacatcatggaggccactcagttcaatgacactcaaagccttgaaaagttgctagagatcacgacagtcccgaccgacatggctgacaactcgattgaggaggccaaacttatttcacaagctattgaagagagcaaacaactatcccaagcaattgaggaaagcaagaagaatcttaacgaggacaaggtggagattgtagatactgataccgactcagacttggaggaagtaatggaagttcaggagctggataaaggcaagaagaatcttgagatttgtgttgatattactggccaagcggattcgaatgatctgtttgcggatatttttgaggatggagaggcaaataaaatagagaaaactataagcgtcgaggaagacgatgactttatagaagtgaaagacagtgaggaattaaaattggatactgaagatgaaaataaaccaataacgaataagagtattaaagaaagtaatgaagtcaagccgttcattgatgaaattatcgaagtgaaagatagccaagaagcggttcctgcagaacctaatctcaaacccgatctggaatcaattttaaatgatctgaaaaaacaaacggctgcggttaaagatattcagctaaacgtaaatgaagaagaaaaaccaaaaccaaaggtggaaatcagttctatattggatgagctaaaagtaaagatggccgacgttaaaaacatcactctagataacgtgaaattaagcaatagtgtccctatcatactatcctccgatgacgaaagtaccttgaaatcctcgaaaatagttccgaagcaagagctaattgagttgtgcgacagcgacgataataaaaacaatcgcctatcaccgaacaaaacgccaagcaaaaacaagtccattaaggacttttttgagaccagttacgtggtcaagcgaactcccgacaaatctcaagcgtcaaacgaaacttcgccgggaacaccaaagaccccgaagcccttcttcagaaagagaaccccgaagtccggacggaaacgagctagtgatgccaatgaggacagtgatgaggaagtttcgcccactaaaaggtccagtaaggcctcgaagtctctcttcgagccaaaggagccggaagaagaaaagactgtagatccggaggagattatcaaagatgctgcagaggctcttaaatctcaaaagacctcagaagaactgcaggagttggctacaaacttagctcaggagcgaaaggaacttgaaatcgagcggaatcggcaagaccgaatgggcatgtccatcagccagcgcatgagcatcgattgccaggagctgctgcgtcttttcggcattccgtacattgtggctcccatggaggcagaggcgcagtgcgcctttctcaatgccacagatcttacccacggcaccatcacggatgatagtgatatctggctttttggtggtcgaactgtctacaagaacttctttgcacaaaacaagcacgtgatggaattccgggcggaacagatcgagcaaacgtttaactgcaacaggggtaaactgatccagttggcctgtttggtgggcagtgactacactacaggaattcatggcattggtgctgtaacggccctggagattttggcctccttttccggacaggatgcgaatgggccaggtatctgcaatcaatcggtgcttcaaacgctaatcaagttccgcgactggtggcaagcacacaagtgcagcaatcttccacctggcagctcggctcgccttgctctgcgcaaaaaacttaagaacatcgaactgcacgagggttttcccagcggtgcagtggtggaggcatatttagcgcccacgatcgacgacaatcgggatgcatttagttggggcacaccggatgtggaatcaatcagagaattcacgcgaaaatctttcggctggactacttcaaaaacggacgacattctgatgcccgtgatgaaaaaaattaacgagaagaagatacagggttccatacgcaactactttacggcaaagagtgctctgcgagttcaacaaccgcacgtcagcaaacgtgtccaattggcaattgacaagatgtccggaaagatcgatgagacgccggagaaaccgaagaaggtgacacgcacaagacgtgcaaaggcagctccgccaacagatgatgatttggccatcgcggatgtcgcgacaaaagctgcccgtcccaaacgcggcaaacgaaaagctgcacctgaatcggtagttttggatggggaacttccttccacatcgcagtcgataccgaagcctgaaaaatgtcctcgaatacctagcagcgttgaagttatacctcaaagggaaaaggatctggagcagatgcgcctcaataaagcaaaggcggcagagattcttaaaaattcagcgaaagccaataggaaataagcttaacaaatctattaaatataactttatagaaatcatctagtgaggtttgcattttgtatttagtgtttcacagcaacctttaaaaactacgtctgttttttttttatattttttcgttgttttttttttattgtaaaactaagtactataagcacaacctaaacatgatttttaaacgat

SEQ ID NO: 22683 - protein, 1236 aa, DROSOPHILA
MGVTGLWKLIEPCGKPVPVETLEGKILAVDISIWLHQVVKGFQDNKGSALSNAHLLGLFHRLCKLLYYRVRPVFIFDGCVPQLKRDTIARRQQQRNKLSNEADRIQALLLQSLAKEKVVQQALGKNAELLLKSPVKRPPPAKKNDEDDLFKLPELPAASVQDNQDESEQDTSASASDSSFDESTARHSYNSSLQAIDVKSQHFRNLPADVRHEILTDIKETRKQSSWGRLHELPARSDDFCSFQMKRLLKRRAVQESLEQAEQEMGGHTLTYAELCDFFNEEGILTPTAIEQCTRQISSDEHTRFLLVRDLKKKAMESTKQEVKMEMIEEVPAEEEDEKPSTSTKKEAVKSVDLGTEFDEDLAKALSMSMEETKVYDEKDYEYDSDQELRLNRAQTKQLRHAAKGPARAYMIEYGGMNDEEVGNIMEATQFNDTQSLEKLLEITTVPTDMADNSIEEAKLISQAIEESKQLSQAIEESKKNLNEDKVEIVDTDTDSDLEEVMEVQELDKGKKNLEICVDITGQADSNDLFADIFEDGEANKIEKTISVEEDDDFIEVKDSEELKLDTEDENKPITNKSIKESNEVKPFIDEIIEVKDSQEAVPAEPNLKPDLESILNDLKKQTAAVKDIQLNVNEEEKPKPKVEISSILDELKVKMADVKNITLDNVKLSNSVPIILSSDDESTLKSSKIVPKQELIELCDSDDNKNNRLSPNKTPSKNKSIKDFFETSYVVKRTPDKSQASNETSPGTPKTPKPFFRKRTPKSGRKRASDANEDSDEEVSPTKRSSKASKSLFEPKEPEEEKTVDPEEIIKDAAEALKSQKTSEELQELATNLAQERKELEIERNRQDRMGMSISQRMSIDCQELLRLFGIPYIVAPMEAEAQCAFLNATDLTHGTITDDSDIWLFGGRTVYKNFFAQNKHVMEFRAEQIEQTFNCNRGKLIQLACLVGSDYTTGIHGIGAVTALEILASFSGQDANGPGICNQSVLQTLIKFRDWWQAHKCSNLPPGSSARLALRKKLKNIELHEGFPSGAVVEAYLAPTIDDNRDAFSWGTPDVESIREFTRKSFGWTTSKTDDILMPVMKKINEKKIQGSIRNYFTAKSALRVQQPHVSKRVQLAIDKMSGKIDETPEKPKKVTRTRRAKAAPPTDDDLAIADVATKAARPKRGKRKAAPESVVLDGELPSTSQSIPKPEKCPRIPSSVEVIPQREKDLEQMRLNKAKAAEILKNSAKANRK

SEQ ID NO: 22684 - DNA, 4875 bp, DROSOPHILA
cattgtagagctccaagcaatttttgatggtctcattgtcctcgatggactccagagtgctcgaccggtgatgctgctgaaggagcgtgcgacgtcgggcttcccgcctttccgcctcgtcgtcgttaaagggggttagcatgcgggacaccccctcctggtaactgcctactgcggaccgcctgagcggagtttctaagcggggcagagtcatcctttcaaggaagtggataaatcagagatgaagtcagagaacagcacaaggaattttggttgccgtaggctgatggttttggagagtgttaataagcacactcacttttaataatagctgtgatcccaattcgacagttttgaattttttgttttttgatgatttgttgattgtattttgtctatttctgtttttgcgctggtattggtaatagtttacagtttctttcaaacgacgccgcaatttagggctgcatttcagtgttggttaaaactaaaggtgtgccaagctagctagataatatggacaggaaaatcgctaaagaattagctataaagtattgcggaatataattaactagtataaacatgatacataattttatcatatgagaaaaatgaaataaacaaacttaatttacaccttaaagcttcgaaatcgaataaaaacacgatagcttacaatggaatttctttaagttcagggctgcacaggtcctgccagtgctgaatggatttcaacaatggatggccgttaaatttcaaatacatgtaccatattaaagaaactacgatctgtaaaggaattaatctgtttcaatacttttagttttttatataattttcagtccggtagttaattagtattttttcttttgacaataaagtcttaacctaagcaatatttaatttgtaaaaacccttaatttttccttgggactcttgccaacactggcgctgataatcaccccatccctggaaggcggcaacttttacacacactgccgcagaaattgtagtccctcgcgcagttcacatcgaaccaatgtcgtgatttttgttagttttcgttgttttcgtctgataaactctaaataactatcagccagcgctgtgcgaaaagctcgatgtaatcgaattgggcagaagaaacgctcagagattcaaacccatagcttctatagatctatagcttttccgaagatcggactcctcgtgtatgtgtgcatttctgcctgtggtagtgctggagtaactggacatttcgaatttacgcagttccaggcaaacctaacgggttttccagttcgacttgcggaatagcaggaatacgagattacggggctacggagtttcggagttttggaatcactatggcacgcgacacacaaggaacgcagggaacccagagtcaggcctccaatatctggacgcaggtggagagccagccgatggagaagatagtctggggtcgattgtacggcaagaacattaagatcaaatcgctgggtacgagttcaaaataccgaatcatttatacgcattcgtccttttctgttggtaaccacatttcctcctgttttgtgtccccattgcgtgtgctcctcatgtattaatgacgatcccatgctgaactgtttgcagatctcaacaacgacgagttcaccgcaggacgaggggaggccaacgacttgatcctcacgctcaacgatttgcccgagaaaatcctgacgcgcatttccaaagtgcattttatcataaagcgggcaaactgcgaacttaccaatccagtttatattcaggtaggtggaagttccaaacccaaaagctctgaaggaagccttgaaaaaaaagatagcaaattcagaacccacaagagcagaattcaaattaagttttatttatgttttgttgagattatcaaaaaaggtaacttcaatattgaatatttcccacaattaatttacaaaaagaagttactattccgtataattccgtatattattaaaatgtagtaaccttgtttccgcccatttcgcaggatctctcacgcaacgggacgtttgtgaataacgagaaaattggcacaaacaggatgcgaatcctaaagaatgacgacgtaatttccctgtcccacccaacgtacaaaggtaagcgatcgacaagcaggtatagctatcgacaaggactcgcaagtaatttgatgttttgcacctgccctcccttgtagcctttgtattcaaggatctcagcccgaatgagtcgatcgggcttcccgaggagattaacaagacgtattatgtaaatcgcaagctgggatctggagcgtacggactggtgcgtttggtctatgacacccgcacctgccagcagtttgcgatgaaaatcgttaagaagaatatgctctctggggcgcgacccagtaccaatttcagtgatcccgaccgggtgctgaacgaagccaagattatgaagaatctttcacatccgtgcgtggttcgcatgcacgacatcgtggacaagccggattctgtgtatatggtgctggagtttatgcgcggcggcgacctgcttaaccggatcatcagcaacaaactacttagcgaggacatctcgaagctttacttttaccaaatgtgccatgccgtcaagtacctacacgatcggggtaaaacaaattagttttatttgggttcgaatgtgttgctgattaagcaagccgttcatttctgttatgcaaataagtaagtcttcggaatggtcattgaaaacgcccttaattgcaaatcattcctgcgcctttacgaatttgctagtacgactactgcgaacacatcaatcgaattattcaactaactagtttctacctttcaggcatcacccatcgtgaccttaagcctgacaatgttttgctggagaccaatgacgaggagaccctactgaaggtctccgatttcgggctgagtaagtttgtgcagaaggactcggttatgcgcacgctctgtggcacacctctctacgtggcccctgaggtgctgattaccggcggccgagaagcctacaccaagaaagtggacatttggagcttgggagtggtgctatttacttggtaagtcattatgttattctcctacgaagataacttagcaatatactcatatcttgcagcctgagtggcactctgcccttttcggacgagtacggcaccccggcggcccagcaaataaagaagggcagattcgcgtatggacacccttcttggaagagtgtctcgcagcgcgccaagctgctgatcaaccaaatgctcattgtggatcccgagaggcgaccctcaatcgacgacgttttgcagagcagctggctgcgcgatgcgcccatgctgcagaaggcgaagaggctgatgaagctcgatggcatggaaatcgaggaggagaacttccttgagccacccaccaagcgatcgcgacgctaggtttcgtttctgtgtttccatcgttaatacgtgagggtcgaggcgcgaaaaggttttaattttctggaaaaattaagcgacaacatttttcccaaaacgccgacaccgccgcatccgagtgtattggcgaatttaagtattttttgcggttgttaatttttacgtgttgtctagtgtaagtttcatcgcccaagcccggtttatcctgttaaactgcatttaaactgggctgctgcttcacaatttttttaagattcctatcgatttgaattctgccatttcattggactattattacgatttattacttgtaactgttcagtaactataagtgttaaatgtaagaatgactcttcagcaaaccattccgctttttgaaataaagcaattgaatttgttcggcagcaaaattatttgatagcgtgcgtcaccattttgcggccatgtccaatggtgatgagggtgctatcatcggtccaaacggcatcagttaggcgagaatgggtgtcctggtgcgtgtagatgaactcatggcccgcctgcacattggccactttcacggaggcgggcaaattgctcatcgcagccagatggggcctgaaaatatgtgcgttaatgcaaatcgtcattgtttcgcttaaacttgtacccattgattaataactgggcgacatggcccttgtcgaagtattccctggtttccgccagttttcgtggcactcgaatgtccagagtatgaactttgccgtcatagtccccgagatagatgtgattgtcaccctgcagctccgaggcagctgcccaggcggcactggtgaagctcagcacgtggctggcatccgcatagaggcacgtggaagatggagccgctgcccggacatcccaaaggcgggcacagccgccacgatcacaggtcacaaatttatcgactgaagctgcgggtgtggccaggccagtcaacttgtcggtatgcgaggagcgcgatctgtaggtgctcaccatatcggcgcccgagagatcccagacctgcaaaagggtaacatttgtatattttccatacatccacatcacctttatacatacattgagggtactgtccgctgagcccgaaacggcagtgcggggatccgccttgaagacgctcagttggctgatgggtgtgggatgcgcactggactcgcccacgaggaagaggcagtatggcgactgagaatctcgcaccttggagtatgtggaccaggcctggagtcgggtatccccaagggccaccagtaggaaatcatcctcagcgtagcgcacaatgttcaccgtgtgctccgcctgcagcttgaagttcgccgagtccacgctcatatggtgcatctggtcgcgtccgtagccgaacaacatgccccaccattggcgtcctt

SEQ ID NO: 22685 - DNA, 2095 bp, DROSOPHILA
gcagaaattgtagtccctcgcgcagttcacatcgaaccaatgtcgtgatttttgttagttttcgttgttttcgtctgataaactctaaataactatcagccagcgctgtgcgaaaagctcgatgtaatcgaattgggcagaagaaacgctcagagattcaaacccatagcttctatagatctatagcttttccgaagatcggactcctcgtttccaggcaaacctaacgggttttccagttcgacttgcggaatagcaggaatacgagattacggggctacggagtttcggagttttggaatcactatggcacgcgacacacaaggaacgcagggaacccagagtcaggcctccaatatctggacgcaggtggagagccagccgatggagaagatagtctggggtcgattgtacggcaagaacattaagatcaaatcgctggatctcaacaacgacgagttcaccgcaggacgaggggaggccaacgacttgatcctcacgctcaacgatttgcccgagaaaatcctgacgcgcatttccaaagtgcattttatcataaagcgggcaaactgcgaacttaccaatccagtttatattcaggatctctcacgcaacgggacgtttgtgaataacgagaaaattggcacaaacaggatgcgaatcctaaagaatgacgacgtaatttccctgtcccacccaacgtacaaagcctttgtattcaaggatctcagcccgaatgagtcgatcgggcttcccgaggagattaacaagacgtattatgtaaatcgcaagctgggatctggagcgtacggactggtgcgtttggtctatgacacccgcacctgccagcagtttgcgatgaaaatcgttaagaagaatatgctctctggggcgcgacccagtaccaatttcagtgatcccgaccgggtgctgaacgaagccaagattatgaagaatctttcacatccgtgcgtggttcgcatgcacgacatcgtggacaagccggattctgtgtatatggtgctggagtttatgcgcggcggcgacctgcttaaccggatcatcagcaacaaactacttagcgaggacatctcgaagctttacttttaccaaatgtgccatgccgtcaagtacctacacgatcggggcatcacccatcgtgaccttaagcctgacaatgttttgctggagaccaatgacgaggagaccctactgaaggtctccgatttcgggctgagtaagtttgtgcagaaggactcggttatgcgcacgctctgtggcacacctctctacgtggcccctgaggtgctgattaccggcggccgagaagcctacaccaagaaagtggacatttggagcttgggagtggtgctatttacttgcctgagtggcactctgcccttttcggacgagtacggcaccccggcggcccagcaaataaagaagggcagattcgcgtatggacacccttcttggaagagtgtctcgcagcgcgccaagctgctgatcaaccaaatgctcattgtggatcccgagaggcgaccctcaatcgacgacgttttgcagagcagctggctgcgcgatgcgcccatgctgcagaaggcgaagaggctgatgaagctcgatggcatggaaatcgaggaggagaacttccttgagccacccaccaagcgatcgcgacgctaggtttcgtttctgtgtttccatcgttaatacgtgagggtcgaggcgcgaaaaggttttaattttctggaaaaattaagcgacaacatttttcccaaaacgccgacaccgccgcatccgagtgtattggcgaatttaagtattttttgcggttgttaatttttacgtgttgtctagtgtaagtttcatcgcccaagcccggtttatcctgttaaactgcatttaaactgggctgctgcttcacaatttttttaagattcctatcgatttgaattctgccatttcattggactattattacgatttattacttgtaactgttcagtaactataagtgttaaatgtaagaatgactcttcagcaaaccattccgctttttgaaataaagcaattgaatttgttcggcagcaaa

SEQ ID NO: 22686 - protein, 459 aa, DROSOPHILA
MARDTQGTQGTQSQASNIWTQVESQPMEKIVWGRLYGKNIKIKSLDLNNDEFTAGRGEANDLILTLNDLPEKILTRISKVHFIIKRANCELTNPVYIQDLSRNGTFVNNEKIGTNRMRILKNDDVISLSHPTYKAFVFKDLSPNESIGLPEEINKTYYVNRKLGSGAYGLVRLVYDTRTCQQFAMKIVKKNMLSGARPSTNFSDPDRVLNEAKIMKNLSHPCVVRMHDIVDKPDSVYMVLEFMRGGDLLNRIISNKLLSEDISKLYFYQMCHAVKYLHDRGITHRDLKPDNVLLETNDEETLLKVSDFGLSKFVQKDSVMRTLCGTPLYVAPEVLITGGREAYTKKVDIWSLGVVLFTCLSGTLPFSDEYGTPAAQQIKKGRFAYGHPSWKSVSQRAKLLINQMLIVDPERRPSIDDVLQSSWLRDAPMLQKAKRLMKLDGMEIEEENFLEPPTKRSRR

SEQ ID NO: 22687 - DNA, 3827 bp, DROSOPHILA
aggcatggcattaacaatgcataacatttgcgtgggaatatttttgctgtgtgtaggcaaaactgaagaagcagtattaggtctcgcagctaaatggcaaatcaagcatttgcacaaaattgaattacctacccaggcatccgagtttgcagacccattacgacaagtcgagccaccgcatccaccttccccgggacgagtttccccgcccaatttcaaaccaccccccattcttcatacatccatccagtggctgaaaccgcccacgttaagtatacgccatggattcggggcaattggcacttttgcaatggggcaaaccgggaatggcaacagcaatgcttttaatgatgatcgatttgggtaaacaatgaaatttccgcattcaaattttattgctggcaatcagcgaggcttcctgctcacaaacgcacacacaaatgtccatatgccggatgaggatatttataaacgatgcgctttaatattaatctatggcgcaacgcctgtttgctgtttgtcggctaaattcgcagcgcagttgaatgatgcatgtcgtcgttgaaattagcatataacatgtacattatcgtatcgtgagtgtacaataacaggctgagcaaacaagtttagcgattttgtgattaattaattttctataacggtcgttggggttttaaattttcgcagtgggaccaggctgggcgttaaataccagatgggaaaatgcattagtattttatactaaagtactgtgctatgtgcaattgatgtgtaataataaatacgaagcagattaggtatgattccttaaaatcaattatttattcaggctttgcatattaggccataaaaagatatagtcgaaatatattcccaactgcgataattcgaaactagtgtaaagggggccttatcgaagtaaacaaacccgcagcgttgccagatgctgcgccaagaacaaagtggccactctgccctctatttactaacaaaattacttgttcttggccgcacttgcaaatcaattaggccataaatggcattgcaataaatgagtgtgcaccacctaatgacccatcgataaacggagctgttaagtaccgcgacgagaagaatagcgaacagctggcgcagacggagacggagacacattccgatgcactttctcctgaagaaaacccgtcgagcggcttatttgacatccatttcgatatcaatacagagaaatagagagaaatagcaagaaatagaggccacagcaccaccagccagccacctgtgtagcgacaacaagcgacgagctgcaaaaacaacaacaaaaagttgattgccatcgtcttggccattttattgggcattatagccgcagtcagtcacataccgcccgttctcgagttcgccacgattgcttaaactgtttgcgtttgcagagcacagagcactccaaagaattcgtaatttgcatatatagaacctcagagatatatgcagagattccgactgggcgtagcatgttcagcgaactgagtcagccgccttgaaatttagcgcttaaagtgagtttcagaagataccagttgtgctttgaatttctaacgtcttaagtggatcatttagcaaaacaggatggcttcgattgtggagaaagtgcgtcgcattttggactcaaaagatctgggcgacatcacaacggaactgtgtgacttttctcttaaggaacagaatgccaccgccgaggcccagggagtacagccctcatccgcatccgattttgtgcccattcttggacagacagtcacctatattgtggcctgtgtgttgatcaatgagcacgacgagcttctgatgatcgaggaggccaaacagagctgtgccggtgagtaggaaattccgaatgtccaaaaccacaattcaagaaccatctaacacgttgcactctattgaccaggcaagtggtacttacccgctggtcgcatggaaaggggcgaatccatcacggaggcagccgcccgggaagttttcgaagagactggtctaaatgccgagctgaccactctattagcggtggaggccgccggtggctcttggttccgcttcgtgctcactggacgcatcacaggcggccgacttaaaactcctgcggatgcagacgccgaatcgattcaggcgagatgggtgcgtaatcccaaggaagtacctctccgagccaacgacatactcagtatcattgagattggaagggcgtatcatcaggggcaaaagattgccattagcccttcaccctggcatgggaccatactgcccacacgtttcgcccacaaacgtaactatctgcgggttctggctgtagccagaaagcgagcacacaactcgctgaacatcctggtcagtgaaaagaacgcccaccactttcccacggtcgaactgcatccgaatcgcagcctgcactctacgctgcgcaagttcatgattgagatttttggtgcggagctgccacagcatcgaccacatggcttacttagcgtggagcactcagcttcggagcaggagaacactgatggaatatgccttaatctgctggtggctttccgaccgccactggaggaaatctcgctgatcggcaagtgcatttggcaggaactgggtgcgccacttgacgagatgctgggacgtatcgtcagcagcaagaacgcatccattccgctgaatgtggtgcgctaaaatgccttagactagagtaatctgtccttatttatggtgcaagcaatctatccgttgttagttgcaattaaagatagcagatgtctgccagatgtccgactgtaaggcaaatgtttccctccttggtgctaaatagtgaattacgtagataagtctctgccaatctgtcataaaacgcctagaagtaatcttaacctcttaacccattcccctttcttggtgaaagatctaatctgaagtttactcgtttgcgtagcctaatctattctagagatttacttagaaaactgtttactattatatagtaccaattaaaatattcacgttttcatgcgaactaaataatccaaaaagccttacctatttcatccagtctagctatgatttatatgggaacttcaaatagactcttcagatttaattcaatttttaaaacaagctgtataatttctatagccacttacccattgcgggtatagagtgtatataaaatgctttcttggaatatgtcacaaaactagaaactattgcaacagtcgactagggaacaatgggaacagaggaaaatgcacgagtgggttttttggggtagaaggatgaactaagtaactaagtcgccaagccgaatcgccgagttacacccacaccttgttgaacagatccatgaaggagtcgtagatcataaaggtgatggccacatccaggcacacacgacctaatcttggcacggtgcccttgtagaaggcggcgggaccttcgttcttcaagatctccaccgcacagtgggcagtgttcttgtatttcgatgcttccagaccctgcatcctcgtcttgaccacatccagcggcgtattaccgaacacagaggctgctccggcgatagctccaaacactccaaccaccaacttgggcactggcttcgtgtgatcgtcacccttgtacaaatccttaagggactccagtacgaagaagcgaatggcctggttggagccctgtttcagaatggtgggcgttaggcccttgtagataccagagatgccctccgacttgatgatttggccaacgccgtgggcgaatcccctgaacttgggattgccgctgcg

SEQ ID NO: 22688 - DNA, 1685 bp, DROSOPHILA
cttgttcttggccgcacttgcaaatcaattaggccataaatggcattgcaataaatgagtgtgcaccacctaatgacccatcgataaacggagctgttaagtaccgcgacgagaagaatagcgaacagctggcgcagacggagacggagacacattccgatgcactttctcctgaagaaaacccgtcgagcggcttatttgacatccatttcgatatcaatacagagaaatagagagaaatagcaagaaatagaggccacagcaccaccagccagccacctgtgtagcgacaacaagcgacgagctgcaaaaacaacaacaaaaagttgattgccatcgtcttggccattttattgggcattatagccgcagtcagtcacataccgcccgttctcgagttcgccacgattgcttaaactgtttgcgtttgcagagcacagagcactccaaagaattcgtaatttgcatatatagaacctcagagatatatgcagagattccgactgggcgtagcatgttcagcgaactgagtcagccgccttgaaatttagcgcttaaaatggcttcgattgtggagaaagtgcgtcgcattttggactcaaaagatctgggcgacatcacaacggaactgtgtgacttttctcttaaggaacagaatgccaccgccgaggcccagggagtacagccctcatccgcatccgattttgtgcccattcttggacagacagtcacctatattgtggcctgtgtgttgatcaatgagcacgacgagcttctgatgatcgaggaggccaaacagagctgtgccggcaagtggtacttacccgctggtcgcatggaaaggggcgaatccatcacggaggcagccgcccgggaagttttcgaagagactggtctaaatgccgagctgaccactctattagcggtggaggccgccggtggctcttggttccgcttcgtgctcactggacgcatcacaggcggccgacttaaaactcctgcggatgcagacgccgaatcgattcaggcgagatgggtgcgtaatcccaaggaagtacctctccgagccaacgacatactcagtatcattgagattggaagggcgtatcatcaggggcaaaagattgccattagcccttcaccctggcatgggaccatactgcccacacgtttcgcccacaaacgtaactatctgcgggttctggctgtagccagaaagcgagcacacaactcgctgaacatcctggtcagtgaaaagaacgcccaccactttcccacggtcgaactgcatccgaatcgcagcctgcactctacgctgcgcaagttcatgattgagatttttggtgcggagctgccacagcatcgaccacatggcttacttagcgtggagcactcagcttcggagcaggagaacactgatggaatatgccttaatctgctggtggctttccgaccgccactggaggaaatctcgctgatcggcaagtgcatttggcaggaactgggtgcgccacttgacgagatgctgggacgtatcgtcagcagcaagaacgcatccattccgctgaatgtggtgcgctaaaatgccttagactagagtaatctgtccttatttatggtgcaagcaatctatccgttgttagttgcaattaaagatagcagatgtctgccagatgtccgactgt

SEQ ID NO: 22689 - protein, 340 aa, DROSOPHILA
MASIVEKVRRILDSKDLGDITTELCDFSLKEQNATAEAQGVQPSSASDFVPILGQTVTYIVACVLINEHDELLMIEEAKQSCAGKWYLPAGRMERGESITEAAAREVFEETGLNAELTTLLAVEAAGGSWFRFVLTGRITGGRLKTPADADAESIQARWVRNPKEVPLRANDILSIIEIGRAYHQGQKIAISPSPWHGTILPTRFAHKRNYLRVLAVARKRAHNSLNILVSEKNAHHFPTVELHPNRSLHSTLRKFMIEIFGAELPQHRPHGLLSVEHSASEQENTDGICLNLLVAFRPPLEEISLIGKCIWQELGAPLDEMLGRIVSSKNASIPLNVVR

SEQ ID NO: 22690 - DNA, 5221 bp, DROSOPHILA
gcactaactattgcccattctatatatattaccctttgaacccatcaacaccttattgaaaattatttttttattattctgatctgctagttaagtaaaatttttactgatttaatttttgtaatttcttgctggtacgcattactgatgtttgactgtatccaacttgcttaagctaagaagccataatcctccttccgattgtctgtgcttcttccggggtgccggaatcatcacgagatgtaagaaagcccctgagtcatccatcaatcgctggactaaccctcagagcaagtgcctccattacccttctcggagtttcaggtgcacttgctgtatggatggataatcatctcctggggaattgctgccaagcagctccatttgccgattagccgacagaccaccagagcaccaccgcacgtggtaacgctcgtcggcaccatttgagttattctggaatttatgtatatgctacttcgtaattgcttatcaagcagctctgcagacccactggcgtgctgttttctaatctggaccaagagaaaggccattaaaacgaatgtccagctggaacggagtgcaaactgctttgtgtaatggtcgtcaaatggcaatgcaggtggtaatttcgtttaattgtttttactggctacgtagactgctttgaatgttaacctaatggtgggcgaatgggaacaaattgataaaaaaattaaagaaaatgaatatatatatatatatataggttctatattaggttctgaaaacagttttttattttttcaaaattttttggttgtaccaccctaatgtattttcacaaattctgttgatctggaaacattatctctgcaaactgctcaccgttacttctgttgcgcctgctctttcgccttccagtacgaaaagcaccgtaagtctccaaaatgcagatgaatggagaagtggaccgcgttggcgagggatccaagaatattggatcactttcctccaagcgatggccgcagtcacaagtgaattccccagcaaaccgatcagttataccagcaccaatacttccgccaaaacctattatcttaagtccgtgaaaaagcgggtgaccacgtgtttccagcagttgcgcgataaactccagtcatccggttcctttcgcaagagttcctccagctgcctcaaccagatcttcgtaaggtccgatttctccgcatgcggcgaacgctttcggaagatcttcaaatcggcgcgaaaaaccgaattgccggagttgtggaaggtgccattggtggcccatgaactcaccagccggcagagcagccagcagttgcaagtcgtagccagactcttctcgtccactcagatttccaccaaggaaatcacctacaacagcaacagcaacaccagcgagaacaacatgaccatcatcgagagcaactatatatccgtgcgcgaggaatatcccgatatagatagtgaggtgcgcgccatattgctgagccacgcccagaatggaatcacgatatcgagcatcaagagtgagtagctttatgtttgaaagctttcttctttccagaagtttcgacttcatcaaacacttcagaactttctctaagtggctatatttagttagaaatctaaaatgtataaatttttagtaggttattaaattttatttggattatataacttttatagtttagtatatttattttaatttatattttttctatgtttcttttttgtaagattacccttaaataattctataattgaaattcgccaggtgaatatcgaaaactgacgggcaatccatttccactgcacgacaacgtgacggatttcctgctgaccattcccaatgtgaccgctgagtgcagcgagtccggtaagcggatcttcaacctgaaagcgagcctgaagaacggtcacctcctggatatggtgctcaaccagaaagagcgcaccagcgactacagcagcggagctccgtccctggagaacataccacgagcacctccacgctactggaagaatcccttcaaacggagggctctgtcccagctgaacaccagcccgaggaccgtgcccaagataacggatgaaaagaccaaggatatcgccaccaggccggtttcgctgcatcaaatggccaatgaggcagcggagtcgaactggtgctaccaggataattggaagcatctgtgagtactgaaaaggtgttttgtagacagtgcaactatagcaaaaataaacctttacttaacaaaatgtactaatctttctactgaactcctagcaacaatttctaccagcaagccagcgtaaatgcgccaaaaatgccagtacccatcaacatctacagccccgatgccccagaggaaccaatcaatttggctccacctgggcatcagccaagctgcagaacccaaagccagaaaaccgaaccgactgaaaaccgccatttgggcatctttgtgcatccatttaacggcatgaacataatgaagagacgccacgaaatgacgcccacgccaacgattttaaccagtggaacctacaacgattctctgctgacgattaactcggattacgatgcctatctgctggactttccgcttatgggcgatgattttatgctatatctcgcccgaatggagctaaaatgccgatttaggcgtcacgaacgcgtcctgcagtcaggactttgtgtatccggactgacgatcaatggcgcccgaaatcgtttaaaaagagtccaattacccgagggtactcagatcatcgtcaatatcggatcggtggacattatgcgcggcaagcctttggttcagatcgagcacgattttcggctactgatcaaggagatgcacaatatgcgattggtgccgattctaacaaatcttgcaccgctgggcaactattgtcacgataaggtattatgtgacaaaatctaccgattcaacaagtttatccgaagcgaatgctgtcacctaaaggtcatcgacatacactcctgtctaatcaacgaaaggggcgtggtgcgatttgattgctttcaggcgtaagactttataccatataccatatcatatgagtttacgatttgtgccacttttcagctcaccacgccaagtcaccggttccaaggaaccctatctgttctggaacaaaatcggtcggcagcgcgtactgcaagttattgaaacgagtctggagtattaagttgggttcttaatcaagatacatatatgcaaattttgactgggctggcaccggaaccgacaaaataagaactttttgatgattttacgatttacgctgatggatcgctgcttttacggaattcgcttagttttaatatgttttatatgtagtatgttctctgtctttgtttatttatatgttcgtgcacttgtcctagtccattattgtatattattgtgtgttttgtgttctatgttagatttaaacttctcaatttttcgctgtctgtgatttgttttgccaatgccattgattttctgcacactttttgctgctatcccaaaagctgtgtaaaataatcaaatgcaaaataagcgcaagcagctgaaaacttctcttcaaacttttccgcttttcccaaaaccattttgctttgaaatctgtttttaccaaatcagattaaactgcaaaatggaacttaaatgcaaatcattgcaatgcttataaactgttttttgttctatatacttttgtgtgggtcaaaattcggcatgctcctgtatcacacaacctgccacttgcccttaaaaagaagggcgcagtgggcgtggtacgtatacatatgagccatgctgcattttggccgtaatgaaaatgcactgctttacttggaaaattcgcttgcacaaaatcaacgccgcggctgatttattattgatgtgctcaagcaaattcaagtgaagcatttgcgcgattttcgtctttctgtttccgtttgcaaaaaagtttataaaatgcttacactctgctgcagacacgccaaccggaagtgcgcactaagcgcttgtttgtagcacagtgtagaattctggcgtaatttacagctctactttaaagtcttctagatagctatctactatttataaacttatttattgtcttgaatgtatgttaattgtatgtattgatggtgatcacgttttttttgtcctataacaagctgcaatgtaaaatccaaaaaaaaaatgaaaaaataaaataaaagggaaatcaatgattttgtttgctctaagctatgttcaaagtaactgggaactaatcgaactaatttcgatttaaaagtggtctagattatattgtgacatttgtgaatatattattatatttgcgaatttattattatcataaaaataacggtagttgaaaaataatttagatggcatgcaatattaaaagttcccgccaaattggcttgaatctttgctaatatattacagtttccaaccttgcattaagttcacgatagtttttcggcattttcgattgtaaaagcataaaaaagtccctgctatcgaagctctaccacctccatcagcaggcgacggcaaaaaaatcttgaaatgtaagcagtaacgtcaaaattcgctttcaaatcgttaaacgtacgttctcattcgatttcagaacaaaatggcttcattcttggcacgaactggcggccccctgatcgaaaccgttaggccagcggccataaaaaaggtgagttcgccaattagtagtcatatttgtgtgtaaaaaatgcgaaaatccgtcgctttacataataaggcgaaaagagagagtgaacacctacgctgtccccttctctgtctctcacttactcacacatgtgaaatgctgatcgtttatcggtacaaaaaaaaaacttaagcgataatttaagttctttgccatttgttaactaattgtttctccagagaaacggggagagtgtgagatttaaagagagtcacgatcaccaaagacacctgacttttttattgtgtcagtgtgacgcaactgtgcgcttttcgtacgcatgtgtgtgtgtggggaccttgaaagccccatttattcccccacttaatttagtttgttttttatcaatgagcagctgacaactgttgcttatcgtttgtggttgttgttgctgttgtcgccgggccctctaattaaattcttaatctgtgaattagtt

SEQ ID NO: 22691 - DNA, 2215 bp, DROSOPHILA
atggccgcagtcacaagtgaattccccagcaaaccgatcagttataccagcaccaatacttccgccaaaacctattatcttaagtccgtgaaaaagcgggtgaccacgtgtttccagcagttgcgcgataaactccagtcatccggttcctttcgcaagagttcctccagctgcctcaaccagatcttcgtaaggtccgatttctccgcatgcggcgaacgctttcggaagatcttcaaatcggcgcgaaaaaccgaattgccggagttgtggaaggtgccattggtggcccatgaactcaccagccggcagagcagccagcagttgcaagtcgtagccagactcttctcgtccactcagatttccaccaaggaaatcacctacaacagcaacagcaacaccagcgagaacaacatgaccatcatcgagagcaactatatatccgtgcgcgaggaatatcccgatatagatagtgaggtgcgcgccatattgctgagccacgcccagaatggaatcacgatatcgagcatcaagagtgaatatcgaaaactgacgggcaatccatttccactgcacgacaacgtgacggatttcctgctgaccattcccaatgtgaccgctgagtgcagcgagtccggtaagcggatcttcaacctgaaagcgagcctgaagaacggtcacctcctggatatggtgctcaaccagaaagagcgcaccagcgactacagcagcggagctccgtccctggagaacataccacgagcacctccacgctactggaagaatcccttcaaacggagggctctgtcccagctgaacaccagcccgaggaccgtgcccaagataacggatgaaaagaccaaggatatcgccaccaggccggtttcgctgcatcaaatggccaatgaggcagcggagtcgaactggtgctaccaggataattggaagcatctgaacaatttctaccagcaagccagcgtaaatgcgccaaaaatgccagtacccatcaacatctacagccccgatgccccagaggaaccaatcaatttggctccacctgggcatcagccaagctgcagaacccaaagccagaaaaccgaaccgactgaaaaccgccatttgggcatctttgtgcatccatttaacggcatgaacataatgaagagacgccacgaaatgacgcccacgccaacgattttaaccagtggaacctacaacgattctctgctgacgattaactcggattacgatgcctatctgctggactttccgcttatgggcgatgattttatgctatatctcgcccgaatggagctaaaatgccgatttaggcgtcacgaacgcgtcctgcagtcaggactttgtgtatccggactgacgatcaatggcgcccgaaatcgtttaaaaagagtccaattacccgagggtactcagatcatcgtcaatatcggatcggtggacattatgcgcggcaagcctttggttcagatcgagcacgattttcggctactgatcaaggagatgcacaatatgcgattggtgccgattctaacaaatcttgcaccgctgggcaactattgtcacgataaggtattatgtgacaaaatctaccgattcaacaagtttatccgaagcgaatgctgtcacctaaaggtcatcgacatacactcctgtctaatcaacgaaaggggcgtggtgcgatttgattgctttcaggcctcaccacgccaagtcaccggttccaaggaaccctatctgttctggaacaaaatcggtcggcagcgcgtactgcaagttattgaaacgagtctggagtattaagttgggttcttaatcaagatacatatatgcaaattttgactgggctggcaccggaaccgacaaaaaaatcaacgccgcggctgatttattattgatgtgctcaagcaaattcaagtgaagcatttgcgcgattttcgtctttctgtttccgtttgcaaaaaagtttataaaatgcttacactctgctgcagacacgccaaccggaagtgcgcactaagcgcttgtttgtagcacagtgtagaattctggcgtaatttacagctctactttaaagtcttctagatagctatctactatttataaacttatttattgtcttgaatgtatgttaattgtatgtattgatggtgatcacgttttttttgtcctataacaagctgcaatgtaaaatcca

SEQ ID NO: 22692 - protein, 606 aa, DROSOPHILA
MAAVTSEFPSKPISYTSTNTSAKTYYLKSVKKRVTTCFQQLRDKLQSSGSFRKSSSSCLNQIFVRSDFSACGERFRKIFKSARKTELPELWKVPLVAHELTSRQSSQQLQVVARLFSSTQISTKEITYNSNSNTSENNMTIIESNYISVREEYPDIDSEVRAILLSHAQNGITISSIKSEYRKLTGNPFPLHDNVTDFLLTIPNVTAECSESGKRIFNLKASLKNGHLLDMVLNQKERTSDYSSGAPSLENIPRAPPRYWKNPFKRRALSQLNTSPRTVPKITDEKTKDIATRPVSLHQMANEAAESNWCYQDNWKHLNNFYQQASVNAPKMPVPINIYSPDAPEEPINLAPPGHQPSCRTQSQKTEPTENRHLGIFVHPFNGMNIMKRRHEMTPTPTILTSGTYNDSLLTINSDYDAYLLDFPLMGDDFMLYLARMELKCRFRRHERVLQSGLCVSGLTINGARNRLKRVQLPEGTQIIVNIGSVDIMRGKPLVQIEHDFRLLIKEMHNMRLVPILTNLAPLGNYCHDKVLCDKIYRFNKFIRSECCHLKVIDIHSCLINERGVVRFDCFQASPRQVTGSKEPYLFWNKIGRQRVLQVIETSLEY

SEQ ID NO: 22693 - DNA, 3044 bp, DROSOPHILA
aacagctggcagtttaaacattttcattttttttgttgacttatcttagaagttgagatgataaaagccattctcgtttttaacaatcacgggaagccgcggctatcgaagttctatcagtatttcgtaagtactgcgacatataatccatataatctagttcataataaattgtcactatcatttgtaggatgaaagcctgcagcaacaaataatcaaagagactttccaattggtgtccaagcgggacgataatgtttgcaactttctggagggcggaaggtgagcaatattgttcccgcaaattcctggaatatcttaaagcacctctttcctccaacagtttgattggcggatcggattacaaactcatctacagacactatgccacgctgtacttcgttttctgcgtggactcctcggagagcgaactgggaatcctggacctgattcaggtgttcgtggaaaccctcgacaagtgcttcgaaaacgtgtgtgagctggacctgatattccacgccgatgccgtccaccacatcctctcaggttgggaaagctactttggcaatccattcagattcagctatcatgaattcgtttcagaactggtaatgggcggaatggtcctgcagacaaatatgaacgacataatggccaggatcgaggagcagaacaagatcgtcaagcaggaagcgggcatctcggctgcacctgcccgagctgtgagcgccgtgaagagtatgaacattccgcaacagattaaagacatcaagctacctgatctgccgcaggccattaaggactttaagttctgacaaatgtgcgtctgatataactctctcgtctaattgtaatctgttgaatctagtgctttttcgcagtccttcatgaatttccaacagctgtcgactgttccgtaatattaggtcccacgtactctatataactcccctaccataataaaaatgcaaatgaattaccagtagcgagaacgagccttacgattttgatagcttaacaatgcgaagttcaaccacttccgttctatatcgaatggggtttaaaatgtacatacaaagtgtcttgcgatgacgtattcgcatgatctgtgtgctgcatatattaaagatttatacctaaaacggtgtccgctgtattaaacatgttcataattctacaatcaactgtttgtaagatcatcttcttcgccgacttccagcataacttgcattattttccgcttcagcctcttgcgcgaaacttcagagttcaggttacggaattcactggcgattagttcgccaaatgcgtcccattgatcacgaccacttaatggtaagtggaagggagagggagcagctggagcttcgacagttcgatttggatcaacgaatttggaagacggcgcaggttcaggaggcatcggaggaatgggttcgctgaccttcggaggctgacagatttctgcatcgttctctatgatcatggattccagactttctatcgaggattggctctgcttttccacatcctgatccgggtagcacatgtccagcttcgataccaatttctaccaaaaaccaggatagattggttaacttatgggctaaagatttcgatttaaggagcccaccttgcccggagcaccttgttgatagcctggtcgtggttctataacagatcgtaggaacatcaacgtcttgaagtgctcccatcgacaagccttctccgaatctcgatctcctccagactcctcgagcctcctctccaacttcttgagctctgcattgaattgattgcgcaggttgtgcaccttcttgccatagtcgtgtttcgttatttcaagcgaagcgcagatggattcgatggctttagccctgcaatccttgtttttatatagctcggaatagtggttccacaagcagtccgacgagcggtaaagttcgattagcttggcgatcttctcccgcgtccagatcgtctgcttcctcctctgtcttttggtcagttgcgtttcgcccagctcctcggatttatttggcatctcagcaaactaacaacaatatgtcaatatgcatcgaatcttattgcagtgcacatttgggatgggcgagtctgaactatcgaaagtaaacagcaacgcagtatttttttttagtactttttgaaaaaaaaaagaaacgatgaatagttttatgatctatcaaacaaaatgtaattccattgcgctttatattgatttcttaatgttaactacacatttagttttagatatttaactgtgctaaactaatagcaatcaataaatacaacattgaaatccgatatctccgtacacgcattcagtcgcatctcttggtcctatcgactagtcgataattctcatcgcaattaaatggatatacttcagtatataaataaaataaagtaaaataagcaaatccgctggaatatgcaagcgcgctagccgaaaacaattggaaaatgtgtgcgggacgccaggaccgactatagaccgttttccgagctggctatggtgacaagggaccacagaactgataaatcctaggccgacgcccactgaacacagtttcctgtacaggagtgtagttttggataaacgcaattttggtaattagggagcggtaggcgcgcagctggcagtaaagtacctccactctcgattccagacataccggatagggcgctagcgagccccaaacgtaagcacaatgtcacaagtaataccaaacacgcccacaccccaaatgctgacgacatcaacgcccatagaacccatgaaaccaccaccagcgtttcccacgatgagcggcgcaaacatacacgagcaggcgtccgatatgatactgcgggcctcgacgattttcgaggacgtcaagcacgacgaggcgaatgtggagaatgtgccccatcacggagttgagactgagcctgaggacgactcgcactacggcgggaacggcaactctaagatccgcataatgcccagtgtgaagctaatggccacgacgctcgcctccgat

SEQ ID NO: 22694 - DNA, 981 bp, DROSOPHILA
atgccaaataaatccgaggagctgggcgaaacgcaactgaccaaaagacagaggaggaagcagacgatctggacgcgggagaagatcgccaagctaatcgaactttaccgctcgtcggactgcttgtggaaccactattccgagctatataaaaacaaggattgcagggctaaagccatcgaatccatctgcgcttcgcttgaaataacgaaacacgactatggcaagaaggtgcacaacctgcgcaatcaattcaatgcagagctcaagaagttggagaggaggctcgaggagtctggaggagatcgagattcggagaaggcttgtcgatgggagcacttcaagacgttgatgttcctacgatctgttatagaaccacgaccaggctatcaacaaggtgctccgggcaagaaattggtatcgaagctggacatgtgctacccggatcaggatgtggaaaagcagagccaatcctcgatagaaagtctggaatccatgatcatagagaacgatgcagaaatctgtcagcctccgaaggtcagcgaacccattcctccgatgcctcctgaacctgcgccgtcttccaaattcgttgatccaaatcgaactgtcgaagctccagctgctccctctcccttccacttaccattaagtggtcgtgatcaatgggacgcatttggcgaactaatcgccagtgaattccgtaacctgaactctgaagtttcgcgcaagaggctgaagcggaaaataatgcaagttatgctggaagtcggcgaagaagatgatcttacaaacagttgattgtagaattatgaacatgtttaatacagcggacaccgttttaggtataaatctttaatatatgcagcacacagatcatgcgaatacgtcatcgcaagacactttgtatgtacattttaaaccccattcgatatagaacggaagtggttgaacttcgcattgttaagctatcaaaatcgt

SEQ ID NO: 22695 - protein, 266 aa, DROSOPHILA
MPNKSEELGETQLTKRQRRKQTIWTREKIAKLIELYRSSDCLWNHYSELYKNKDCRAKAIESICASLEITKHDYGKKVHNLRNQFNAELKKLERRLEESGGDRDSEKACRWEHFKTLMFLRSVIEPRPGYQQGAPGKKLVSKLDMCYPDQDVEKQSQSSIESLESMIIENDAEICQPPKVSEPIPPMPPEPAPSSKFVDPNRTVEAPAAPSPFHLPLSGRDQWDAFGELIASEFRNLNSEVSRKRLKRKIMQVMLEVGEEDDLTNS

SEQ ID NO: 22696 - DNA, 3804 bp, DROSOPHILA
ttctcggtgcgattaatgtgcagccagatctgttcgaatgtgcgcggtattatgcccatcagttcgtcatttccgcgtactccctccattgtgaaggttttaccagtgcccgtttgtccataggcaaatatacatccgttgaatccctccaaaacggaactgactaggggaaagaccacttcatggtagagcgtcgtctgcgttgcactcgcatcataggcggcatcgtaggtgaaaaccttgcgctgctccttattgccatcgaccacattctgcagctccacaacgcctcgattcggatacacgttgaccacctccggcgatctttccgagcgttctctgttgctcatgggcctgcatcggaccaccacctggacgcactcgtttggcgtctggctgctgccggtgccaggtctcctgctcttggcactcatctccaaatatccggagatccacaaggtccgtgttaactgtgctcttttctgtggtggtgactcaggcagctccgcctcaacaaaaacaaagtcgagtagctgtggcgaccgaaaacaaatgacgaataaaatcaataattccctcctgacgcaaccttctgatttgggcacttctgtgctcgatttgcacgcacaatttgaagctagtcagccacttgagctaatgagcaaatcgatttggcaatcaactgctattacctgttattttgaagccaattacttcaccttgaattcgcttttttgtctcagctgctgttaactttgtctggctcaaacgtgcagtgtgcccaggctgaccaacgttgcaccaccaaatggagcgaaaatacggtactcccaattcaataccgcgcaattcaaaatggcagagaaatgagcacaacactaacttaccacccagtttagtagatagtaattgttttttggtaatagtatacgcaagcagataattacgatatatataaatacatcaatatttattgaaactatctttttttattttttctttaaaagtcacgtttactgctttttgatttacccgaactcgatttactagagccagtttcgccccgcttacgtttatttagaggatttcgtggatcgtaggcatcgtaccaatcgtcgccctttttattggcatccttagctaaaaccggagtcgtactattaaaatttaaggtatgcgacaaccaatcgtcgccgattatttcctgttctactacgcgatcgtctatatccttcggttccgattcgccatcatcagagcttgacttttgcttcaagttatccagtttcgttcggaacttggagagtaggctcaatgtaaatgcctctctaaagtttaaaaaaattggtaaaatctttgaaaagaataaaatttatatatatcccaccttgactgtcccttcggttgaagctttactttggcggtgtacttctccttagactctataaaatcgttaatataatggttttcgctggaccccttgatttcattggactttgctgctttctcttgtccattaactagtttgtctttgctctgcttatccatttgatactgctttttcagagaagcgatttcctcacggatcttggatctaaaatacataaattatatgacttgaaacatgataaaacctatttaagtatagctcacttttcctccgagacttttcgactttgttcctcctcccgtgttaacaaaacatcctcgtcatcctcagaatcagacttttcctccactggctgaacttttttgtctgctccactctttgatctcttagacagtttcattttgatgagatccgaactagcagtggacggtttatccttgacactgtcctcagggcaatcgtcggacaagtgctcctcgatgtcggctttttctactttgggtacacgaatgggctccttgctgagttttggatcatctgtgacgtcgtgcagggatttcgccttaccggcgttctgtttaacatagacgttggtctcctcctcgtcaccttcggcttcttcgccaaaagaaagcagtccgaagtttctgtggattatattgaagcgttagcaatgcactacaaggtatttagagacttcagtttaagtgtatggtaaataaatcaatacgttgcagatacgccgcattattatgccatcattcattgttttcacttagtagtatgttaacaatttggtttccgatttagaacgtaagtcttacttgactccttgtcgctccttcttagtctttttgctcttcgtggaaggttgggagagaatacgaggaacgatatcatcgaatgggttcgagaggacttccgtagaaacgatgcgatgtgcgtgcatcggtctttcctggtggtcaacaatgccatcttccagcttgagcatgttgtagatggtatcgccggtgatctttccaaaaagcgtgttcttattctgcagctccggtgtcggagcaaatgtgaagaagaactgtgagccattgtcatcctttccagaatttgccatgccgacgaggccacgacgcgtgtaccggagtcgggagtggaactcatccttgaagggctgtccgtatatggactcgccgccggtgccgtcgccattcggatcgcctccctggacaataaagcccttgaccagccggtggaattcggtgttcttgtagtagccctctaggcagagttgcacaaagttgcggcacgccttcggacactcccgtgcccacaactcgatgtctatgtcgcccacagtggtcttaaggagcacctttcccgacgtgggtggttcttggatgtaaatattgctcattttttaacaaaaatcaaaacaatctcaacggcagtgtgaccgcactccacgctttacaaaataccaacaattcctcgaacacttgtttttttttaatatcgttaaaaaaatttaataaaattataacaatttaaatttatatcaattaatggtgtaaagctagtttgattttatttttattctaaggtttcatatctgtaagcctccattggaaatgctataagctctcatgcaaaggaattaagtaaaaacctgaaattaaacatacttttaaaaactatgtagtcattgaaatcccaaaacatttttttacgctatcccttagttaatattaaagactactttatcctgttcgattattttcgttgctgtagacatttaaaattcgttactaggcaaccgtatcgtttacatatcaatagttctttttactttttaccattggttattattcacaatgaatttcaacgacgatccactggctgaactgctcagcgataatagcctggataatgacaacttctttgagacgccagcgggagtgggtcacaagaagccagccaaattggcgaagcccaagggaaaactggaggatttgtttgggattcaggaggagacggaggcggatgtccagggacagggaacgggtgccagaaagacacccaatgccatcagcacgccgagaattgtgaagcagaagccatctatctcactggatgatgatctggtcgaggacgatgacttgggttttgatcccaaacgacccaagagtggcggcaccaaaaggagccttttcgatgatctgttgaccagcaacgcggagcccaagaaaaacattttcgatgagattctggcgggagatgccgtcaaacgtccggccactagcaaaccatccatgtcgcgccaatccacggacaccaccacggacaactcgcaggcgaggcccaagacttctaccggcagaagaagctcagcgcaatcggccaccattaatatgaat

SEQ ID NO: 22697 - DNA, 1509 bp, DROSOPHILA
atgagcaatatttacatccaagaaccacccacgtcgggaaaggtgctccttaagaccactgtgggcgacatagacatcgagttgtgggcacgggagtgtccgaaggcgtgccgcaactttgtgcaactctgcctagagggctactacaagaacaccgaattccaccggctggtcaagggctttattgtccagggaggcgatccgaatggcgacggcaccggcggcgagtccatatacggacagcccttcaaggatgagttccactcccgactccggtacacgcgtcgtggcctcgtcggcatggcaaattctggaaaggatgacaatggctcacagttcttcttcacatttgctccgacaccggagctgcagaataagaacacgctttttggaaagatcaccggcgataccatctacaacatgctcaagctggaagatggcattgttgaccaccaggaaagaccgatgcacgcacatcgcatcgtttctacggaagtcctctcgaacccattcgatgatatcgttcctcgtattctctcccaaccttccacgaagagcaaaaagactaagaaggagcgacaaggagtcaaaaacttcggactgctttcttttggcgaagaagccgaaggtgacgaggaggagaccaacgtctatgttaaacagaacgccggtaaggcgaaatccctgcacgacgtcacagatgatccaaaactcagcaaggagcccattcgtgtacccaaagtagaaaaagccgacatcgaggagcacttgtccgacgattgccctgaggacagtgtcaaggataaaccgtccactgctagttcggatctcatcaaaatgaaactgtctaagagatcaaagagtggagcagacaaaaaagttcagccagtggaggaaaagtctgattctgaggatgacgaggatgttttgttaacacgggaggaggaacaaagtcgaaaagtctcggaggaaaaatccaagatccgtgaggaaatcgcttctctgaaaaagcagtatcaaatggataagcagagcaaagacaaactagttaatggacaagagaaagcagcaaagtccaatgaaatcaaggggtccagcgaaaaccattatattaacgattttatagagtctaaggagaagtacaccgccaaagtaaagcttcaaccgaagggacagtcaagagaggcatttacattgagcctactctccaagttccgaacgaaactggataacttgaagcaaaagtcaagctctgatgatggcgaatcggaaccgaaggatatagacgatcgcgtagtagaacaggaaataatcggcgacgattggttgtcgcataccttaaattttaatagtacgactccggttttagctaaggatgccaataaaaagggcgacgattggtacgatgcctacgatccacgaaatcctctaaataaacgtaagcggggcgaaactggctctagtaaatcgagttcgggtaaatcaaaaagcagtaaacgtgacttttaa

SEQ ID NO: 22698 - protein, 502 aa, DROSOPHILA
MSNIYIQEPPTSGKVLLKTTVGDIDIELWARECPKACRNFVQLCLEGYYKNTEFHRLVKGFIVQGGDPNGDGTGGESIYGQPFKDEFHSRLRYTRRGLVGMANSGKDDNGSQFFFTFAPTPELQNKNTLFGKITGDTIYNMLKLEDGIVDHQERPMHAHRIVSTEVLSNPFDDIVPRILSQPSTKSKKTKKERQGVKNFGLLSFGEEAEGDEEETNVYVKQNAGKAKSLHDVTDDPKLSKEPIRVPKVEKADIEEHLSDDCPEDSVKDKPSTASSDLIKMKLSKRSKSGADKKVQPVEEKSDSEDDEDVLLTREEEQSRKVSEEKSKIREEIASLKKQYQMDKQSKDKLVNGQEKAAKSNEIKGSSENHYINDFIESKEKYTAKVKLQPKGQSREAFTLSLLSKFRTKLDNLKQKSSSDDGESEPKDIDDRVVEQEIIGDDWLSHTLNFNSTTPVLAKDANKKGDDWYDAYDPRNPLNKRKRGETGSSKSSSGKSKSSKRDF

SEQ ID NO: 22699 - DNA, 3457 bp, DROSOPHILA
acccgcagccttggagcaaagtgcaagattatcgtaagcagctctaaatgcctgttggtttaatcgctcgcaatagttaagttgccaaatcacacaaccaccactgttataaacatagtatcgtttagtgaaaagtataccctggaattcgtgttagttttagtttagttaagcgcccatttcatccgcctgcaatcctgggagcccggagtcgatcacctccctcctgtaaatagggcagctgcctctgcggactaccttaatttgtatagcttgtaaatagattccacacttcgcccagaaacccataccccactcccccccccacacaccaccctttgcctagcataatttcatcctaatttagttgcctagactagcgcagaaataagcgaattgtacacaaacaaacgaattcgagcagcacgcagagagcgaggaaattgtttaaatgttcaacttgaaagattcttaattgtatgagattatagaccctagttgacccaatccgaacccgaacatgtaaatatctgatgaatttcgaaatgcaaggcccaactatcgcagccacatataaatatacacttgtatagatacctagttcggctaaggaccacacatgtttaatcttgatcggaaggagacccatgccacacacacacacacacacacacacacacacacacccacacacacagatgattaaccattaacgatttatagatgttaagtattttatgcgtcggttttgtaaatccaaatcttaagaggaatgttgtaactttcgaccaaggtccaaaaaagaaacacacagaaaaggaagaagcatccaaacagagaattcccctctacgaaaagtgaaaagtgtaatacaaaatattgttgaacgatgcgtgtcgctgtaaaatttttagcatagaacttttaaacgaaataaatttaaatgtaactaaaggaactcgttttgctttggccaaagggaaacgccgcattcttttttgtcttctttaatggttgtttatgtacacacatattttaatataatttcatcaatgcacaatgcaatccttccacttaacatgttaacttattgctgtcgccagagaatcgagtggtgatcgaaaaatagttggaaaagtaaagagcttggtgagaaaatagagtaaaccaaaccgtaaaaaggggaattagtctagtctagagagtttcgagtttcagcttggagttcagttgcgacccaaggtcatgccccggccccagggactttcggtcgcctgcctaggtggtgctctgctctccggtgggagtccgaagccgccgaatccgccggaaacatctggcaccaggcgcttcctatacaaaaaaaagaagtgcgggttatatcgactagcaccacaagttaattatcctcgttatgcttacaagaactgcggcgtttccaacaggggtgtgccgcccaaatcctgcgagtattggaacttgaagaagtagtacacatgtcccacgaatatgcccaccagcgaggcgagcgagctgcagcggattacaatacgataacaattagcagataaggcagataaactgacgcgacttacaagtggaaaataaactcgaaggcggccagcacccagggaaggtacatggccttgaacctggtgccgaaccagaagctcacggtgacgtccttgttcagctggcaccagatatacgtgatggccagcaccagcgtgtccatgaggaagtacacgttgaagatcatgcccccgatgttggccagcaccgccgacacgatcaacaggtacaggtaatcagccggacttcggctgtactgatccttctccagtttggagctgcaaggcaggattatgaatcctaaggaatcctaacgtaacgaaccagttgctgtgctgcgccaggctggccgactactcacctgtactgaacgatgaagaagcagttgatgaggaagtggaaggccgtgttcgacgagatgggaaagacgaacagtgacgtcatgcagcgccagagctgcagcttgctgaaaacggccgatcggtccagatgcagccaatgaaggggtatcacatcgaagcggcagagcatgctcaacaccacggtggccgtcagccagtagcgggtgaagcggggcagcgagcggtaccacacgccagcgtccattgtgtgtacttctcgtgtatgctttggtgtcctgtttaattcattaattcgctgcttttgtgcggagtgattttctctatttttgttgctttacgtgtctttttggtgatggcacttgactccggctcggggcgaatggcaagggtcgtgcctatcggctgggtttaacggccatgaacgcgcttgccagtgaatgtctcttgcatttgaatttttaacatcttttgaaataaattcgaaatttttataaaactttatttatggtctcgaaattctaagtattactgggtattatgaagttgtttgttattatgtatgagtttgacattaataagttagaaaaaaagaattttctacaatatccaggaatcaaactaatatcgaaaaataaggtttaaaatgtttttacatgttcttaaagaactcaagtcattttgattttatataaaaccgaactttcctagaaacaaagtcaattacggtaacacaatgctcgtttaatatcatgcgatcctttatgatctattgtacaatatttataaggaaccctgcaatatttgaagcaacatccattttcgactgcagttcattaaaacttaacatcttttttgctttgttgtcaataaatgcagcctcattgatggatttaagttattttcattattatttcggtgtgccccttccgctctccttcacctttgatcccgcaatttgtgattttgtgaggtaacattttcgaggactgacaaagcgatggccaacaacaaagcggacagaaacgcacacacatgcaggacacttaattcataacaggcgagagcacacaaataaatagcggaaattttgttacgtattttttggcaactttttgtggtatctttgtggcaatgcctttgttagccaacgaaaaatgcgggaatttttgacaggtaagaagcgtgtgccatggcactcactctctcacacgcacacacgaacgcacacacattgccatgcagtggtgcgaaattaatcaacttggaaatcatgcgcttttccaatatcctgcattttcgagtgaactccgctgtgctgattaattttggacaatattccccactgtcacaaagcagattattgagtctcaaaatttagagacaatttttttttctggtggacttttggtaacgaaagtaaaagccggtttttgagcgataagtaaagttcatattttttgagtgccgatgcattcgaatggtcgttctgttggagtgagtgagctggcaacagttggtgtggg

SEQ ID NO: 22700 - DNA, 1243 bp, DROSOPHILA
cttagaatttcgagaccataaataaagttttataaaaatttcgaatttatttcaaaagatgttaaaaattcaaatgcaagagacattcactggcaagcgcgttcatggccgttaaacccagccgataggcacgacccttgccattcgccccgagccggagtcaagtgccatcaccaaaaagacacgtaaagcaacaaaaatagagaaaatcactccgcacaaaagcagcgaattaatgaattaaacaggacaccaaagcatacacgagaagtacacacaatggacgctggcgtgtggtaccgctcgctgccccgcttcacccgctactggctgacggccaccgtggtgttgagcatgctctgccgcttcgatgtgataccccttcattggctgcatctggaccgatcggccgttttcagcaagctgcagctctggcgctgcatgacgtcactgttcgtctttcccatctcgtcgaacacggccttccacttcctcatcaactgcttcttcatcgttcagtacagctccaaactggagaaggatcagtacagccgaagtccggctgattacctgtacctgttgatcgtgtcggcggtgctggccaacatcgggggcatgatcttcaacgtgtacttcctcatggacacgctggtgctggccatcacgtatatctggtgccagctgaacaaggacgtcaccgtgagcttctggttcggcaccaggttcaaggccatgtaccttccctgggtgctggccgccttcgagtttattttccacttctcgctcgcctcgctggtgggcatattcgtgggacatgtgtactacttcttcaagttccaatactcgcaggatttgggcggcacacccctgttggaaacgccgcagttcttgaagcgcctggtgccagatgtttccggcggattcggcggcttcggactcccaccggagagcagagcaccacctaggcaggcgaccgaaagtccctggggccggggcatgaccttgggtcgcaactgaactccaagctgaaactcgaaactctctagactagactaattcccctttttacggtttggtttactctattttctcaccaagctctttacttttccaactatttttcgatcaccactcgattctctggcgacagcaataagttaacatgttaagtggaaggattgcattgtgcattgatgaaattatattaaaatatgtgtgtacataaacaaccattaaagaagac

SEQ ID NO: 22701 - protein, 245 aa, DROSOPHILA
MDAGVWYRSLPRFTRYWLTATVVLSMLCRFDVIPLHWLHLDRSAVFSKLQLWRCMTSLFVFPISSNTAFHFLINCFFIVQYSSKLEKDQYSRSPADYLYLLIVSAVLANIGGMIFNVYFLMDTLVLAITYIWCQLNKDVTVSFWFGTRFKAMYLPWVLAAFEFIFHFSLASLVGIFVGHVYYFFKFQYSQDLGGTPLLETPQFLKRLVPDVSGGFGGFGLPPESRAPPRQATESPWGRGMTLGRN

SEQ ID NO: 22702 - DNA, 3835 bp, DROSOPHILA
gcatggatggaaaatggcaaatggcaaatggacaaatggaaactcaagctgctgtgacaactgttcggccaggggccatttacggattcatgctgctgaagttgatgctgatgcggatagcagaaacaatccacgcagcttcgactgcagctgagaccgaaaatccgattgaagttggagttgaaattctctgcggcacttgccccaaaacctcaattggcccgccctaattgaaagtgttgccattgaccgcaggccgaaaagggatttcaatgccgggtctcggaattgcaaagcaccttctgactctcgcccattttcacccactttccctccgcacttttcacttgccaaagtgaaacaattcaatttcactgaatcggacatttctcggtcacatgtgcgtgtgtgccattgctctcgttgttgtgcgagtgtgcgaccacgattgctctatttatagctcatttcatttgctctctttttcttcacacacacacacaaacatacacacatacacacactcagactccaacactcacgctcaaagcatcctgttcacgttgacaacttaacggaaaattcatttcacacactcgcacttttgcaggtcgaaaaggtttccccttttgcccgccggcaaccgataattgtgtggcatgcgttaaatgccaattgcaacaggagaatcgagtatgcatcgatgtgtggcaatttctcttgaaggccctgtcgaatgcatgttgaaatatcttgattacagatggagtttcactaaacaaatggatcattgctggatcatttctggcttttaaatgctcaaaggacaaacttaactatgtatagagctggtctatttcttttactacagtttataattgaacttggtacaccatttcccataacaagctaaataattcaagaaattatttagttcgaatgccgaaaaaacatattctattttccgcattcgtgagatggaaatatttggagtactcacgctgcgagttggagcgccggatgatgttctcgaggaatgtgttctgcggcgcaaccagtccacgtcgtccgccaggcattttgccgcctacacgctacgcgtcgcgctgcccaatcctcgcctgctcctgctcctgcgcctgctgctcctgctgtcccgttttgctggccccggtgtccttccgctccccagtttctccttttccctttccgttccctttccctttcacttccgctgacagctggcctcctgcactggacgctgcgttgcactgacaactgacaggtgctgacggctgacagttgtcagctgatggatagatggccggctgaggtggctcctgatttctgattcctcctagatcctggcttttgatttcggaggatgttcttagatcgagatcaatacaagtggatgtgggtccagaatcgatcttgcgtggctttggatctggctcatttgaattccgcagcggggaattcgcttccccgggcgtccgtcattctgatgctgtctcactctctttctccctctctctctctcgtttttcccaaggcgcccaagctgcaagctagccaggccacccttgcccgccaggacaccatcgacgagggtggcgaggtggactcctcgccgccaagtcgcgacagtcgcgtggtcatcgagggtgcagccgtctcctcggccaccgtgggaccatcgccgccagtggctaccacatcctcggcggcggcgggagctggagtatctggaggaccaggaagtggaggcactgttgtggccattgtcaccaaagcggatcgcaatctggccttggagcgagagcgacaaatcgaaatggccagctcgagggccaccacatcggatacgtacgataccgggctgcgcgagacgccgcccacgctggcgcagcgcgatctcatcgccaccgtgctggacatgaaggtggatgtgcggctggagctgcagcgcatgcagcagcggattggccgcattgaggatctgctgggcgagctggtcaagcggctggcacccggtgccggtagcggtggcaacgctccggataacagcagtggccagaccacgcccggcgacgagatttgcgcgggctgcggcgcgggcggcggcggcacacccacaacacaggctcccccaacatctgcggtaaccagcccagtggacactgtgataaccatttcatcgccaggagcatcaggatcgggttcgggaacgggagcgggagcgggatcagcagtagctggcgctggtggcgctggtctgctaaatccgggcgccacagttgtgtcgagcgcgggaggcaacggcctggggccactgatgctcaagaagcgacgctcgaagagcaggaaagcaccggcgcctcctaagcagacactcgcctcgacggccggcaccgcgaccgcagctccagcgggcgttgccggatctggtatgacgtcatcggcgccagcgtcagcagaccagcagcagcaacatcaatcgacggcagatcaatcgcccacaacgcctggagcggaactgctgcatcttcggctgctcgaggaggactttacggcggcccaactaccatcgacatcgtctggcggcgctggaggtggtggaggatccgggtctggtgccacgcccacaacaccgccaccgaccacagcggggggcagtggaagcggcacgcccaccagcaccacagccacgaccacgcccacaggcagcggtacagcaacgcgcggcaagctggacttcctgtagcccacgacgatcgggaaggagcgaagaggagagggggacgcctccagccaggagcaataatacaaaaattgggggaagtaggggcccagccacgcccactcgcaagcctacgcctacgcttagttagtctatatacttaagatacagctgtaacctcaactcgacactgaaactagctcatctatctcaaacactttgaaagtccactgcaacgtatttatccgaagataacgaaaggcttttcgcaaaaaaatagtttgaaagaggttttgaaaatccgatttttaaaagttcaaacctcgtgtacagagagaaacatttaaatactcataatatggaacacaatcgatttaggattgcaattaattgaagataatgaattgatatttaatttgaaggttagaaaacatgaatatcatttatttacatttgagtagtattcaaatacttttttcgtagtacctataagctctctggtgatactcttaatacctgtatattaccaacaattaatttatgatattttttaaaggcaaacgattgttactaagttttgtttcattgaaccatttgttaaacttagataggaaaaacatgctgtagtggagttttggatgaaaatcttgtattttttttttgcatagatgtcggcctagtgctatccctctctctctctctcacaaacacacatacacaaacacacacactctgaatggacgtgctcgatattcaaaactctataatcgttacatgattttgattacggtagcgttagcgttagccataatgataacgattacgattaaggcaagcatattgcttacgaatttgctacatttactgcaattatttacctttttatgtatacacatatatacaaacgttgtaaaggacacacagtcagaaacacactcacatttatatatatgtatatatatataaatatacatagctgtatgtatatatggataattttgtgataactgctgaaggaggcaaagaaccagaggaaaaagcttacagaccgaaacaatgcccgtgaattgtacatagcctgaaactaaaacc

SEQ ID NO: 22703 - DNA, 4057 bp, DROSOPHILA
gagagagagagagggagaaagagagtgagacagcatcagaatgacggacgcccggggaagcgaattccccgctgcggaattcaaatgagccagatccaaagccacgcaagatcgattctggacccacatccacttgtattgatctcgatctaagaacatcctccgaaatcaaaagccaggatctaggaggaatcagaaatcaggagccacctcagccggccatctatccatcagctgacaactgtcagccgtcagcacctgtcagttgtcagtgcaacgcagcgtccagtgcaggaggccagctgtcagcggaagtgaaagggaaagggaacggaaagggaaaaggagaaactggggagcggaaggacaccggggccagcaaaacgggacagcaggagcagcaggcgcaggagcaggagcaggcgaggattgggcagcgcgacgcgtagcgtgtaggcggcaaaatgcctggcggacgacgtggactggttgcgccgcagaacacattcctcgagaacatcatccggcgctccaactcgcagccggacagctcgtttcttttggccaacgcacaaatcgtcgatttcccgatcgtctactgcaatgagtccttctgcaagatcagcggctataaccgtgccgaggtcatgcagaagtcgtgcaggtatgtatgcggcttcatgtatggcgagctgacagacaaggagacggtgggacggctggagtacacgctggagaaccaacagcaggatcagttcgagattttgctgtacaagaagaacaatttgcagtgtggctgcgctctctcgcagtttggcaaggcacaaacccaagaaaccccactatggctgctgctacaggtcgcacccatacgcaacgaacgcgacctggtggtgctcttcctgctgaccttccgggacatcacggccctcaagcagcccatcgacagcgaggacacgaagggagttttaggtctctcgaaattcgccaaattggcaagatcagtgacacggagtcgccagttcagcgcccatctgcccacgctaaaggatcccacgaagcagtccaatttggcgcatatgatgtccttaagcgcggatatcatgccacagtaccgacaggaagctcccaaaacgccaccacacatactcctgcattattgtgcatttaaagcaatttgggactgggtgatattgtgtttaacattttatacagccatcatggtgccatacaatgtagcgtttaaaaataaaacctcagaggatgtttccctgctcgtggtcgattcgatagtcgatgttatattctttatagatattgttttaaacttccatacaacgttcgtgggtcccggaggcgaggttgttagtgacccaaaggtgatccgaatgaactacctaaagtcgtggttcatcatcgacctactgagctgcctgccatacgacgtgtttaacgcgttcgatcgggatgaggacggtatcggttccctgttcagtgccctcaaggtcgtccgccttctgcgtctggggagggtggtgcgaaaactggatcgctacctggagtacggggcggccatgttgatcctactgctctgcttctacatgctggtggcccattggctagcctgcatatggtactcgattggtcgcagcgatgcggataatgggatccaatacagctggctgtggaagctggcgaatgtcacccagtcaccgtactcgtatatatggagtaatgacaccgggccagaattggttaatgggccgtcacggaaaagcatgtacgtgacggccctatatttcaccatgacctgcatgacctcggtgggctttggcaatgtcgccgcggagacagacaacgagaaggtgttcaccatctgcatgatgatcattgcagctctgctgtatgccacgatctttggtcacgttaccaccatcatccagcagatgacgtcggctacggccaagtaccacgatatgctgaacaatgtgcgcgagttcatgaagctgcacgaggtgccgaaggctcttagcgaacgagtgatggactatgtcgtctccacctgggccatgaccaagggtctggataccgagaaggtactaaactattgtccgaaagatatgaaggctgacatatgtgttcatctaaatcgcaaagtatttaacgagcatccggcatttcgtctggcctcggatggttgtctccgggcattggcgatgcacttcatgatgtcgcactcggcgccgggggatctgctctatcacaccggcgagagcatcgatagcctatgcttcatcgtcaccggcagcctagaggtgatacaggacgacgaggttgtggcaatattgggcaagggcgacgtcttcggcgatcaattctggaaggactcggccgttggccagagtgcggccaatgtgcgtgctctgacctattgtgatttgcatgccatcaaacgtgataaattgctcgaagtcctcgatttctattcggcatttgcgaatagctttgcacgcaatctggtgctcacctacaatctcagacatcgactgatttttcgcaaggtggccgatgtgaagcgcgaaaaagaattggccgaacggcgtaagaacgagccgcaattgccccagaatcaggaccatctcgtccggaagatcttctccaaatttcgtcgcactccgcaggtccaagcgggcagtaaggagctcgtcggcggttccggccaaagtgatgtcgagaagggtgacggcgaggtggagcgaactaaggtttttcccaaggcgcccaagctgcaagctagccaggccacccttgcccgccaggacaccatcgacgagggtggcgaggtggactcctcgccgccaagtcgcgacagtcgcgtggtcatcgagggtgcagccgtctcctcggccaccgtgggaccatcgccgccagtggctaccacatcctcggcggcggcgggagctggagtatctggaggaccaggaagtggaggcactgttgtggccattgtcaccaaagcggatcgcaatctggccttggagcgagagcgacaaatcgaaatggccagctcgagggccaccacatcggatacgtacgataccgggctgcgcgagacgccgcccacgctggcgcagcgcgatctcatcgccaccgtgctggacatgaaggtggatgtgcggctggagctgcagcgcatgcagcagcggattggccgcattgaggatctgctgggcgagctggtcaagcggctggcacccggtgccggtagcggtggcaacgctccggataacagcagtggccagaccacgcccggcgacgagatttgcgcgggctgcggcgcgggcggcggcggcacacccacaacacaggctcccccaacatctgcggtaaccagcccagtggacactgtgataaccatttcatcgccaggagcatcaggatcgggttcgggaacgggagcgggagcgggatcagcagtagctggcgctggtggcgctggtctgctaaatccgggcgccacagttgtgtcgagcgcgggaggcaacggcctggggccactgatgctcaagaagcgacgctcgaagagcaggaaagcaccggcgcctcctaagcagacactcgcctcgacggccggcaccgcgaccgcagctccagcgggcgttgccggatctggtatgacgtcatcggcgccagcgtcagcagaccagcagcagcaacatcaatcgacggcagatcaatcgcccacaacgcctggagcggaactgctgcatcttcggctgctcgaggaggactttacggcggcccaactaccatcgacatcgtctggcggcgctggaggtggtggaggatccgggtctggtgccacgcccacaacaccgccaccgaccacagcggggggcagtggaagcggcacgcccaccagcaccacagccacgaccacgcccacaggcagcggtacagcaacgcgcggcaagctggacttcctgtagcccacgacgatcgggaaggagcgaagaggagagggggacgcctccagccaggagcaataatacaaaaa

SEQ ID NO: 22704 - protein, 1174 aa, DROSOPHILA
MPGGRRGLVAPQNTFLENIIRRSNSQPDSSFLLANAQIVDFPIVYCNESFCKISGYNRAEVMQKSCRYVCGFMYGELTDKETVGRLEYTLENQQQDQFEILLYKKNNLQCGCALSQFGKAQTQETPLWLLLQVAPIRNERDLVVLFLLTFRDITALKQPIDSEDTKGVLGLSKFAKLARSVTRSRQFSAHLPTLKDPTKQSNLAHMMSLSADIMPQYRQEAPKTPPHILLHYCAFKAIWDWVILCLTFYTAIMVPYNVAFKNKTSEDVSLLVVDSIVDVIFFIDIVLNFHTTFVGPGGEVVSDPKVIRMNYLKSWFIIDLLSCLPYDVFNAFDRDEDGIGSLFSALKVVRLLRLGRVVRKLDRYLEYGAAMLILLLCFYMLVAHWLACIWYSIGRSDADNGIQYSWLWKLANVTQSPYSYIWSNDTGPELVNGPSRKSMYVTALYFTMTCMTSVGFGNVAAETDNEKVFTICMMIIAALLYATIFGHVTTIIQQMTSATAKYHDMLNNVREFMKLHEVPKALSERVMDYVVSTWAMTKGLDTEKVLNYCPKDMKADICVHLNRKVFNEHPAFRLASDGCLRALAMHFMMSHSAPGDLLYHTGESIDSLCFIVTGSLEVIQDDEVVAILGKGDVFGDQFWKDSAVGQSAANVRALTYCDLHAIKRDKLLEVLDFYSAFANSFARNLVLTYNLRHRLIFRKVADVKREKELAERRKNEPQLPQNQDHLVRKIFSKFRRTPQVQAGSKELVGGSGQSDVEKGDGEVERTKVFPKAPKLQASQATLARQDTIDEGGEVDSSPPSRDSRVVIEGAAVSSATVGPSPPVATTSSAAAGAGVSGGPGSGGTVVAIVTKADRNLALERERQIEMASSRATTSDTYDTGLRETPPTLAQRDLIATVLDMKVDVRLELQRMQQRIGRIEDLLGELVKRLAPGAGSGGNAPDNSSGQTTPGDEICAGCGAGGGGTPTTQAPPTSAVTSPVDTVITISSPGASGSGSGTGAGAGSAVAGAGGAGLLNPGATVVSSAGGNGLGPLMLKKRRSKSRKAPAPPKQTLASTAGTATAAPAGVAGSGMTSSAPASADQQQQHQSTADQSPTTPGAELLHLRLLEEDFTAAQLPSTSSGGAGGGGGSGSGATPTTPPPTTAGGSGSGTPTSTTATTTPTGSGTATRGKLDFL

SEQ ID NO: 22705 - DNA, 3050 bp, DROSOPHILA
ttcgtacatatgtatgtatatgtacatttgcgggatgggagtacgctggtttatgctctgcaccctgaggttaattaagattttgccatgcatttgtttgaacaaatggtgtttgtgctccaatccagccgagtcagcgaaatgaaaaagttttattagttgtaatccctaattaaattaaaactgttccctttaattaaatgcgggctgaatgcgtgatatatgataaatgttgaattagattattagcgggatttcatccttggcgtggatcatccattaatcatttgggaaatattcggaaagttttgcggaaggtttaacttttggttccgcgattttggtggactatttgccaacaagagattatagctcatcgcaaatcgccttagagtttccaacgcagcttaaacgtgtaattcatataaacacggtttacacggctgaaaataaaccatttcgaattctgctgctaattgatagcagaaataatcaggaaaagcattcgagcgataatacaattatatattcattcgaaaaaaaaatatttgattaaccccaaatcgagtgatttagtcgttcgagagctcttcgcatatgtgcaaatggtattgcatgggtgaggcctttcacttaattcattaattatatgcaagctatattcattaatatgctgatatattctcgctcggcactaaggcataaataatttcagattaattcaattttgcacacagttaaccattatccaatggaaataaaatctactgaataagcaactgggcttgtaaataattaaccttgtttaacatgtacaatattggataatataacaaaaaaaaaaacaatagatatatatgtcttacatacagatttgtcctagcttaggttgccttacgtgtataggagttatacctatgaaagagcgatatgcatcttagcaacgcaaagtctaaatttattaatgatttaaagtaacatgaaacatgtataatgacaactacaaggaaacatccttacgaatgtacacgcccacaacaaaggcgtaaccggccttaaagggctccaatagaaccatttcctttggttccagctgcttctcctttaaaagtctcctctcggcggcaaaggaatccttattaaagaccacaccttgactagtaggcgaatgtaaataggccacgaagtgaccaccggggttcaggaagtgtctagcatttagcatcagagctcgaatcagaaccgaaggcggaagatcagcgaagataatgtcaatgcaagcgggaacctcatagcggtatttatatggcatggtagcatcctcgactatgggtacgatatttgaacgacgattggccattatggtcagctgacgaccagcccaaggaatctgctccacagcataaaccattccggagtcacccactatatccgagatgtgggataccgatcgcccaaacccagctcccaggtataggacctttgagccaatttgcagatgcaaatcactgacaccacccattattccagctgccagtttggattggaagggagaccagactcggaattcacatcgcatttcccggtattccgaaatgaccctccgctcaccgtagtcatccgcactggagctcgtattcctggtgagcaattgtatggcatcgaagcggttgcgcaacaaatagacgccgtaatgtcggtgcggttcaatgcggtctgaggttccagaaaatatcctagtctccaacgtgacctcttgctcatgaccttgatcttcaacgttacattcactttgacaatcattttgtattgaatcccctcctgcggattcaatgtcccatatggaggtcctagtgatcttgggttctggattccacgatggttttatggagttcttaatggggctctggatggaagtttcttttgtgggattctcgaagtttttagatgtaattttcggatcctcagggtggatggtctttccaggaacttcttcttcaagagtactgcttggaggggaccgccgcttcgacttggattccatactcatctcatcagttttttctcaactttattgaattttattcgaaaccgatttatccccacatcggttgtatgctcaaaatttgaagtggatcccaatggttggggctcggattcagattgtggcaaaagctacatttaaaatattaagatatattttttctaatttaatagaatttgtctttacgcacatcgatattatctgatcataaatttatttaatttgagataagaattatagctattacatattaaaaatgttttagtaagtaatcgcttcttcaagtatttctcattactgaatattcataaatggtaatcactataaattccttgaggctgagttttttgtacgaataataattaattttattctccgcccgcggactcttcagtaaaatgctccgcgcaaaaggggagtgggtggtggtttgagttgagttgggtggcgatcgaaggtcagtcgccgggtctaaaaagtgcgcccacaaatgctgcacataatttaacaaagtgaactgcaccgcagtagttgcaacagcaacaaaagcaacagcagcatcaggaacaacaacgacatcatgggcaataataatggcccagaacaaggcaacaacaagaacaataagcgaaacaacagcaggcagcaacatttcgacttcattttgttgtggttttcttttggcgctcgctgggttccctctatcccgctttttctggcaatgtacataaaacttttcgggccactacaatttttaatgcactctctgacattgtgaggggggagacgggggcggcaaggacgaaggacgaacagggggtggtagtggtgaacggaggccattctggagaacaagcaaatgaaactcaagtgcatgtagctctagccgggccaagtggtgcaataaaaaaaacaaatacattcgactgttaaaatacccttttaatcaacttgtatagaagcagcagaacaaaagtgccaattaaaaaaaattactttgacacat

SEQ ID NO: 22706 - DNA, 1050 bp, DROSOPHILA
atgagtatggaatccaagtcgaagcggcggtcccctccaagcagtactcttgaagaagaagttcctggaaagaccatccaccctgaggatccgaaaattacatctaaaaacttcgagaatcccacaaaagaaacttccatccagagccccattaagaactccataaaaccatcgtggaatccagaacccaagatcactaggacctccatatgggacattgaatccgcaggaggggattcaatacaaaatgattgtcaaagtgaatgtaacgttgaagatcaaggtcatgagcaagaggtcacgttggagactaggatattttctggaacctcagaccgcattgaaccgcaccgacattacggcgtctatttgttgcgcaaccgcttcgatgccatacaattgctcaccaggaatacgagctccagtgcggatgactacggtgagcggagggtcatttcggaataccgggaaatgcgatgtgaattccgagtctggtctcccttccaatccaaactggcagctggaataatgggtggtgtcagtgatttgcatctgcaaattggctcaaaggtcctatacctgggagctgggtttgggcgatcggtatcccacatctcggatatagtgggtgactccggaatggtttatgctgtggagcagattccttgggctggtcgtcagctgaccataatggccaatcgtcgttcaaatatcgtacccatagtcgaggatgctaccatgccatataaataccgctatgaggttcccgcttgcattgacattatcttcgctgatcttccgccttcggttctgattcgagctctgatgctaaatgctagacacttcctgaaccccggtggtcacttcgtggcctatttacattcgcctactagtcaaggtgtggtctttaataaggattcctttgccgccgagaggagacttttaaaggagaagcagctggaaccaaaggaaatggttctattggagccctttaaggccggttacgcctttgttgtgggcgtgtacattcgtaaggatgtttccttgtag

SEQ ID NO: 22707 - protein, 349 aa, DROSOPHILA
MSMESKSKRRSPPSSTLEEEVPGKTIHPEDPKITSKNFENPTKETSIQSPIKNSIKPSWNPEPKITRTSIWDIESAGGDSIQNDCQSECNVEDQGHEQEVTLETRIFSGTSDRIEPHRHYGVYLLRNRFDAIQLLTRNTSSSADDYGERRVISEYREMRCEFRVWSPFQSKLAAGIMGGVSDLHLQIGSKVLYLGAGFGRSVSHISDIVGDSGMVYAVEQIPWAGRQLTIMANRRSNIVPIVEDATMPYKYRYEVPACIDIIFADLPPSVLIRALMLNARHFLNPGGHFVAYLHSPTSQGVVFNKDSFAAERRLLKEKQLEPKEMVLLEPFKAGYAFVVGVYIRKDVSL

SEQ ID NO: 22708 - DNA, 3615 bp, DROSOPHILA
gtacacagcgagaaaatgtgttagcttagcataggtaagtcatcgtatatctggcatatttaaacacagcaatctagttagatgactcaaaaaacttctttcgaaagctataaaacatatatataagattttagcttccgctaccctctttttgttgcagtgcacttgaatctgccggggatttacccttcgcaggacacacaatgaaggtgtgtgctgacaacgaatgctgtgggtgatgatccaggttgatttatctactggcgctgaggttaaaagttttgcgcatacctccattgtttaggtcagtttccctttgtgtggcagaagcacagagtagcacctccatcgttgccacaccgcagtacctcttctgcaccaccacggggctataggctgactgccagacaggaggttatgcaaatgtcagccatgtgcaattattcaacctttggccgtatgctcgagtccttttgccggagtgcctctgtgatttctgctccaccaataacgtttatttaatccatgattattttattggtttagctggaaagcacaactcagaaaagcagacagctcattactgaagccccatcgctagatcctaactaattacggagcttccgagctcgttatgcatgcgggcttcctcgtggagtcaccccccccccccccccatccacaccaagtgggtgctcaaggccacgtccggagtatcggcaatattttgctgacgtctcactgaaatccatcattttgcccagccgtctgcgacacgtggtctccccagctggctaataaatcttaatcagtccggagcccagtgggtggctgcggtctccgcttaatttgcggagctcccgcttcccattggaggccatggcttatcaacttatcaacccggcccgcattgattggctcgccaatcgagcataatcgcaaaagcttttcaatgctgataagtttatttatttgctggcctaaagcttagtccactgaccatatcccctaatatttgaggtttgcttttcgcgacattttaagtctagaagaggtttccaatctcgttcagcaggtgatcgaaccaatttccctcggtggtagtgttccaactggcagtggtgttgttccaccaaggagctgccgtggtgttcacgggtccctgggttgagttgccgagccatggaccttgagtggagttgaagttggggccaagagtggtgctgttccagatcggtggagtctgagtggtgtttccccaccatggaccttcagtggagttgtttccccaccatggtccttgagtagagttatttccccaccatgggccttgagtagagttattgccccaccaaggaccttccgttgagttgtttccccaccatggaccttgagtggtggtgtttccccaccatggaccttgagtagtggtgtttccccaccatggaccttgagtagtggtgtttccccaccatggaccttgagtggtggtgtttccccaccatggaccttgagtagttgtgtttccccaccatggaccttgagtagttgtgtttccccaccatggaccttgagtggtagtgtttccccaccatgggccttgagtagtggtgtttccccaccatggaccttgagtagtggtgtttccccaccatggaccttgagtagtggtgtttccccaccatggaccttgagtagtggtgtttccccaccatggaccttgagtagtggtgtttccccaccatggaccttgagtggtagtgtttccccaccatggaccttgagtagtagtatttccccaccatggaccttgagtagtggtgtttccccaccatggaccttgagtggtagtgtttccccaccatggaccttcagtagtggagttttgaggcggtggtggcaaagtgctgttctggggcggtagtggttgtggctgactctgggcgatgcaattggccagggcgatggaagctgcattcagcttgatcactgccttttctacttcacggaaaatgcaggcactgtaacggcgacgatcgtagcggtaaggacgcactgagctgaagagattcagaacctgtacggaacaatagacttagtcacagttccactgtaagagttattaaatcgaagataaaaactcacggtatccacgtagcattgccggttgtcatgatgcgattcgcgaagtgcgcacgtaaccaactccctttcgaaattgcgtttcgtgtagacggcatcctggcgttccaaatatctatcaatatccttagattgcactttgccgcaacgacgaatcttgtagccagccttcagcaggatctctatgttgtccacagtgtaaagggcagtgcactcttcaaattcgatgaggtcttcggccagcggctcctgcagctttccagtcacggcatcgtagaacagggactgccaggtaagctccttggaactcctgtctgcttcagctgccgcaaacgcctgcggaattcatttgagcattatataagcccacaccctggggtgtcgtcttcacctctcagtgggtttggcattctcacctgagcaccgacgagcagcagacaaactgctaaaattttgcagggaacctccatcatggcggttcaattcgtttctgaggtggcttcgctggcaggtgaccaatttaaagcggcgcgcatttgatttttaatattttgtttttattctccattattaaattgcatttatctataattgtttaggggcccagcgcaatcagctaaatggtcggacggccaggtgataagtcttaagcattctaattgatgataacaatgagtgggcaaagtgccatcatcatgataaaggtctacgaatacggaactgggtgtgaagtagcagaaagtctttcaatcggtgagtaagctttttaggggtttgggaaactccaccgatttatgttctcagagggcttgaagggaaactttttggcgaaagttctaaggaaaaaaccgaatcgaactgataatgtaaagtaataaaagaaatacctagtcttattcgatacaaataaagccccctatattgattgttaaagatttctaagtaaacccaatgattgatctctgtgaagttaagcattttaataattatttatctctgaacttagttggtcaaaggcagatcttcgaacatcagctgtggcttcgcagacacttgctctttggttatctgggtgggcttctcctgctgctgctctctcagctgctgctccatcttttgtggcacctcacgctgggctgggatcttgtccagacacgaattaaagtcgttggccgcctggatggactgaaccttggcctcgctaacagcggagctgatgcagttcgatttctcggcattcatctgagtggcattggaaacgaactgggactgagcacggtaggcctgcgagttggaggtgtccagcagctggaggttcttgtcgaactggtggaaaatggaagttagccatgctgattaatttgtaaataacgtcaacacactcacagtggacacagtgcagttcaggaaaatagccgaatcggtctcgttgcggcacagctgcaggttctgctccagggtcaacaactggag

SEQ ID NO: 22709 - DNA, 1407 bp, DROSOPHILA
atgatggaggttccctgcaaaattttagcagtttgtctgctgctcgtcggtgctcaggcgtttgcggcagctgaagcagacaggagttccaaggagcttacctggcagtccctgttctacgatgccgtgactggaaagctgcaggagccgctggccgaagacctcatcgaatttgaagagtgcactgccctttacactgtggacaacatagagatcctgctgaaggctggctacaagattcgtcgttgcggcaaagtgcaatctaaggatattgatagatatttggaacgccaggatgccgtctacacgaaacgcaatttcgaaagggagttggttacgtgcgcacttcgcgaatcgcatcatgacaaccggcaatgctacgtggataccgttctgaatctcttcagctcagtgcgtccttaccgctacgatcgtcgccgttacagtgcctgcattttccgtgaagtagaaaaggcagtgatcaagctgaatgcagcttccatcgccctggccaattgcatcgcccagagtcagccacaaccactaccgccccagaacagcactttgccaccaccgcctcaaaactccactactgaaggtccatggtggggaaacactaccactcaaggtccatggtggggaaacaccactactcaaggtccatggtggggaaatactactactcaaggtccatggtggggaaacactaccactcaaggtccatggtggggaaacaccactactcaaggtccatggtggggaaacaccactactcaaggtccatggtggggaaacaccactactcaaggtccatggtggggaaacaccactactcaaggtccatggtggggaaacacaactactcaaggtccatggtggggaaacacaactactcaaggtccatggtggggaaacaccaccactcaaggtccatggtggggaaacaccactactcaaggtccatggtggggaaacaccactactcaaggtccatggtggggaaacaccaccactcaaggtccatggtggggaaacaactcaacggaaggtccttggtggggcaataactctactcaaggcccatggtggggaaataactctactcaaggaccatggtggggaaacaactccactgaaggtccatggtggggaaacaccactcagactccaccgatctggaacagcaccactcttggccccaacttcaactccactcaaggtccatggctcggcaactcaacccagggacccgtgaacaccacggcagctccttggtggaacaacaccactgccagttggaacactaccaccgagggaaattggttcgatcacctgctgaacgagattggaaacctcttctagacttaaaatgtcgcgaaaagcaaacctcaaatattaggggatatg

SEQ ID NO: 22710 - protein, 453 aa, DROSOPHILA
MMEVPCKILAVCLLLVGAQAFAAAEADRSSKELTWQSLFYDAVTGKLQEPLAEDLIEFEECTALYTVDNIEILLKAGYKIRRCGKVQSKDIDRYLERQDAVYTKRNFERELVTCALRESHHDNRQCYVDTVLNLFSSVRPYRYDRRRYSACIFREVEKAVIKLNAASIALANCIAQSQPQPLPPQNSTLPPPPQNSTTEGPWWGNTTTQGPWWGNTTTQGPWWGNTTTQGPWWGNTTTQGPWWGNTTTQGPWWGNTTTQGPWWGNTTTQGPWWGNTTTQGPWWGNTTTQGPWWGNTTTQGPWWGNTTTQGPWWGNTTTQGPWWGNTTTQGPWWGNTTTQGPWWGNNSTEGPWWGNNSTQGPWWGNNSTQGPWWGNNSTEGPWWGNTTQTPPIWNSTTLGPNFNSTQGPWLGNSTQGPVNTTAAPWWNNTTASWNTTTEGNWFDHLLNEIGNLF

SEQ ID NO: 22711 - DNA, 3419 bp, DROSOPHILA
caattaagatatgcaaattagaagatgtccttgctccggcagctcctgtatacctgatggcatcttcactccactgggctctgataattatgcagaggtatgcaatggagacggctttaatcttggccaaccatctcaacgatagatttttattttgggcaacaatatcgggtgaagtgagtcattcaactttttcaaatgtaattattgtgttgaccgacaagctcttttgataagcttgaaatgtgtattgttcggtcattagtcatagaaattataccaaaatcaagtaatcaatctgtgcccgaatatcgactcagaaattaattgataacgaattgggaaatcctaaaagccgcggtctataattgttacttcccagttcgttacactcaaccctagcatgcctacttgtttacttttagccaagtcgaaggacttgtcgcacttacttcttttcaccaataacatttaataataagattgtttcgcgttacctccgatactttcaagtggtttgtgaatattccaagaatcgaactgtatgacagacatatagactacacgtgtatattcgcactataaacactcgaaatagattagattatttaagccttaaattcttagctatttgcttcctttttttttttagcaagctcggcaaattgcgtatgaagatcaattctgggaagtatagaattcgatcgaatgctgatctaggtgaataaaaattttgggagcggagtgaaggaaacccttgaactggatttgccgggtgggacccaatggagtgatggttataaaaccgataagactgataagactgactacggccgggtttttgagatagctcgagtgataggctaaagctgtccaataacatggcaataacatgcggtttttaatggaaaccaaggtaggaatattattttatggaccactcaatcgcgacgcctataaatacagcaggtgctaggtgggatccaataagtacgattcgatcgctggaatagtttaaacgtaaactgtatataaaaaaaaaaatgctcgtcaagttgtgcgctatccttttggcccttggccttagtcaggccattgcgtatccgcccctgcaacttagtaatccgcaccagaacctagtgcagttcctgatacaatcacgtgatctcggcaacgatggtggacatacccttgaatgcttggattattatcttcccctgctgaacgacgttgtggagacctacaaggctgatttaaatgcgtgtttggaaacagctagtcaggaggtctcacagatcaacgacaataccaaggaagaacgagatgccatcgatgcctcagccaagagctcctgcgatgccctcaccgcatgtagtacaaaggaagcggccatagattacttccagtgctacagtgaagccgtaagttgacttttgatgtgttgccgcgaacatgaaccactcccaaattgatgattacaaattattttcgcgttgaaaaaaaaaaaatgattagtcaaacacatgattatataatctaattaaattgttaacttttaatagtgattaccaaatccaacagttactaaagttttactttgccagaaacatgattttcagtctaaatacatattcgaaatttagtttgcggttgattaagttaactatatagtatatttctataacatttactaattttcaaatattctacatttcagggctccaacaacaccaaaaccatgttcaccatctccgctaacgcttcggagctgctggctgctgtggaggaggaagtgcgtctcatcaaggtgaaggaagaggtgtgcaccaacaagacccagagggcctatggagagagctacggtcagctgtacgcggatttgggtgattgcattgctggcgctccaattccatcggaatccacaagcacccaggcctcctccacggattcttcgactgattcgacgtccgcttccaccgaatcctctactgattcgtcctccgtttccaccgaatcttctactgattcgtcctccgtttccaccgaatcttctactgattcctcgactgattcttcctccgcttccaccgaatcgtctactgattcgtcctccgtctccactgaatcctcaacggattcctcaactgattcgtcctccgtgtccaccgaatcatccactgattcgtcgacagactcctcatccgcttccaccgaatcctctactgaatcctcgtctgattcgccctccgattctaccgaatcctctactgattcctcatctgtttccacggaatccacaacaagtagtggtgaaaaggaagcggcgcctgaggaggacttgaaatccctctcctctcaaaacagcaatgacctccagaagattctaaagaatctacgggtttggtttaaaaatcactaagcgatcgttttaattttaaataaaagcataaacgaataaaacccaaataaatataaatatctactttatttattcgaaaataaaaacaataagtgtttttccattgggtaaataaaaatttaacttcataacttgaaaagatgagcagtgtgatttattgtgaaaccctctaaagatatccgctgttatcaagttatcagggtatagtccccgttcaggcgccaaagtacagtgttacccgccacttgactaaccaaacgttagcaaatcaattagaggcggtcagccgataagctaccaactatactataccattaccagataacagggctatttatggatgtttgggtcacagaaaaacttattaaaaatcaaatcggaaggaatcatggccgattttaagaacacgatagcaacttaattagcttttaatcagcatgatttaaagatttctcgatgacagttccaactaccgaaaattatgatagaagagagctataaaaatatgaaccaaaggccggtagcattcagtacgtattcgagatccgttaagtcggtcagttaagtgggaatactaaaaatgaagttcgctgttgtcctgtgcctgctattggccaccagtggctttgccctggtccccaagcatcccgccgatctagtctccatgttggcccgccaacagttcgccgttcgaactttaatggccgctcccgaggcacgggatgattcgaccctgatcaatgactgcttcaaccactacctggaggaccagaccaacgtgatcatgggttacaacctacagtacaccggatgtctgagaacagcacaaagtggtcgggatgagctcactaaggagagcgcctcggagcgcgaagcccttctggatcgcaccaacaaaatgtgttccagtctgactgagtgcgatacccttgttgatggcctggaattcttcgactgctaccgcaatgccgtaagaaaaattattcactaatttaattat

SEQ ID NO: 22712 - DNA, 1123 bp, DROSOPHILA
atcgctggaatagtttaaacgtaaactgtatataaaaaaaaaaatgctcgtcaagttgtgcgctatccttttggcccttggccttagtcaggccattgcgtatccgcccctgcaacttagtaatccgcaccagaacctagtgcagttcctgatacaatcacgtgatctcggcaacgatggtggacatacccttgaatgcttggattattatcttcccctgctgaacgacgttgtggagacctacaaggctgatttaaatgcgtgtttggaaacagctagtcaggaggtctcacagatcaacgacaataccaaggaagaacgagatgccatcgatgcctcagccaagagctcctgcgatgccctcaccgcatgtagtacaaaggaagcggccatagattacttccagtgctacagtgaagccggctccaacaacaccaaaaccatgttcaccatctccgctaacgcttcggagctgctggctgctgtggaggaggaagtgcgtctcatcaaggtgaaggaagaggtgtgcaccaacaagacccagagggcctatggagagagctacggtcagctgtacgcggatttgggtgattgcattgctggcgctccaattccatcggaatccacaagcacccaggcctcctccacggattcttcgactgattcgacgtccgcttccaccgaatcctctactgattcgtcctccgtttccaccgaatcttctactgattcgtcctccgtttccaccgaatcttctactgattcctcgactgattcttcctccgcttccaccgaatcgtctactgattcgtcctccgtctccactgaatcctcaacggattcctcaactgattcgtcctccgtgtccaccgaatcatccactgattcgtcgacagactcctcatccgcttccaccgaatcctctactgaatcctcgtctgattcgccctccgattctaccgaatcctctactgattcctcatctgtttccacggaatccacaacaagtagtggtgaaaaggaagcggcgcctgaggaggacttgaaatccctctcctctcaaaacagcaatgacctccagaagattctaaagaatctacgggtttggtttaaaaatcactaa

SEQ ID NO: 22713 - protein, 359 aa, DROSOPHILA
MLVKLCAILLALGLSQAIAYPPLQLSNPHQNLVQFLIQSRDLGNDGGHTLECLDYYLPLLNDVVETYKADLNACLETASQEVSQINDNTKEERDAIDASAKSSCDALTACSTKEAAIDYFQCYSEAGSNNTKTMFTISANASELLAAVEEEVRLIKVKEEVCTNKTQRAYGESYGQLYADLGDCIAGAPIPSESTSTQASSTDSSTDSTSASTESSTDSSSVSTESSTDSSSVSTESSTDSSTDSSSASTESSTDSSSVSTESSTDSSTDSSSVSTESSTDSSTDSSSASTESSTESSSDSPSDSTESSTDSSSVSTESTTSSGEKEAAPEEDLKSLSSQNSNDLQKILKNLRVWFKNH

SEQ ID NO: 22714 - DNA, 3031 bp, DROSOPHILA
caagatacccgttgagataaagaatgcttcagtaaagaataaaatatatctcgttttatgaacttggtaatttagttgaaaattggtaattacacatgggtggggtgccatcacgaccttaccaacgaatagcagtaaccctaattttgaactttcaggaatttaaatgtcaagtttgaataatccgttaaaaatatggtttgtttatgccattcacgtgatatgtgttcacttcatcaatttacttaattttaacctgacatatttaattcttcagtatcagcaccagtgttattttgttttaaagtcttgtgcgtttaaattattttggatagtcaaatttaaaataaaataaaattattctttattattattatttattatgaagtattaattaagtattaagtattaattattggcggcttaaacttactagataaaaatttaaataacttaatttccaaatcgttataaacataattttagaaatataaagaccataaaattagaagaagaaaaattctaaaactctgtttacttatttacgcgggagtccccttcttacttttcacggcccaaagcttagtcattcccattcaaggtgctttttgatggttattatctgggttatgcaaacctgactgcggcaagtgccgaataataatgatatcagaggaattttcgcattaaaaactcgaatattattagatttacattcattccggcggggtaacaattgaatgacctccaatcaatgaccgatttaaaatggaacgtctcaaaacagatacccaccgccattttgtcgacgtatgattgtttacagattttcgaaggaaatgaaagtagaccaagtccggtgtgtagggtgagtggcatactgatatgtcttatctgcatcaagataggagaaaagcccctgcgatcgctaagtctgtggcacccaaagacttggcataaatgccttggccagtagccagttagaagcaagtttcaaacgaacctcacaacgagcaacatgcagtcacatctcatcgccatcctgctggccaccgtggccattggctcctgcatcgcgaatcccaacctcatctctggtccttcgcgaattcttgagataatgagcgccaccagtgatatccagcgtaataatccacaactgaccgtagaatgttttgactactataatgacgtattcaaaaccgagtatgcggagtatgtggatgagtacaatctgtgcgtcgataagtatgatggcggttatgaacaggttctggaacagtacaattccgttgtctgggacctcagcaattccaccttcgaatcctgcatgttcctgctggactgcgataaacagaataacagcgaaaatgctctatcctgctactccactgaggtaagtgaatagtgatttgattttttaaatacaattatttgataagtcttattttgtaaaattaaaacattcaaattcaaattaattttcagggtccgacatattccaagcagttgtcgaatgtggcagccaatgcttcggtctcggtcagttcactgcgtcagcaggtcgaaacactggtgttcacccgtgaccaatgctgttctgcaacgtccaggaactatgagatccgctccggcgagtcctacgaagatcttcagaagtgcctgagcggtgagaatcctgtgccggaaagaagcaccaccactaccagttccagctccagctccagcaccagcaccaccgccgccaaccccactactaccaccacgaccccatctccttcaaccaccacctcatcgtcttccacctcctcaacaacgagatctccatcgacagttgcgcattttagttccgttgaaaacagcagtggcaacagccagcaccgatttccaagaagactggacaatattttcaaacatattctttaagggttgaacaatataaaagtcaatatcaataaactaaaaaggaacattgcaaaaagacaatattaatagtgaacaattaataaagtaaactaatattaatactcattttttgggctataactaggggtatagctaatgtttaatgaaaagtttggacttacaatattttgtggcatatcttacaattaaaatgagattgtgctctaaataatgttaaagaaactaaacacttaacttacaactatattttatatgagttgatacaactgtttcaatagccatttaaaattccaagctagaataatttatttgccaagaatactcttatcttcgtctgaatggctttttatccgttttcagtaaacttctgatgcaattgaaaaacaggcctagggcctttgagaaatggcaatggcttaaggattggctccaatccttaaactaaacagatggaatcaagtgatgaagtcaatctggaaactcaaacgagaaactaaaacccattgcaacttacttaattaacggaccgatctaggtggaaaaccgagtaggaaaccaacctgatgcgatgcaaataaaactttttgcatttgccatcagtccaagtttatcaaagatccagcaggacacggactggggggaggggggggggttggcattagcggggaatggaaggacaaacatgtaaatcagcctgggaaaactttaccccgggcaggacaaataaaaagggcgaggaaaaaggaaatctaggacgggacactttaaggtagcggtaacagttaaataaacatcagagccattttcctagcggtgtttttttttattcaattttaattgcatgtggtgttattgtttgtacagctgccggtggcggccttgttgtcactgcaattaaaacaaattagaagcgctgtgcaaaggggagaagatttcactttgccaaaataaagccaataacttggcaagtcccagtatcctgcgtccttgccgtcttgcagcctgcctattggttggttggcattgcgatacccaaaacacacacacacacactgactcaaagaagaacacgcaattaagatatgcaaattagaagatgtccttg

SEQ ID NO: 22715 - DNA, 939 bp, DROSOPHILA
aacctcacaacgagcaacatgcagtcacatctcatcgccatcctgctggccaccgtggccattggctcctgcatcgcgaatcccaacctcatctctggtccttcgcgaattcttgagataatgagcgccaccagtgatatccagcgtaataatccacaactgaccgtagaatgttttgactactataatgacgtattcaaaaccgagtatgcggagtatgtggatgagtacaatctgtgcgtcgataagtatgatggcggttatgaacaggttctggaacagtacaattccgttgtctgggacctcagcaattccaccttcgaatcctgcatgttcctgctggactgcgataaacagaataacagcgaaaatgctctatcctgctactccactgagggtccgacatattccaagcagttgtcgaatgtggcagccaatgcttcggtctcggtcagttcactgcgtcagcaggtcgaaacactggtgttcacccgtgaccaatgctgttctgcaacgtccaggaactatgagatccgctccggcgagtcctacgaagatcttcagaagtgcctgagcggtgagaatcctgtgccggaaagaagcaccaccactaccagttccagctccagctccagcaccagcaccaccgccgccaaccccactactaccaccacgaccccatctccttcaaccaccacctcatcgtcttccacctcctcaacaacgagatctccatcgacagttgcgcattttagttccgttgaaaacagcagtggcaacagccagcaccgatttccaagaagactggacaatattttcaaacatattctttaagggttgaacaatataaaagtcaatatcaataaactaaaaaggaacattgcaaaaagacaatattaatagtgaacaattaataaagtaaactaatattaatactca

SEQ ID NO: 22716 - protein, 271 aa, DROSOPHILA
MQSHLIAILLATVAIGSCIANPNLISGPSRILEIMSATSDIQRNNPQLTVECFDYYNDVFKTEYAEYVDEYNLCVDKYDGGYEQVLEQYNSVVWDLSNSTFESCMFLLDCDKQNNSENALSCYSTEGPTYSKQLSNVAANASVSVSSLRQQVETLVFTRDQCCSATSRNYEIRSGESYEDLQKCLSGENPVPERSTTTTSSSSSSSTSTTAANPTTTTTTPSPSTTTSSSSTSSTTRSPSTVAHFSSVENSSGNSQHRFPRRLDNIFKHIL

SEQ ID NO: 22717 - DNA, 3854 bp, DROSOPHILA
tcgtatgttcttccatttggtttgcagaaatcgggctgtgaagtgggcgtagaaaaaatggggtggttttatcgacagaatctacgcagtggataaaatgcaatatactcacaggaggcgcccagttcgttggcaatgcgatcccatatgtccacccgcaccggattacggcgatagtgcggatggctgacatcatagatggccggattggcgcgcacaagctttatcaggcgatcgtctgggagcaaggatttgtgggaaaaatcgttaaaatctgtttcggttttctaattccgtttctacgtttcttcgccgcagaaacagcaacccctaagcgcagaagacacatcctttggctttgggggttgattctgcgagccccggttactcagattccatttctgaatccattgtgtaccgattgcgaaccgaggaaaactcaccgaactcgggtcctgtggtctcgcgctccgcgtagtagcgctgcatcttctccgtcttgggaaaggtgtcctggtttccgttctttcggctcatttcgtcctaactttggccaattgctttcgaatgttttgctagtcaggttgccataggcggccgcttttccttctgtttgtattcgcacttttaagacggctctcgctggcgattctaaaagtttatgttgctgcgaccgatttaccgttcgactctcctgcgttctcttcgttttggttttacgcgctctgcgcagactcaattcggctggtcttgcggttcggccagttttaggccatttcgcgacttcttttcgatatcgaatcgataacagaccacgaacttggtggcaaggctgaatgagtggcgcgcacttcaaatatcatgaaaacatatatttaaataaccgaaatgttgatcctcaaacaacgttctcatatttttctattgaaacaggtgtttagttcaaatttgtttacatctgccaagaatttccaattggcaatacgataaacacgggtaatttaatcatggagcgcttatttatttaaaaatacttttccaacaacaatacaaacaatacgaaagaagtgagaaatgggcttttaggcagccttaacgaaggcgccagcgaagaggatgttcttcttattccagatgacgtagaggaagggccggtccgcctggaactgcagcgggaaggtcatcatgcgggtcatcatgatcatgccggtggcagccgccgcctccgtgccctcctcattcacctcgatggtggccttgtgcagcaccttggacacaaagacgccctcgggggattccagcagattgctaaactcagcttggtccgtaaacattttcgtgatgcccagctgaaagtgaaaaggtaaatacataagtgccaagtaaataactaatgaggtcatatccgattgaggatttatgaacgattagatatgtgaggtgcttggaaaggtgtgtcacatccgactgcagctaaaattccatcatttttttttaggatcgtgcggctgatacatgatcttgagttcgagccactagctgccaccgcaataccacaacagctcattttggttatctaagacatttctaccctaccgtcgataagctactaaaaataatacatatgtacatcaatagacggaattttagagataagtgggcaataaatatttttgtgggcggtttgcagcactgcaacgtgtccataaaattgaattctggattttatggagaaatttattgagctactgctattaataactccaaacttcaccttaagcacgcaacatcaaatggaggtcaaggaactgtgttatataaaaacaaaagctgaccccaaatggagcttaattgtggcataaattgggtggaacaatcaaccccccccacccccaaaaaaaaaaaataatatgtacctgcttcagtttctcggccaattccagggagtagtccaccttaaacttggggaacttgacatggacctcttccacggtcaacttgtcggccaaatccaccaggttcacagtcttgagcttctcggctagggcgtaaatacctgtccgctcctgcggcagcagcacgaacatggagaggtcagagtcctggtagggcatctccagggcagtgcagcccagatcttcgaagaagccatagttgaacttggccttctggttcatgtagttgattttaacctgctcctcctcgcccacccagaagatatcctcctcggtgcgctcctcgctgaacttgtgcgcccagctgcccttgaagtggagggcattgagcaggaccagcctggtgttgtccgagaacgagtccgcgctgaccagctccgtaatcttgccctgagtcttggcattcacccaggcattgatggcctgggcggcggcatcgttgagcgcaaagttaatggactccgcctccgaatgatactgctccttgatggccgactggtaggcgggcttcagctgcttgccctcctgcacgtacagcttgttggcaacgcgcagcaggttactgttgcggtacttctccagcacaaactggaacgtttgggccacctccggcggaaagttggagacgaagtgcagtgccttggcgatctcgtcggcggtttcaccctgcgatccggcaaaggccagggcaatgcaagtttggatggagaagggcgagaagacgacgttctccttgagcccgccagcgctcaaaagctgaaaaagttcgctggtgaaacgggcacctccacgcgcaaattccaaattgaaatcgaacatattgacggactgaactgagtaattgtgggtgtgctgcgtaatcgcggaactgcgtgtgcttgctctctggtctgctgtctacaccggaatgccttaaatgccattcggggccacaacaaaagtgaaaacatcggccagccggcgaatgagtcacagccaaaatattatcaaaacaatcgaagcgaattggtggcgtcatcattttcatgatctagcaaccttgggggcatccccgggttcatcccaaaaataaaagtaatagggcgttctttaaatagccactgtttttcagtttttgtttgtctgatgataaaattcttaaaaatatgtttttatttttaatattattttgcagtgtgaccttaagcattggcgcctaaaaacgctggctttctgtccaacaaatactaaaatacacttgaacaggaaaacgcatgctgttgtttgttgtttgtaattcaatcaataagcctgttagttaaatatttcgtaattacagatttaaataatttcgaattaatatttatgccctttttaaagttatcaatttcgataggcataaaataccagatcgactattgtgcagccctggcgcttctgcgcgcgcgctttccaacaccgccgtacgcaaccaccccgcttcccgctcgcctaaaagccattatttttcgagtttcatccgcagccacagtgcaaaataggtttatcaatttaatttaagtgttaaagtagttctaaagtgttttttaagttgcgcaaacgatcgaggccagcccgcatgaatggatgtgcatgtgtccatcgatcgaacggagtatttgcattcagttgttgtgattttcccgtgaccattgcgtacgaaaatcgttttgggagcgcaagaaggtgagttgcgtctgcagatcgttatgccactctcgtttcggatgcggactgggaatcggaatggggttacggaacggaatggaagggaagggaacagaatccatggatgtgtggatctgggtctaggtcttgttcttggtcttggtttgggtctgggtccttgaacccctgcacggaatgcacgaaacctgaatt

SEQ ID NO: 22718 - DNA, 1287 bp, DROSOPHILA
agacagcagaccagagagcaagcacacgcagttccgcgattacgcagcacacccacaattactcagttcagtccgtcaatatgttcgatttcaatttggaatttgcgcgtggaggtgcccgtttcaccagcgaactttttcagcttttgagcgctggcgggctcaaggagaacgtcgtcttctcgcccttctccatccaaacttgcattgccctggcctttgccggatcgcagggtgaaaccgccgacgagatcgccaaggcactgcacttcgtctccaactttccgccggaggtggcccaaacgttccagtttgtgctggagaagtaccgcaacagtaacctgctgcgcgttgccaacaagctgtacgtgcaggagggcaagcagctgaagcccgcctaccagtcggccatcaaggagcagtatcattcggaggcggagtccattaactttgcgctcaacgatgccgccgcccaggccatcaatgcctgggtgaatgccaagactcagggcaagattacggagctggtcagcgcggactcgttctcggacaacaccaggctggtcctgctcaatgccctccacttcaagggcagctgggcgcacaagttcagcgaggagcgcaccgaggaggatatcttctgggtgggcgaggaggagcaggttaaaatcaactacatgaaccagaaggccaagttcaactatggcttcttcgaagatctgggctgcactgccctggagatgccctaccaggactctgacctctccatgttcgtgctgctgccgcaggagcggacaggtatttacgccctagccgagaagctcaagactgtgaacctggtggatttggccgacaagttgaccgtggaagaggtccatgtcaagttccccaagtttaaggtggactactccctggaattggccgagaaactgaagcagctgggcatcacgaaaatgtttacggaccaagctgagtttagcaatctgctggaatcccccgagggcgtctttgtgtccaaggtgctgcacaaggccaccatcgaggtgaatgaggagggcacggaggcggcggctgccaccggcatgatcatgatgacccgcatgatgaccttcccgctgcagttccaggcggaccggcccttcctctacgtcatctggaataagaagaacatcctcttcgctggcgccttcgttaaggctgcctaaaagcccatttctcacttctttcgtattgtttgtattgttgttggaaaagtatttttaaataaataagcgctccatgattaaa

SEQ ID NO: 22719 - protein, 374 aa, DROSOPHILA
MFDFNLEFARGGARFTSELFQLLSAGGLKENVVFSPFSIQTCIALAFAGSQGETADEIAKALHFVSNFPPEVAQTFQFVLEKYRNSNLLRVANKLYVQEGKQLKPAYQSAIKEQYHSEAESINFALNDAAAQAINAWVNAKTQGKITELVSADSFSDNTRLVLLNALHFKGSWAHKFSEERTEEDIFWVGEEEQVKINYMNQKAKFNYGFFEDLGCTALEMPYQDSDLSMFVLLPQERTGIYALAEKLKTVNLVDLADKLTVEEVHVKFPKFKVDYSLELAEKLKQLGITKMFTDQAEFSNLLESPEGVFVSKVLHKATIEVNEEGTEAAAATGMIMMTRMMTFPLQFQADRPFLYVIWNKKNILFAGAFVKAA

SEQ ID NO: 22720 - DNA, 3734 bp, DROSOPHILA
ccgactcgatgattatttaacttatgttctatttacatgattaggcgcttagcaggacgcccaattttcagttgccggaggacgagctgcttttaaaggtcagcacaaaacgtccacatctggccttcatgtctgaaaattcccctgcagaactaactaacaatgtgatttatttgtatactttatagctgtttaacgactctgatctaatggacaactatggcctatcgtttcccaatgacagcataagcagtgaaaagaaaggtttgttcggaattcagtattaattccttcgcttgagactaaactatttgatgattcaagcagcacccagtggctctgaactgatttcctatcagcccatgtatgatctgtccgacattttggacacggacgatggcaacaatgaccaggaggccagcaggcgccagatgcagacgcaaagttcggttttaaatacgccacgtcacgagttgtaacttatattaagtagcagcagctcagccgttaaattggcgaacaaatcgtttttagtgttaaatgcaaatcttgacacgttaattttcatcacctactctgtctaaccatttagttgattcatacgataatcacattaataaccactataatcatatgaatgatctgtatatgccttatgcactatatatatgatatatagactaaccagttcttgttgtagaaagactcgaagaatcagtaaagatttagatttattttgtatcgcgggattttgcgggccccagctcagcaggtagaagatttttagtttgcactaaccgatcgagagtacagtgaaagctgatcgcatcgtatacgatttaagatcgcacgcttcagtttatacattttacacactactcttatcattatttcaaaataaattgtttaatgtcgcgttgagctgcaaatgaaatcaaatgtgtactttttctttggaacaatgaaacttcgtttgctgctaaccttgttttgtgcataattttattcgactcaatgttgatacaactaaagagatatggactatggacacatatcgcctcaaattaacctagaaccttagcctaggactcgaaacgtagagttacaagttgtttgcaagtatgtaaatacataaatgaagggggagtgtgggaagtgttcgagtgcgttgtctaccactaaggatactaatcgagaattgtacgtatagaatgatgactatgacgccttagctttcgtccttgtacttggcgtccttcagaatgttggcgaactcgaacttgacccgctcccgttccgatctccgcatgctgcgcagtgtgtccaccagcgataggcagtagagctcgatgggatcgttgaaggacgacgtcacttgggtctgaagcggcgcttgggttgccttgcgcttgaagggattggtcagaaaatcgctgggtaatgcgcgtctgatagccgcaggcttgtaaatgggctcaatggtcacttctccgttggacagcgagctattcttgaacggcttttgctcctgtgtctgctgctgttctagatgcacctcctggccatagccattgcccattacaaccatcggcgttagcaggggcgaggaggccggcgagctggcttggtcatgttcgtggctgtgattgctgctgctggtgccgttcagtgtcgtcggcagggataattgctgcttggactctcccatgaccagctgcaactcgggcacaatctcgttgtcgtcgctatttgagccatcgtcgctgttgtccagctcgatgatgtcgtagccctcggaggcgtcgatctttaggtgctccggatcgggatacaaaaagctattgctgtcgttgtcacttcccattccattctgttgggccacgtagctctgggatttcttcacattgtaggtttgggccgtgttctgcagaaaggatagatcctcagtgaagcgccgcttgcgtacgttcggattcgcctggcccgtctcaatcgccttgacctcctgcagatagttgtatcgtatgttcttccatttggtttgcagaaatcgggctgtgaagtgggcgtagaaaaaatggggtggttttatcgacagaatctacgcagtggataaaatgcaatatactcacaggaggcgcccagttcgttggcaatgcgatcccatatgtccacccgcaccggattacggcgatagtgcggatggctgacatcatagatggccggattggcgcgcacaagctttatcaggcgatcgtctgggagcaaggatttgtgggaaaaatcgttaaaatctgtttcggttttctaattccgtttctacgtttcttcgccgcagaaacagcaacccctaagcgcagaagacacatcctttggctttgggggttgattctgcgagccccggttactcagattccatttctgaatccattgtgtaccgattgcgaaccgaggaaaactcaccgaactcgggtcctgtggtctcgcgctccgcgtagtagcgctgcatcttctccgtcttgggaaaggtgtcctggtttccgttctttcggctcatttcgtcctaactttggccaattgctttcgaatgttttgctagtcaggttgccataggcggccgcttttccttctgtttgtattcgcacttttaagacggctctcgctggcgattctaaaagtttatgttgctgcgaccgatttaccgttcgactctcctgcgttctcttcgttttggttttacgcgctctgcgcagactcaattcggctggtcttgcggttcggccagttttaggccatttcgcgacttcttttcgatatcgaatcgataacagaccacgaacttggtggcaaggctgaatgagtggcgcgcacttcaaatatcatgaaaacatatatttaaataaccgaaatgttgatcctcaaacaacgttctcatatttttctattgaaacaggtgtttagttcaaatttgtttacatctgccaagaatttccaattggcaatacgataaacacgggtaatttaatcatggagcgcttatttatttaaaaatacttttccaacaacaatacaaacaatacgaaagaagtgagaaatgggcttttaggcagccttaacgaaggcgccagcgaagaggatgttcttcttattccagatgacgtagaggaagggccggtccgcctggaactgcagcgggaaggtcatcatgcgggtcatcatgatcatgccggtggcagccgccgcctccgtgccctcctcattcacctcgatggtggccttgtgcagcaccttggacacaaagacgccctcgggggattccagcagattgctaaactcagcttggtccgtaaacattttcgtgatgcccagctgaaagtgaaaaggtaaatacataagtgccaagtaaataactaatgaggtcatatccgattgaggatttatgaacgattagatatgtgaggtgcttggaaaggtgtgtcacatccgactgcagctaaaattccatcatttttttttaggatcgtgcggctgatacatgatcttgagttcgagccactagctgccaccgcaataccacaacagctcattttggttatctaagacatttctaccctaccgtcgataagctactaaaaataatacatatgtacatcaatagacggaattttagagataagtgggcaataaatatttttgtgggcggtttgcagcactgcaacgtgtccataaaattg

SEQ ID NO: 22721 - DNA, 1452 bp, DROSOPHILA
ccaaaacgaagagaacgcaggagagtcgaacggtaaatcggtcgcagcaacataaacttttagaatcgccagcgagagccgtcttaaaagtgcgaatacaaacagaaggaaaagcggccgcctatggcaacctgactagcaaaacattcgaaagcaattggccaaagttaggacgaaatgagccgaaagaacggaaaccaggacacctttcccaagacggagaagatgcagcgctactacgcggagcgcgagaccacaggacccgagttcgacgatcgcctgataaagcttgtgcgcgccaatccggccatctatgatgtcagccatccgcactatcgccgtaatccggtgcgggtggacatatgggatcgcattgccaacgaactgggcgcctcctcccgatttctgcaaaccaaatggaagaacatacgatacaactatctgcaggaggtcaaggcgattgagacgggccaggcgaatccgaacgtacgcaagcggcgcttcactgaggatctatcctttctgcagaacacggcccaaacctacaatgtgaagaaatcccagagctacgtggcccaacagaatggaatgggaagtgacaacgacagcaatagctttttgtatcccgatccggagcacctaaagatcgacgcctccgagggctacgacatcatcgagctggacaacagcgacgatggctcaaatagcgacgacaacgagattgtgcccgagttgcagctggtcatgggagagtccaagcagcaattatccctgccgacgacactgaacggcaccagcagcagcaatcacagccacgaacatgaccaagccagctcgccggcctcctcgcccctgctaacgccgatggttgtaatgggcaatggctatggccaggaggtgcatctagaacagcagcagacacaggagcaaaagccgttcaagaatagctcgctgtccaacggagaagtgaccattgagcccatttacaagcctgcggctatcagacgcgcattacccagcgattttctgaccaatcccttcaagcgcaaggcaacccaagcgccgcttcagacccaagtgacgtcgtccttcaacgatcccatcgagctctactgcctatcgctggtggacacactgcgcagcatgcggagatcggaacgggagcgggtcaagttcgagttcgccaacattctgaaggacgccaagtacaaggacgaaagctaaggcgtcatagtcatcattctatacgtacaattctcgattagtatccttagtggtagacaacgcactcgaacacttcccacactcccccttcatttatgtatttacatacttgcaaacaacttgtaactctacgtttcgagtcctaggctaaggttctaggttaatttgaggcgatatgtgtccatagtccatatctctttagttgtatcaacattgagtcgaataaaa

SEQ ID NO: 22722 - protein, 348 aa, DROSOPHILA
MSRKNGNQDTFPKTEKMQRYYAERETTGPEFDDRLIKLVRANPAIYDVSHPHYRRNPVRVDIWDRIANELGASSRFLQTKWKNIRYNYLQEVKAIETGQANPNVRKRRFTEDLSFLQNTAQTYNVKKSQSYVAQQNGMGSDNDSNSFLYPDPEHLKIDASEGYDIIELDNSDDGSNSDDNEIVPELQLVMGESKQQLSLPTTLNGTSSSNHSHEHDQASSPASSPLLTPMVVMGNGYGQEVHLEQQQTQEQKPFKNSSLSNGEVTIEPIYKPAAIRRALPSDFLTNPFKRKATQAPLQTQVTSSFNDPIELYCLSLVDTLRSMRRSERERVKFEFANILKDAKYKDES

SEQ ID NO: 22723 - DNA, 3879 bp, DROSOPHILA
tggtctggaactcgtggttggcgctcacggtgtcgccgaccgacattccggatccggaacagttctcagtgccgtaatccgcgtccgtcgctggtgcctccgcaaacgtatccgcaacgctgctgttcgagttctgctccattgccgccgactctttcgtgtggctcccgtcccgatatccaatgcccaattcccgattccggattccgaactcccgatctccacctccgctcagctcacggcatacaaaaaaaaaagtttggtgcgtcgcagttcgcaaattacacggtatgcaagctctctgcaatatttaacttctggcccggactctgtttaagcccgctttcaaggcaagtggctttgcgcaagcagcaatcgccacaggaaattatcttacaatttctttgtcaatttgttgcccgtgaaaaagtggatacttgcggcagtgctgccgattcagctttattcccgtcagatctggcttagtcgcaggatagtgctgcgcatggcgggaagataagaacataaacgtctgttttttaattagtcagcattttcttaaatatccaaacgcactttatttgagttatatttttacactctttactatactgttaagttaagcttattgtatctaaaggtgctatgttcatgatatccaaaatccatgtagccataaacagcttttatcttttattaaaaaacggcagcaccgattatgtacgctgcgctgccaactcgctttaaaaaagagtagcgagtagccagtgttgcaaagcacgttaagcaagggtctgctttttggcgccgttacgggttttgaaactatatttaaatttataagttcataaatataatatataatagcacaaactttattataaaaatcggggtatgctgaaaataactaaagcggtgcaaattgctttagtttggtagaatatattattaagtaatttaaacaattgtatttatttacaatttataaacaatttgttttttattttttgtaaacaaagggcttggcggtgttgtaggccagggaataccttatgtgcttgccaaccaatcgatcggctaaaggtattaaagccggttcacgtctgtaaatccctgccgcctttggtgtccaggcccgtagacgacactccgagtggcccggcagcaggattcccatccagcccgcagagctgagcgtaatatcacagttaagcctcgtttcctcgttccttccttcacttgccagcacaatatccccatccttgcattgcaatcccggccagcgtcgcaggcgggcctccaagttctcgctagcgaagggaacacccagaaagggcgaacccacgtatcttttgtacacgctttccgcctcctgtgtatctgctatcatgatgggaagatgctctgaggcaaatacaaacaccttcagccagtcaaagtgtttccttgggcttgttatttccagcagatccaatctggccaaaccgcccagtagtatgctcatctggggccgcagccgaaaggcgcgcggtcggatcatggtggcgggctgcagctttaccagctcctcggcggtgagcaggggagatatttggtcgggttgcatcacacccggtgtgtcgtagacccaacgcgcttccttgtactccttgccccgatcgtttagcgttgtaatcggtcgcgagccaccggccatggcaaaggcatcatggagattttcgcgtcgatcgaaggtgcgtccaaccggagccactggttgagcagctgccgctgaacccgtttcccttgccactgcgcgacgctccttttccatttccgccttctcgctgcgctccgaaaccaatctcttaaagcgctgatagactcgatcgttcgatggacgcaagattggaaaccgcagcagtttgagtgtggtgcccggccacggacaggtggtggccttgcgcaccaggtcactggcctccggccggcagtagtccgagttaagcagaatgttgaacagcgagctcttgcccacattggtgcagcccaccagatagacatcgcctttgtaggcccacgttttgtgcagctgcgttattagctcctcgatgccatagcccgttttggcggatatcaaactgacattcttgatatttagaccatttccaccgccatgcttgatgaactcgcgctgcagagaatccttaatatgctgaagatagatgttggagtcgcgcggcagcagatcgaccttgttgcccaccaggaagacgggtcgctttgcgcccaatatgttttgcatgcccggccaaatggagcagggaaaatcgagaaggtccaccagaacaatagccagtgcaaatttgtcttgaatgcgggatatggtgtccacataggtcgatggggccaccaccacatccaatgcgatgttgtagtggttcagaaagtgacaacgcttgcaggtgatcgtttgcagttcctgctgcgtcctatccctgaatatttcacttggtatatagcctggcagggaggcattcgtgcaatgaaggtctgcgccgcagccgttgcatggaacctttgaggcgggtaacgaaggatccggtgtgccctgcttattccctccctcctgggcgccctgatagaactcgtagtcgtccatccagtcgtcgggcaaatgctgttgtgtctcaggaatcgagaaagagggttttattttggtctccagaacagagctgtaatgaacgtgctcatgatccttgtaccgctctctggcgagcagccacgccctctgccgaaagctctgtcccacttcagcggcggtattctgccgcctcgaacatgtgataaccacatttttatttataattttatataaacgtgtggttttaaacattttgcaatgcccacaagaattctcacagtgtcagactaaagccgtttgctacgaaaccatttacatagtcagggctgctagccgatagatctgaacgattgttatattatttggcgtacaaaataacaagcatcaattcaagcaatgctttttgtgttataaatcgaataaaagatatttcagtacattaatttgtgttcattaactggaaaaaaacaaaacgcatcgaaattaggccgattcatatcgaacaatcacgagtgtatcgaaaatcgaaatcggtgaaagagaaaaaagaaagcagcgttagcgagaaagcagaggtgagttaagtgcgggacaaaaaaaaagcgtgtatgtattaaaattgaaacaaaaagatatagaaaaagcgtgtccacggcgcaattagcgtgctcctgcggcggtcggcaggcgatatacgcattggtaaaagtacagagtacacgccgagtaaaaagcagcagcgcacaacaaataaaatgattaggaaagtgtgtggaaaaaagacaagtgtatgtgaacggcgattgtatgtgtgcgtgacgtgactgtatgcgtgctgctgctgcgtgtatatgaaataaaaagtaacgcgaagcgcgacctaattttaaccaaatattacaataatatttgcataaacaaaggcggctcggttaatgtgacgccaggcattttggtggttcctgcggctttccacgaacgtttgccgacgccattgtctgaccaaaaacaaaagaaaagaattgaaatagaataaatctcagacgagcacactattccgtcgagtgtagagttcttcccgattgagtaatgcaataacaacaaacggagctgctcaaattgttgagagtgttgcaactttcgttggaactcgttttgaaccgttgttgttgttgttgttgttgattttgtcgctcgcatcgctcactcacttactcaccgactcactcgctcctttccattctcctgatgttacc

SEQ ID NO: 22724 - DNA, 1879 bp, DROSOPHILA
caaaatgtttaaaaccacacgtttatataaaattataaataaaaatgtggttatcacatgttcgaggcggcagaataccgccgctgaagtgggacagagctttcggcagagggcgtggctgctcgccagagagcggtacaaggatcatgagcacgttcattacagctctgttctggagaccaaaataaaaccctctttctcgattcctgagacacaacagcatttgcccgacgactggatggacgactacgagttctatcagggcgcccaggagggagggaataagcagggcacaccggatccttcgttacccgcctcaaaggttccatgcaacggctgcggcgcagaccttcattgcacgaatgcctccctgccaggctatataccaagtgaaatattcagggataggacgcagcaggaactgcaaacgatcacctgcaagcgttgtcactttctgaaccactacaacatcgcattggatgtggtggtggccccatcgacctatgtggacaccatatcccgcattcaagacaaatttgcactggctattgttctggtggaccttctcgattttccctgctccatttggccgggcatgcaaaacatattgggcgcaaagcgacccgtcttcctggtgggcaacaaggtcgatctgctgccgcgcgactccaacatctatcttcagcatattaaggattctctgcagcgcgagttcatcaagcatggcggtggaaatggtctaaatatcaagaatgtcagtttgatatccgccaaaacgggctatggcatcgaggagctaataacgcagctgcacaaaacgtgggcctacaaaggcgatgtctatctggtgggctgcaccaatgtgggcaagagctcgctgttcaacattctgcttaactcggactactgccggccggaggccagtgacctggtgcgcaaggccaccacctgtccgtggccgggcaccacactcaaactgctgcggtttccaatcttgcgtccatcgaacgatcgagtctatcagcgctttaagagattggtttcggagcgcagcgagaaggcggaaatggaaaaggagcgtcgcgcagtggcaagggaaacgggttcagcggcagctgctcaaccagtggctccggttggacgcaccttcgatcgacgcgaaaatctccatgatgcctttgccatggccggtggctcgcgaccgattacaacgctaaacgatcggggcaaggagtacaaggaagcgcgttgggtctacgacacaccgggtgtgatgcaacccgaccaaatatctcccctgctcaccgccgaggagctggtaaagctgcagcccgccaccatgatccgaccgcgcgcctttcggctgcggccccagatgagcatactactgggcggtttggccagattggatctgctggaaataacaagcccaaggaaacactttgactggctgaaggtgtttgtatttgcctcagagcatcttcccatcatgatagcagatacacaggaggcggaaagcgtgtacaaaagatacgtgggttcgccctttctgggtgttcccttcgctagcgagaacttggaggcccgcctgcgacgctggccgggattgcaatgcaaggatggggatattgtgctggcaagtgaaggaaggaacgaggaaacgaggcttaactgtgatattacgctcagctctgcgggctggatgggaatcctgctgccgggccactcggagtgtcgtctacgggcctggacaccaaaggcggcagggatttacagacgtgaaccggctttaatacctttagccgatcgattggttggcaagcacataaggtattccctggcctacaacaccgccaagccctttgtttacaaaaaataa

SEQ ID NO: 22725 - protein, 546 aa, DROSOPHILA
MDDYEFYQGAQEGGNKQGTPDPSLPASKVPCNGCGADLHCTNASLPGYIPSEIFRDRTQQELQTITCKRCHFLNHYNIALDVVVAPSTYVDTISRIQDKFALAIVLVDLLDFPCSIWPGMQNILGAKRPVFLVGNKVDLLPRDSNIYLQHIKDSLQREFIKHGGGNGLNIKNVSLISAKTGYGIEELITQLHKTWAYKGDVYLVGCTNVGKSSLFNILLNSDYCRPEASDLVRKATTCPWPGTTLKLLRFPILRPSNDRVYQRFKRLVSERSEKAEMEKERRAVARETGSAAAAQPVAPVGRTFDRRENLHDAFAMAGGSRPITTLNDRGKEYKEARWVYDTPGVMQPDQISPLLTAEELVKLQPATMIRPRAFRLRPQMSILLGGLARLDLLEITSPRKHFDWLKVFVFASEHLPIMIADTQEAESVYKRYVGSPFLGVPFASENLEARLRRWPGLQCKDGDIVLASEGRNEETRLNCDITLSSAGWMGILLPGHSECRLRAWTPKAAGIYRREPALIPLADRLVGKHIRYSLAYNTAKPFVYKK

SEQ ID NO: 22726 - DNA, 3931 bp, DROSOPHILA
agttgtcagttcgggatggaggatcctgttgcccagcgcggtcaccgagggactacgccgcttgagtatttcgcttatcgctacgcccaatatcggttattaatgtaagtctgagtgtaggtgtctaattctgcttcgccgtgcccgcggccgtggtggctgcggtggcagccgctatggcactgctgcccgttatcgagcccagccgggagagcgatggctcccgcttgggtggcacgatcggcttggttggtatggggggcggtgctccgcgagcgcccgctggcggcaccgtaaccggcggcacggcaatgggaacgggatgaggatgcggtgttgttgtctggtcgagggcagctgccgcagccagtgcggcatacttgccgccgggcgcccgctggatggtggccgtcggctgcatctttgccggagagggtgagggtggcgccaccatgggcacggtgaccgtagcagccgtctcaactgatgcagctactgctgcagctgttgctgctactccaatgctgccgctcgagttgctgttgctgctggtggtggtgttattcgtggtggttgtgatggtggtagtgtggttgagcacggcagttagtggtgctattgctgctgtggccgtgcccgtgggcgccgttgcgattccagcgctccggatgttctggcccggcgcaatggagcgggcgatgccggtctgtggtcccgagaccggcatgctgctaaccgtggctgttggctgcacgatcttggcgatgttcaccatggggggcgtggcacaggcgtcgtctgtaaaagcgcagagaaatgggattagcattcggcttatgacagctccgtaaaacactagattttcggatctccgaggcggattggcctaaccagaagcccatatagagctgcaaagccattgcagatgagttctgggaaggcctggcttgtgtggaaatgctttggcatggtcgtgaaaagtctacagacgccactggtgtcaattggctacgttctggcttttgtcagggtgctccaatcgctggggtgcgagcgtgcggggtggacgtgcgaatgcgtgatctttgggttggtgcaacgtgaggtgcacgaggaacatcacaaaacaaaaaacaaatcaccttgcaattgcgtaacattttttctaacaaaagatttcggcttcaagaggagttcgaaaaaaaagtaatatatatatatagagttaaagtttgtatatagaaaattataaggagggcaaccatatgtataattacaacagccagtttccaggtggaattgccttgtctggctaactcaccgctgaactgtcgcgccttggcggcggccacggatgagccgctgccacccagttgctgctgctttttcagagcctcgtgctcgctccgtagggcgttgagttcctgctccagctccttgaccctgaaaaatagacgtagaagatgatatagtttgttcattcgaacgtaacgactggcgtcgtgacgaaccggagttcctccttggctagtttggcaaacaggactttacgctcctgctccatggcatgcgtttgcttctccagttcctcctccatgcgcagcgactttttgctctcctcctcgagaccctcggcaatggtatccgagcgctgcttctcctcggccagaatttgggccagatcctccgatcgtttccctgtataatcccatagatattattgtatgagcaaagtggatatcttcatatcttatcttcatacggtcatacgcaccctcttcaatatacttcatgaggatctttttgcgctccgcaatcaacagcagcacaatctgcttttgtcgattgcgctcgtactcgagcgtctcctgcagcttcttcagatccttctccattttggccacctgagcgcgctcctcctctaggtcctgcttcagcttgttgcgctccaattccaggccgtaggtgatgtcgtcaccctgagccgtggtgttctcgtgcttgcgcttctcctcctccagctcctggagcatacgctgattgttttccagcgattcggtcaatatgttgaccatacgcacatgcgtggccctctgcttgctaaccatctgatactgctgctccatttgctgctcaatgatctggcgcacctccatctccgcttgcgccgcctgcgtagacgattcccttgatatcagattgccattgagtgcgatcttgtcccggaatatggccgcatacggatcgttcggctgcagtcgcttggtgcgcagctgtgcaatgagctgctttacccgctcgttcctcagggcggctatgcagacatcccgtgcctgcagctcgccctccaggtagtacagcatcttcaccagctcgctgtgcggcatctcggagcgcgtgcgtccgttggttgcggtagcactgctggcgctatttgccaccggcatcaccttgtgcaccacaccgggacccggtttcatggtctggaactcgtggttggcgctcacggtgtcgccgaccgacattccggatccggaacagttctcagtgccgtaatccgcgtccgtcgctggtgcctccgcaaacgtatccgcaacgctgctgttcgagttctgctccattgccgccgactctttcgtgtggctcccgtcccgatatccaatgcccaattcccgattccggattccgaactcccgatctccacctccgctcagctcacggcatacaaaaaaaaaagtttggtgcgtcgcagttcgcaaattacacggtatgcaagctctctgcaatatttaacttctggcccggactctgtttaagcccgctttcaaggcaagtggctttgcgcaagcagcaatcgccacaggaaattatcttacaatttctttgtcaatttgttgcccgtgaaaaagtggatacttgcggcagtgctgccgattcagctttattcccgtcagatctggcttagtcgcaggatagtgctgcgcatggcgggaagataagaacataaacgtctgttttttaattagtcagcattttcttaaatatccaaacgcactttatttgagttatatttttacactctttactatactgttaagttaagcttattgtatctaaaggtgctatgttcatgatatccaaaatccatgtagccataaacagcttttatcttttattaaaaaacggcagcaccgattatgtacgctgcgctgccaactcgctttaaaaaagagtagcgagtagccagtgttgcaaagcacgttaagcaagggtctgctttttggcgccgttacgggttttgaaactatatttaaatttataagttcataaatataatatataatagcacaaactttattataaaaatcggggtatgctgaaaataactaaagcggtgcaaattgctttagtttggtagaatatattattaagtaatttaaacaattgtatttatttacaatttataaacaatttgttttttattttttgtaaacaaagggcttggcggtgttgtaggccagggaataccttatgtgcttgccaaccaatcgatcggctaaaggtattaaagccggttcacgtctgtaaatccctgccgcctttggtgtccaggcccgtagacgacactccgagtggcccggcagcaggattcccatccagcccgcagagctgagcgtaatatcacagttaagcctcgtttcctcgttccttccttcacttgccagcacaatatccccatccttgcattgcaatcccggccagcgtcgcaggcgggcctccaagttctcgctagcgaagggaacacccagaaagggcgaacccacgtatcttttgtacacgctttccgcctcctgtgtatctgctatcatgatgggaagatgctctgaggcaaatacaaacaccttcagccagtcaaagtgtttccttgggc

SEQ ID NO: 22727 - DNA, 1549 bp, DROSOPHILA
gcagcactgccgcaagtatccactttttcacgggcaacaaattgacaaagaaattgtaagataatttcctgtggcgattgctgcttgcgcaaagccacttgccttgaaagcgggcttaaacagagtccgggccagaagttaaatattgcagagagcttgcataccgtgtaatttgcgaactgcgacgcaccaaacttttttttttgtatgccgtgagctgagcggaggtggagatcgggagttcggaatccggaatcgggaattgggcattggatatcgggacgggagccacacgaaagagtcggcggcaatggagcagaactcgaacagcagcgttgcggatacgtttgcggaggcaccagcgacggacgcggattacggcactgagaactgttccggatccggaatgtcggtcggcgacaccgtgagcgccaaccacgagttccagaccatgaaaccgggtcccggtgtggtgcacaaggtgatgccggtggcaaatagcgccagcagtgctaccgcaaccaacggacgcacgcgctccgagatgccgcacagcgagctggtgaagatgctgtactacctggagggcgagctgcaggcacgggatgtctgcatagccgccctgaggaacgagcgggtaaagcagctcattgcacagctgcgcaccaagcgactgcagccgaacgatccgtatgcggccatattccgggacaagatcgcactcaatggcaatctgatatcaagggaatcgtctacgcaggcggcgcaagcggagatggaggtgcgccagatcattgagcagcaaatggagcagcagtatcagatggttagcaagcagagggccacgcatgtgcgtatggtcaacatattgaccgaatcgctggaaaacaatcagcgtatgctccaggagctggaggaggagaagcgcaagcacgagaacaccacggctcagggtgacgacatcacctacggcctggaattggagcgcaacaagctgaagcaggacctagaggaggagcgcgctcaggtggccaaaatggagaaggatctgaagaagctgcaggagacgctcgagtacgagcgcaatcgacaaaagcagattgtgctgctgttgattgcggagcgcaaaaagatcctcatgaagtatattgaagaggggaaacgatcggaggatctggcccaaattctggccgaggagaagcagcgctcggataccattgccgagggtctcgaggaggagagcaaaaagtcgctgcgcatggaggaggaactggagaagcaaacgcatgccatggagcaggagcgtaaagtcctgtttgccaaactagccaaggaggaactccgggtcaaggagctggagcaggaactcaacgccctacggagcgagcacgaggctctgaaaaagcagcagcaactgggtggcagcggctcatccgtggccgccgccaaggcgcgacagttcagcgatcacgcattcgcacgtccaccccgcacgctcgcaccccagcgattggagcaccctgacaaaagccagaacgtagccaattga

SEQ ID NO: 22728 - protein, 412 aa, DROSOPHILA
MEQNSNSSVADTFAEAPATDADYGTENCSGSGMSVGDTVSANHEFQTMKPGPGVVHKVMPVANSASSATATNGRTRSEMPHSELVKMLYYLEGELQARDVCIAALRNERVKQLIAQLRTKRLQPNDPYAAIFRDKIALNGNLISRESSTQAAQAEMEVRQIIEQQMEQQYQMVSKQRATHVRMVNILTESLENNQRMLQELEEEKRKHENTTAQGDDITYGLELERNKLKQDLEEERAQVAKMEKDLKKLQETLEYERNRQKQIVLLLIAERKKILMKYIEEGKRSEDLAQILAEEKQRSDTIAEGLEEESKKSLRMEEELEKQTHAMEQERKVLFAKLAKEELRVKELEQELNALRSEHEALKKQQQLGGSGSSVAAAKARQFSDHAFARPPRTLAPQRLEHPDKSQNVAN

SEQ ID NO: 22729 - DNA, 3303 bp, DROSOPHILA
gaacatataaaaatttgtatttttagctaaatatatacttatatattaaatgtcatgttatagtgcaggttcagccgatttattaaacgaattatacaagcttacgtatttttaaagcaaattttgtgaggccctctgttggaacaacaaagccaagccggagtgcagagaaaaacatgaattgtagagttatacgagtagtcttatatagatacttaaacctctttgtttaggtataatcaatatgttcgcaacatgcgtaggttcaaaacactaatcagcatataaatagcgtctaacacatttttaataaaacaaaaaaattgcattatcattaatcaaacattaaaacaaattcttttgaaaacttttgaaatcaccagcagaatgtcatagtcttacctccgtatttacatcacctgattggatgaatgtattttccgaatccttgtgggtgactcccctcgtcttctgcgtttccactttccagaacttctgtgggcaactctcggttgtgcatactttacaaaagcgatagtaagaaagctttaagaccgcagtttttattaatcttgccattttgaagacagttggtccgttttagatacaatatacaaaaaaccaagatttccgtttatcgtaggcattgatcaagtcaaggtcaaaatatttttaaacccgtgtctagtcacaaacatcttcactttccaaactattataaagaattgcatacttgagggcagcaaatagcagactaacttatacatatgtatatggggacttttatttgtacataatttgctggcagtcaaaacaaagttatcaatttttcgcttgattaaagaaattggggacaaatcttggcttactgataagcgaatttaaaacaagtacagaaataatagatccgatttttttcaaaaatagaataagacgtacatatgtatttataacacagattcatacaataaggcataagagatttaagatatcagcagcatcatcgatctgcctggtcacgtggggtgaccaccaggacttcgtaggtgtttacgctcacctcttgaccatgatgcgggatgtacatgaccttgtgggaaggatgcaccttgcccagacgcaggataccctggtaaagaccacgacccgtgtaggtgacctcacccagctcggagtagcccgtgttcagagcatcccgcggatatgttccatgctgtccgggcacccacttgtagtcacagtcgttgagcaccaggatctcgacatcatcggtcagagttcgggcgctacagctgtgcgaaccgaaggcagccttcttttccggtacataaggagcaggcaggagatcgtcgtggtaatatcctctggccacatacgtgggcagtccgtcttcgttggtgccacactgcacagctccctcgggcggcaggtgggcatccggtaagctgtctctgtccagatcaatgggcacccaatccatggccaccttgggcaattcggtgtcatcgaactccggggcctcggcgaagtttaggtacaatcggtgcacgcgtcgtcggtcgcatgggtctctgcattgggggcaggtcctggacctattcagccatcgggtgaggcagtccttgtggaatacatgaccgcaccgtgaagttgagaaaattatgtcgttggcccggaaaaactcgttgcaaattgcacataaaatgttcagtgaaggtgatgagtcatttgtgggtgcagtttctgcgatttttccgccgttaccttccatttcactactattactctccataactacgtccctatggatactgagctttgaatatgtgtggctctattcttctgttccaaatttatttcacaacaatgagcggaaaacgaaacgattcgtatcaactttcctgctttattagagatgacctctggagaataccaaatatactagaaatactgttattttaataagtttgaatcttgattgaaaataatcctttaaatatcttatagcattaagtaagtaacatttatattaagtaacatttatattagcgtcttaatcataactctattttggctaagataatgtactgtgctatcattttgtggttatctactggatctttactttgtattaaagtagcgtttcaaacctgcaccagtacttcgttggtgccaacgttaacctcttgaccgtgctgcgggatgtacatgaccttatgggaagaatgtaccttgcccagacgcatgatgtccgtcctcgttagtgccgcactgcactgcttcctcgggcggcaggtgggcatccgataagctgtctctgtccagattcatgagcagagggtgctcgggaaaatccctgttattcttgtgagtcagaggacaggcttttaaccgggtacttctgcgaacaagttcgtcgtgaatgcacctgtggcccattgtctgttcgggaattagtttccgaatccggtatggcgatgggtcatttgtgggtgcttctcaattttccatttctttgctgttaccatccatatctgaatccctttacacactgagctttaaatacgtatggcgcacttgttttattttaaaattaacggatacgagctttatagagatggactttaagtagtgccagaaatactgttatttttatatttcgtaagtttacatggatctcaaacgcttataacatttaatttcaaactttttgctaatatttaggtctcaaggtttcagaacaattttgttttattttgttatagatttttactaaatagactaattaaagtgtatgccagttgttaaacaaatgtatttcataatcaggaagtcaaatatgtaatgtatatatataataaatttggattttatagctaaaaactaataaaaggttcacctgtgctcaataatagtttcaaatactgttcaggtcatttttaacacaagaatttataaatatttaaaattagctatcgataagtggcaccaggtacttacgatactcaaccgatctggcaacgacgcgcggtacgtggcttcgggacacggaaaacaattttacgggaaaagctaaacaaattatgtacaattcgcaataaatccgaaaagatatagggacaaacaccagacggagaagaggagcacaaaaggctgcatgaactgtaagtgccaaggaccagatacccgtttctttttctgcgttcacccgtatcctttcacttttaattgctaagttcaacatacaactacaaatggatattcagctgatttacagctagtgcggtttctcaatggctcaaa

SEQ ID NO: 22730 - DNA, 774 bp, DROSOPHILA
atgcccacctgccgcccgaggaagcagtgcagtgcggcactaacgaggacggacatcatgcgtctgggcaaggtacattcttcccataaggtcatgtacatcccgcagcacggtcaagaggttaacgttggcaccaacgaagtactggtgcaggactgcctcacccgatggctgaataggtccaggacctgcccccaatgcagagacccatgcgaccgacgacgcgtgcaccgattgtacctaaacttcgccgaggccccggagttcgatgacaccgaattgcccaaggtggccatggattgggtgcccattgatctggacagagacagcttaccggatgcccacctgccgcccgagggagctgtgcagtgtggcaccaacgaagacggactgcccacgtatgtggccagaggatattaccacgacgatctcctgcctgctccttatgtaccggaaaagaaggctgccttcggttcgcacagctgtagcgcccgaactctgaccgatgatgtcgagatcctggtgctcaacgactgtgactacaagtgggtgcccggacagcatggaacatatccgcgggatgctctgaacacgggctactccgagctgggtgaggtcacctacacgggtcgtggtctttaccagggtatcctgcgtctgggcaaggtgcatccttcccacaaggtcatgtacatcccgcatcatggtcaagaggtgagcgtaaacacctacgaagtcctggtggtcaccccacgtgaccaggcagatcgatga

SEQ ID NO: 22731 - protein, 257 aa, DROSOPHILA
MPTCRPRKQCSAALTRTDIMRLGKVHSSHKVMYIPQHGQEVNVGTNEVLVQDCLTRWLNRSRTCPQCRDPCDRRRVHRLYLNFAEAPEFDDTELPKVAMDWVPIDLDRDSLPDAHLPPEGAVQCGTNEDGLPTYVARGYYHDDLLPAPYVPEKKAAFGSHSCSARTLTDDVEILVLNDCDYKWVPGQHGTYPRDALNTGYSELGEVTYTGRGLYQGILRLGKVHPSHKVMYIPHHGQEVSVNTYEVLVVTPRDQADR

SEQ ID NO: 22732 - DNA, 20886 bp, DROSOPHILA
agcttcgtttggaagtacatccctatgcttgcaacattatataatgtacatattaagccattacccaaagcataactttcgatttcaagtattttgatctccatgaagtgtttgcatagctgccctggaaaaccttaaaccccgatgtgacacagtcgaatacgttgcgccacggcgatccgattgggtgttaatggaggaaaaactgtgattggagcctttggggattgggatcgggttcgggatcccattcgcagtttcaccttcgctcaattacggcgaccgtctgactgctgccacaaatgtcaaccgctgcggggaagctttctatggctgcaaccgtgttgcatatgctgaaaagtaaccaaaaataaaatatacgagaaaagaaaagactggagagacttacaactccatcggtcggcagtttccccattaccatttcggtgcgccaaatcgaatatttgcaatctccgactgcgtgggccgtgcagaaacaaaaggcagtcgcagttgcattttgcagcagctgggatcagcagttggatgtgtatgataaatctgtgtgccatgcattatatttcattgcttaataagcccggcaatctcggtgattcccccgcaagcccccatcatttattggcataagcggtggcaactggtttcggtcggcgggtcaaatttttatatacatatattgtatctttctttttttttttacttttgttttcctttgactcggcgcaactcgtgacttttcatatttatggggacagcaacaagtttttttgtgctttcgatcagagaaagagccacaaaattatatatatgttgtaattatatatatttaatttaattggtcattaagcttaaggctttaggcaaaagttcgctttaatctctttgctaaattgttattaatttcatactcagatatgtaaatcacccatccgtcgatacgatctggccccaaattttagtctatcccaatgcggcatcatcactgaaagtatttctgttttcggttaatcacagagatgcagagatacgcgcgcgtatctcggaaatactccgccgacctgtgcacgtcgcaaatattgttaatcgaacacccaacaagccgatcggctactgcgtttacacgcgctccttttgggggccaaaaggcagtaggggcgtcggctgggggggcagcgtcaggggtctggggtctgggggcagcggttggtgtcggtgtcgggggcatgttcacgcaagtaagacaagacgacgtgaccataagaaccacgaacaccagcacagcatatctttcaaactccaactcgaacccgaactcggtctcaaactgaagctcaaagtttggccgagagtttgcgaagcaaaatagtttgccaatttgaaatcccctttgctggcgatgcaggcactttggctatactcacatttgtacatatatgtggaatattttaaaaattatttaattagtttttagttactgtgaccttacttgtaaggtatttatcgaaaataagttggcttatcaaagtttataaacaacaaacttaagggtattttcttagtctgcgtgactccttcgaggcttccacgctttttcgccaactttttgtaatcaaacaccgagcagcgagtacagagcgctactgtttttggctaggagattgttgctgctgcatgttgctgctgctgctgcgcttgctgctgcatgttgcaagttgccgggcgtgtgtgcttgatgccttggcacgccccacagttgcgcatggtcaggtgggtgggccacgagaaggatggaggggctgtgcgttaattataaacgcattaggcccgtccaggaattagaattagaattagcttatcgcactccgctcacaccttgcgctcatgctcccctggtttcccttcccaacaaaatgctaacaaggcggagggaaaataaataaataaatatcgtaaataaaacgaatcgttatctggtcagagaatgacgccttagccgggctggaaattagaggaagagttggggatagggagacctgcaattaatcacagacaaccaaatgatcccgggctaatttacataattttatgagcaaacaaacaaatgagggttgcgaagcactgcagtggcgggggcaggggaaactggggcaagcattttcggggatttcgaagaagattttactgccacatattagccatgcccagagccctaagcccctgacccgcgaacttctcgaaatccaataagtcaagtgctagaaaggagatgatcaactgtcgttaaaagatttattgcacttcggaattcctgccatggtttcttcgctttcggactggctttctggcctggcctataaaaagcggcaacaaaaacaacttgaactttcgacacctttacgcggctgcaaagaaatgtgagcttggtgtgtgttctgaattggttttgcctttatttatttccactcgattttaattgccaaccacgaaccagctgaactctcgagcatagtgtaggattaccgatattaacgtctttcgacccggccctaatgcatttgccacagcccttggccgtaatgaagtaattaactctagaacagttccactcttcgccaatcgaatctgaccaagatggccccaaagttttgttgggggtcattagcaaaaccggatgactctacgccgtttttttttttctagttggttttgattctaagccaaccctttcgacagcgaaatagaccaatcaggtggcgatttggcgatcgagtggcgccctccgtgtggctcatgaatatcgctttaattgagttaccaagctggtcaaacatttggacccggcggtcccggtaatttgacagctcagtgatattaacgcgatttgacagcgacaatgatgtgtgttgtgcgtctgtgtgctcgaatcaaacaagacaaataaaccgacaatctgcgctctgccttttgtcaaccatccatcaaaaaaggcagcgaaaaacaccgaagaccgaaaaaaaaaaaaaacagaatacagggagaggagcagaatcagaggggctgcagcatcggcagcatcatccatgtattgtcaatgaaactggttttgtgttaacatcattccgtcactcaagccgcgtcttggtccactctcggccaaatacgcacaagcggctggctggctgactggtggacggcatcgacatcggcggtaaacgcatcgcagcgatgcgcttcgaagataataaccaatatgcaacatcaacaaccacacggcggcaacagcaacaacctgtgtaacgaccacgccaacaccaaacgccgaaccaatgcacagaaagaaatatgctaccaatagtcgaggtttgaagttggattccacttcttaaatgttacttttcttcttttatttatttgtcttacccttttcttcccgtgcacaaccaaatccaagacaaacaggctcgaaacaaacagacacaaagatatgtggcaagggaatgcaacaaacgagtgaaaactaatggaaaataatggaaaaatatatttacaataggcagagcccaaaaagaaccgctaaggagagaactgaaagaaagaggaaatttcttataaagatttgagtgacagtaaaatgaaatgacaaaaggaggggagagagaggaagaccgcggccatccagtgacaaacattagaaagctaatgaaagttaaccacagatacaaaataacaatgccatatccatacaaagaaatatttatgtagtgagatccacggataccgatggtgagcttgtatctgcggatacgtggattatcttcgtcgaatggttttagattctgggtctgggcgatgtgataaatcgattggggcaccacttgaaggttaccctcagccactttgcatgcaatatttgcatttgcatttgttgtgcgactcaattagaatatatagtttggtcagtgtgatggaagagggggaggggcgggggcagtgggtcgggggcactgactgcacacagtattcgcccacgcgaatcttttagccatgcgaaactagaactgcaactgcaactccgagtcgtcggccaaacggcgccagcaaaacacatgggcttgtgtgagaaaatccaagctaagtacagaaattttcaaatatatttatcttacagtggattttcgaattaaaaattatacagaaaaaggcaacaatcgtaatgcaaagttataatcaatattaaaatccttttgttaaaacttaaatcttatcttatatcagtgcctcctctatataactccacattgtagctaccttttcatgacaattcctgctttcccaatgacttaaaaaagttattgcacccatttactatttacttcggtaattgattgtcgtttaaaggctagcctcactgtacctgctgtgtgaattattttaaagacccgcaacatgcaataaaaaacgtacgtttaagtgaacattaaagctaacatcatccattggccaatgcaattacgaagcttttgtcgccgccaccggtcgcaaaatggtctcgaaaatggtggatgagggggtagtaattaccccagaacgtatctatctatggctgaaaatctatcatatacaatctataaattttcattatgcagatcgtagcgatggcaattgcttgtagttctgaaggtcagccggtcggcagtcaattacatggattggggtgcgacccaaacaactaattaaacagatccatgatcgctgattgtaattgaaagagcaacaaacggttccagtcagcgggcggtcaacagagtccacagagtctgcgattgagtttcggttggattactaaacatggttggtatctaagtattcctggtttttgaatacggttttatggatctggccacgcctctgctccgtcatatgcatttgcacagattactaatcgactctttgtcttcatttgatggcttcgggttttaattattcgagaaatggttttccaaaacagaccaggtcgcagcagatgagcagagttgagatgagagcccgcatatcttaaacgttccgttgtgttgtgatggtgtcttgagcccattttcaggtgtctgttaatttgtttctcctccctttgctggtctccaccgcccgttgggactgccttaaactcgtctgcgtccgtagttgaccctcttcgtctttgtttaacaacaaatgcttgacttggactgaggtgttaaagcttgtctccgctctacgggccgcagcgcgttttgagtttccattattattatttttttttttttttgggtttcgagaaccgctttccttcttagactagttcggctcgtaggctttataatttatgatattcgaatggtttctatgaaatgttgcatggtgtccagagattgccttagatttggggccaggcatgtcggattcggttagatgggcagctgaattggcttgaaggagggtcgctggctgggttgcatgcatttataattcaatcacgagcaattaactaggaaaatgcagtgaaaatgcacgcatagccaggcgaagaacaaaagacttaggcaacaaacttgaaatttcattagtttgcataaccgctccatctcttcagccctccctctttgtctctctttcttgtgcgtttttgacaaatttgtttgaaaattttcaaattgaaaagattcattcatcagcgggctgctcgcatcatcatcatcaaggtaggcaggctggcaggcaggcaggcaggcagaagctgggctcaggctatgtttaatggattccaacagccgtggccctgtcccgcagactccccgtctgtctttcggttttcgttttttcggtgtatacacctctgctgggatgaagctcaaaggtcccatgtgcgatctgacccattgtcgttataaattagcgcaatcaatcaactcacttcacctgattcggccgaaagagtgagagagcagcacaacaaaaagattccagactccagatttgagttttcagttttcagattgaagacaaacgcaaacaggttaccggagatgcagatagatagggccagcgagaggctcccaatgccatgtccgatagatcagaacaaacctagacaaatttcggcacttcgtcaatgtcaaaacggtggaatcattgaccagttttgttaaattaatcagcaaaatcgtttaatggtttcaaaataccagcgccgctagcgagtgactaaaatcaaaagatatgttttagctggaagtgttcggctccagcttcttatcggacttaccgcggagactctttttctctctagtttgcctatcagagtatctgactatcgacctttcatctctttcttcttcccgagccaatgttaacaagaggagactcccaagaaaaggcagttaagcatcgtctaggccgatccccagctctgggtatttttcaggtgtaaaatgaaagaaggtttttcatcagatcccaaaagtgccgaccataaatttcagcttgaaacctttttccatataattttccccatgcccccaagggttgcacttaaccgaaaagaagaaaagcgatttagactcagaactctccctttcttctcggccctgctggtcattgctattgtcaggattatgatatgatatgattcagttcgattcgatttgcccgctcagggctttctttttacgagtgggaaatgttttattttgatggcgttgtaaggtgttgcaactcgcgggcacaatgtctctcattatgcttgccacaaaggagctgactgttcggatggtcgagtacgtttatatgattccaggtcgctggtgcattgattttgtatatatattccttacgtagctgcaggtgcggaagcaatttgtttagaattttcgctgtaaacgcaccagcaactgctacaagttgctgagaggcactgcggacattaaataaaagcgaaaagagtaaacacacaacacgagaaaatattgcatgcaacaacgcggccgagctccgtcctcatataccataccataccgaaccataccacaccatatactatactatactataccatatagtaaggagtacggccgccagtgcttgtgagcatacaaatatgcaaattattgtgcacacagcgaccacgccaacaaccaacaacccaacaaccggcggacaacgacaacaacaaggaggaactggcagatttgtttgccctgccaggcagtggagaaaaactgaggcaacgacttgatcgccgctcaactagccaggatgtattggccaggcccgagtcaacatacggctgaaatatatgggcctgaacttgaaattttatagttggaaattagtttgcaggagtgggggtacaaagtatattcggaatatctaatatgcaagttatttgtgtgcccaacaaaaagactgtgattcgatcagtaaagtactacaaactatatttctttaaattttaatacattttgataagtttgatcattcatgttttaaaacctctcttattgcaacctatgtttccaaccaaatctttttctaccattcagttttgagcacaacaataaagttttaggatctgcaagcatggaatataagattaatgaagcccattatgttttaagtgaaaactggcccaagcagatttgaatggtcatataacttatatgtcgatcagaacgttggatgatgattcatagaattccagaacttttgacatccgtctacgaatggcaattagaagtgagggattagcattagtggcattacgatttacgttgccctagggcgtcttatgatctggtcgtaaagcgttttgatttcattcgccagcattaataagttcataaagctaagccgtagatgttggcacacttgtttggcgtttgcagtttttgggccataaactggagtaaactgtaaaatgtaaacaaagtcgcggttggtgggcgcacagatctgcgagacgatgcgttgtctcaggttgctctatgccggctcctacgttcctccgaccatctcaattatatggttttattatggtttcattctggagagatgccgagatcccgacttgtccagtccccccaagctacccagcaagctacattgtacggcccggagcgaaccgaaaaggtaagacgatattcgaaaatgggttttgtggccgggccagaagtggagaacgtgttaaagtcacaagttccctaacacgtctttaggttatttgatatatttattaaactagccgaacgctgcgctctttcactctgctggagttactttatctggcgcgtccgaaacgggttatcaaaatatctgcgctcagctgaagcgtgagttgattaactctcggctgtgccacattttttggtagttagcacacggggataactatccgccgagtggccatcgccatcgctattgccattgccattgccattgccatggccaagagcacctcctaaccggagccccacttggttcatttcatttttatttacgtgaactactctggtgtccaataaaatatacgcaccgaaatcagatgcaaaacgtgcgacagggaggcaagagattcccagcatcttgtcgctgagacacgcggacgcacttaatgagcagcgatcttaaatcttaaagtcagacaggggccgcggcgatgggctaagcaggggggttcgggttcgatggagacgttgtatccacaagagcgtgtatctcaggccccgatcgccagtgtgtgtattcgtatgctaacgtgtgtgtatgagagactgtgtggaaagtatctggaactggctctgtcggggcttcatctttctgcactcgagaatcttgggatcgggagaaccaagagacagcgaagtgagagaggcggctctcaaatgcttatgaagatattatgaaaagcagcacaagattcagtccccaactccattcgctggccatgtatatgtgtgtgtgtgtgtgtgcatctggaagtggagcctgcattatgtggcaagttccatctccgactccatctcacctgcaaaaaaagatcaatgacaatttattgtcatgactatgtaagttctcacaggcgcaggcgtgctcagatagccagatactcgtgtatctgcatctgcatctgcatctgttggatgcttttccatatttcaaagtgacattcgactggcgcatttcgttcggtatatttgtggtttattggttgtaaaggtaaaatgaaatctacttagtctggttccttagacaaatatcacacacattgttaacgctagctaggcttagtttatacagatacatttactgataggtaagcttaatactcatggatagagtctggcatttacaagataggtattctagtggatcaccccttaatactcggatctccttgggtcagtggcttatcgaatatgcttttaaagactcccaatgattatcatttttaagttttcaatttataaaataacaattttctagaacccctttataaaatatataacctcgacaaagccgctgaccccttgactactgcaatcccaatctaggtgaagatccacccactgctgtttcggtattaacagcttatcagtcgtgtttggggggcaagggctgatgctatcgattcattagctgccctggcacttctgcacctggcccagcacccgatcgatgcgctccaccaggattttcacggacttgtccggcagagaaggtaaaacatcccgcactccggcgctggtcgtccgctcgaagaggtcacgcagccggcgtcccgcacccgccgcccgcaaacgtcgcagggcgtcgattgtgggccgccggaagacgcacaggttgtcgagcaggaggctgtggtatgcctcgtacttcttcaacagccggtagccgtgcagcaggccgctttcgttgtccaggaagacgagcagctgcgaggcggactggcgggcaaggttgtgcgccggcgcggccatgatgtcggcgttccattgaaagttgtacaggttattaaccacgcgatcgaggttcgcgatcaggtaatcgaagacgattaaatcggaccattgtgccaattcaattagtcgctgcaccagcgctccgttggccgtttcggttcctgttcctgtctcctcaatcgcgtttgattgatgagcggagccgggcgaactggcagcccccaaccgcttgagtaatccgtgcggctgcgattgcgcttgcctttcggattgcatgtgccgcgtcaggttccagacgtcgtgtttgttgagatgccgctccagcggctgaaagggctgtggtatcccagccggctccagatcggacagccagcgggtcagcaccactggtcggcgctccttccactgcgcctgtgtaatgtcgcccagggcagcggcccaattgggcgtgctggtgtccaccacggtggcggcactcggggccagattgcttatgtttaagagctggcccaagtagtagctgaatatctcgccctgaatctgatccgtattctggcggtagcgggcacaggcccttgttccatccgcaaagaccaccatgcgattttgcattcttccgcatccctgctccaggcgaactactcggccctgctctccaacgaagcgttcccaagagacttggtccttggcggcgaatcccttgggcagagcctgctccacagtgggaccccaatagacgtcctcctcaataaatcccgcttggtgctcactggtaggatttgtcggcgaggtcgtcggagaacgagaggtctcttgtggctgcaccctttccggcatcttcttggacagcctcctctccggacccttgcgataacgaccgctggcggtgcgctgcacatggaattccttgatgctgccgtcgttggtgtccaatttcttcaccaccatcgagtccggagcatccttgtcctgctccagatggaaggcattgcggaatacctgctcggcactcagctcgtccgtctccttgatgaactccacgcggtagctgctcagcggctccacggcaaccatctgtatctgctcctccggcagatctggcggggagtcctggtggcggggcaggccgaacatgggcacaacaacgcccagtgccatgccaaagacgaaggcggcgaggatgctcagaaggcaggcgcgtcgctgcagcgaacggcgccggcgcagcgtcaacaaagtcatgtgggtggcctcgctggggttggattgcgaaatggagctgggattgggattagcccgatgctcgggcgctgtgatcacgctgcaggtgagttgctgttgctggccgctcaggtcaaggcccagtggttgctgtgcttgctgtagtttctgttgtcccgcttccaggcgcttgatgtcgtacattttgccggcgggccgaagatcccgatccctagttccctgtggaagcccagacctcaggctcaaagttcaagccgctcatggagggcggcgatggaagcgaaaggggtggtggtactggattgcagtattgctgtggtgcctcacaaaatcgtgaaattaatttctgtctttgtttaataaatatcggtggttcgttctcggttgctggcttcgtcctccgctcctcggttagcgactctcggcggagaccggttcgaatttttcctctacgatttccacaattgaaattgaaacaaaaacccagaaacgtgctcctcctgctttagctccttgatcgctcgctgatcgtcgctcgtttatttatttttatactctccgctggaccgcgtcgctttttcgcgtttttttttttttgtgttgtttttgtcagattttttttcgggttcgagttcgttttgagtttgggggtttggggtttgggtttatcgatctattttctgcacgatcacttgctgtaattttttattatacatttttgtgctggccgtttgtttgtttgtttgctggcgttgtgagcccggcgggctaatattttgcgagatggctagctggcccttcggccaaacgaaccgaacagtttctctttttgtttttaatttctggacttgagcagttggcggagcgattcggtgcgccgataaaagcaatttcgtggctctgagctatttgccacaccagctaaccgctaacacacactcgcacacacacactctggcacacactttaacactttggtggggttgcttcgcactcgaattcccagattcccgatattcgcccgataattgcccgcgccgagcaaacaacgcgacaagtttgtgtgtgtgcgctggtttgtttgtttgtacgtttgttggccgagggagaggacaaagtcctaggctccgctttttaggctttatcaatttaatttcttgtctcgcaccttggccactccactcggcggagcaccttcgacttggctgcgaatcgcttttatttggcctcgctgtattttagcctttttgtccgcattcgatcttcgtcgctgcgcaccgaacgatgtgaggaatttttatgcctccgctttatttatttcgctgtccatacatatgtttgcactccttgcctcgcgtctttttctcgttttgcaccgcgatatggttggtggtgcgaacgcgtgtttagattgtcgcactgtatctgaatcggaactaaaggtgttggtttctggcgtttgctatgctgacggatgtgcgactgcgcgcctgcgtaccgctcgcttcgagattcgctgacagactggccgacgagcggctctcgccggtcttagttaaagacacgcggccgactcgatcgtgctctcacaagtcgctctctctctctctttcttttgtggcttttgcacggatccttttcgaatcttgccggttttgagtttgagttgagtggaagccactgcgctctttgaatttaagctgcgctctatctacatggactctctctctctctctgccaagaaataatgaaatagttttaagcccgaaaccaggtgaattattttatccgactttaattcttaagctaatccttgggtgggtcttgacaaacaaatttacaaggaatgcccgaaaatggtgttttttttttttcaacacttaataaattaataattaactgtatagattaagttataggttttaagtacaaagctaactcccatattaatattatttagacagttacttttttaatgaccataagttttatgcgcattcacagtaggggcttcctataggcagaatcgttggcaacttcaaaatagccgccagtcaccttgatctcgagtcccaactcattgttggcataaatctttcccacaagagtgtagttagtatcgggtagatattgcggaatatcttgccagccaaaatggaatcgatttaccccatatgtggtgttctagaaatcaaatcaattaaaaaacgtcccaaagttgtaaagaatacaaacacctttttgaagggacacttgttgggaaagttgactacagctctgcgaagtgctaagtagaacattcccagcactgagcgcgattcggtatgcttcttcagttgacaaaagtccaatcttaggttatttatcctcgttatctttttctgactctttggacagagtttgacttcgcaagctccaaacaccttgtcagcatgcttcttttcgccaaaggtcaaaaagacagtaaattccgtccgggaatacagctgacacacaacctttgagatgacactgctcttgattgcacactctatggtatcaaatactatgagctgtggaaaggggaaataagataagctatcataaagaccaaattatgttaaatactataataaaaaaatatatgctttaaagcatgatgatgccttacctttcttggttccccgccggcaagtgaaatagccataaatggagctaaagcaaaaaagatgtggtatttgcgacacattttactaactaaagcgagtaacgcctgtatttttctataatgcatatgtaatggagcactttattgggcaatttcaattgaaatcagattgcacccacaattattaaaacccattcagctgaagcgatctattctatttccactcaaaatacacgtgcgtattatttgacatggccatgtagaagctcatgtatatttacactatggattttcactcaatttacctgagcgacgaaaacaccttttgagtaatgcttgaattcagagagagggagagcgaagagagaggaagagcacattctgtgggaggctttttagagtgcgagttgtggctgcctctgttgattttaatgctcaaagcggcacatttgctgcgccacattaagaaactagaatttgccttaaagagtggagcagtgtgaggagccaggaaagggttacgattacgatagcgtagtgggaaaaccgctcacgagcattacaaggaactgccgcccggaaaagctggatcctgaaatcaaaacaacatttttatggcaatcctaaaaaacgtaaaacatgaacataactaagttaaatcaacaaacactttaaagtgagtcgaggcatctttttatgtaaatgaggacggtaatgtcagctaaataaggataagttgcagaaattcccaatcgatttaatttgatatattcaaaaatttactcttagcaaaatcagcttttattattgataaattaccaaaatatatcaaatggtagattgtctctagtgtgaagtgttatcttatttccttttttaatgggctggaatataaatagttaagaagcacccaatttaaatattttagagaatggaaaatatatcttgtcgctggattaaaacgttttggttgttatgaccaacgtgtgagaaatagagtggaagaacagacccctcaggattatcatcattattccgaggagacaaaaaggagaagggagagtatttcagagacaaacgaaatacccaaggagtgaaccatccaaaagaacgaaggcagaaagaagagaagaactgaagtaggaatacgatatttaaagaatcgacaatacgatatccactaatattctagatctcttagatgaattagttaaaatataatgcatagaaaatcaacccaaaatgcctatatcaataacatttcctctgattaacttgacacttttagagatcagctttatatcgtttatgaccagaaacttatatttaacatctaagagcccattactgctaacactgagccataaaactgataccaaacgcttatagagggacatgaaaattataattattggctatcttaagggcacgactattataaatttgaagaggctctgaaacgccctgtattgatatgctaaataaatatttaaatcgatattgactgtttgtttgtatccgaaatccatatgccccttactgccgcaaataggaggtatgaaaacagttggaaaaaatatgatcaaggaatgtagacataacttgacagcgtgcttagagaatttctactcgggcctgaggacagagtcgcgatctgagaagacttcgctccgaagactcgggagaatcgggaagacgcggctacggcagaacgaagataacaacaacttcagcccgctgcattcttcagtgtctgcgtgagagagagagagagaacgagagaaggagagagagagagtgagtaaacaggtaaaagatacaacctggttttgactcagaattgggctcacgattttcggttgcagtttaatttaataaagtgagagcatgttcgggcctaattgaatttgcagtgttggcgcactgatcgaaccagaaatcgtcggtataatacgccagcaaacaaaacataaaaaccaatggatgaaatttccattcgaaaccgcacaatgcacaagttaattatgcgccaatcgaatttgatgtctttttgaaaaagcatttaagttggattttgtttgtgaatcgaacactatcagtggagcgccatcaattgggaatttcgccgctaaaagtcgtctcggcaccattttgatttgttgctatttgtgtggctttttatttgccaaatgccccgcagtaatgtgtctgttgaaatcgtcagtttaagtcaaattaattaacattaatttttgtggctcgtttcgaggcatgaaaacaaccgggtggctgcgctcagctcagctcagctcttttctttggatgtgtgtaaaattaatgtctgttttgatgataaattggaactcgttgaagctatgttttatagatttcatttccaactggctcttgccaatatggtgggaaccaacgaaccgctggtggtcgcgttatagttattttgtggccagcgccgtgcccagaggttaatcgaattaaacaaatacctgacagagagctgaactctttgaaaaatgatctattatgaaacgagcgtataactgtgccctgtcttctctgattgcctgctgatggctgcctcggccaagttcgttgcctaagtctttcgttgtgggaaacacacacatgcgtacgcaagagacactttgcggcggcacagctctcgttttaattatttgcaggctgcgtataaatttcagacgaaacgaacagccaaagaacctccaaaaaataaagcaaagaaacggggaaacacactgaaatgaaaactaatttaaagtcgagttaacggtttggaaatgaaaaatgaatcggtcagaggtgagcagatagtgaaaaaatattgttgaatgtagtatgtggcgctcattaaattgtaatgtgttgagattatatattaaaagtataattttcgttaatgtattttaaaaaagataataaactaaagtttacatactgtaatagcttgtgataatttatatatattatatataaaagaccactttaaatttattttttgcccggtgcagaaactgaaacggaaagcatttggcgaagtttgttaagcgcaaattcctcggatgtttgcagtgcgcaacaatttggaacattttgttgaacacaagaggagcaaacagagagcagccagcggaaaaatgaagtaaaaaaaagcgtcggacgtcgccttgtggtcaacgaaagtgaactgtgaaggacatgaaacacgggctgatactccgccgcctcctttcgctcccattggactggacaatcggaaactagatggaactcgagtgttagctgcctttgtttgctctgctagattccagaccactcatcctagacccagacgctggcgtcgtcgctgacgatgacgacttggacgacctcaagaggcaggaactcactcactgcacccagtatctgctgtatctgctttatctcctggcacctcgccctgggatatcgtcacgggccgtcagcgcctccatccacacaggtcctagtcccagccgcacttgagctcggcatcaaccgcatcatccagagtcatagtcacagtcgcagtcacatccatatccacatcgccatcatcgccacttgccacggactgtgcctgcgacctcgactgtcgcgccatcaacttggattgggtctgttcaagcatctccgcagacggcagggcacagtggttccagggatattagtttttacacatgactgccattaaatctcacataaggattcaaactactacttgcccagtttgacaaaatgatgttatatatcatattgtaagccattaatgtaatataccatagaaatgaagccactgtttcgggtcagaatcagatttgcagccagactcagggtctgtggcttagtactaggtgccagggcctgacctgagttaaacaaattcattaaaaactcgtcactttgcgcagatcacgctgacttggcacatcttggctgggggcccatccatccgccatccattctcgatcctcgttctctggctgcagtcctccacattcatgctgcatcctcgtgttgagcaccaagtgtgttggtttttggctctggcctgtgtttctggccaatgaagtgccggccacgttgttcaattttgcagttttagggcgatggaaggacccttttgggagaccaaagacaatattttcgtagcatcccttgacagtgtgtttgcacttcctacggcagagcctttcgttctactccgcatgtttgtattccgtttcgaaaggcacttcaatcaacttgatctccagcacaccggcgatcctcgatcctcgagcccaaaccactggcatttctcttgagaaagccaaagctccaaacgcgataagcggcggtggcagttgcatgcttcattgacatctggtggctgcggcatggagttagcaagcccggctctaacggcggctcataattgtgggacctcagcctggcagagataggtttccaggaagtacgcactgtgtgtgcccgccgccgccactgatgccgcccgttgatgtcgccaccaaatcagcgaattccccaaacgcatcgccaccacactccgttcctcttaacggatgactcagactggtttcctggggatgtgggagggtgcgatgggaagatgggcatgggatgggatactttgactttccctttcaccagcaatatgaattggccgccatataaacgctgtagtatcgcccatatgcgcacgcatcgatccactgtcattccccgtttgctgccaccgaagatatcgctttgctattccccttttatggctgaatggaagtggaaccctggactcggatgtggtctcaaacccaagacccagacccgaacctgaacctggatcgtcgccgcagacagaaaaaaccccgaatagcgggcatacaaacgcgcctgtaattttaaggcccaagaccggagaacagagaactcggatctcagagctctgaacgaacccaagcccaaacccatacccaaaccgaagaccccggcccaagacaggccaagtatgacgatgatgacaaacaaggataccaaactcagaatactaaggaattctttgggataattaaaagcacttaagtaggaatttttttcgtctctctttcattctgtctctctctatccttttgttttttctgactgtctgtcgcagttttgctccctgttaaattaatataattttatatatagtatatatattatgtacgcgggccaaggatcgatacataggctgcaaaggattgctaattaacaaatagccatcaaggcattgatgttatatctttgagggttttgtcttgcaaaaaataatggtttcgaatacattgattgaatgtctttaaaataacaaaagtaaagctattagtatagtacgtaattaatcgaatactactttatgacatcatttttttttcgatttcttatttaatttttatatgtctgcgaattgagctaattgagaaagcaattcaagattgtaagttcaaaagtcaagatcgttgttaatgtgggagtgctgttgttaatgtgattgttcacaaattgctgcggtcattcggttccatcaaaacattaaatttttatttcattatttgttttgcagctccaatcgctggctcatgcaaattcttgccggcattgcggattgtgaaatgcttttagctgatattcaatattttgccttcttttctgcattcaaggcgaacttcaacttcgtcggaacggggactgtgactcgggtgtgatttgtgggcatttcgcgcagagacacttcatttatcaccttcgctggagcggcatcggattcgctttgagtcccggtatcggtatcgcaggcagccttgaccttgacgaaagatttcgcgacgaacccaaaatctgtccgagatctcggggaacccacggcgcgagggtgatcccaacaacattttcgcccggcgacggcaacgagaataaacatttatttgtgcggtttcgaattggcctgggttttggattttgctttgttttttttttttttgctttgttggtcgcctgcttttggccttattaatgatgcaaggcgcgataatgacgcatgcataccagaccaggtcccataatacacaaatgctaagtgcttccgattcagccccccactccagttccccttcttcgtggcctccgtggtaccggctactatcttttctaggagctgtggcactgccacaaaatgccaggaatggtgttaagcacgattaattcatcgacaatccacctctcctccgtgccacccgaaccattccaatcccattcccataccatcctcgttcagtcgatgtgctcagtgtcgaaggcgagcgctaaataaataaatgaattaatggccaatgcatgtgcggtgcagaaaaatcaattaaataaaatacgaaatacgtatacggatacgttaaacatgctgccgcggagaagcgaacgaggcaagtggcagcagtggcagcaacaagttgcagccggcagttaatgtgcggctacactgaaaaaatgcacgtctttaatccgacttttaatttgctttaatccgttgcgtggtaaaataaggagcgcatgtttttgatagtccaaaaacttaattcaattgcttattattggtgaaaatgaatcttcttttcaaaaaattgttgtttgcttctctcagtgaatctttgtgtggcagtttgggcccgactatgcagatgcagacgccgactgctgttcgctccttggctaacttggttcaactggcactggacctggcacagcaatattaaattgttacgctttggacaatttgaacacgcgcaggcgcaagaaaacaacagcaaataaagaaaataaatctaaaaaaaaaagaataaaaattcagtttaaaagaagagcggcaggagagatccaaacgcaatcgcagat

SEQ ID NO: 22733 - DNA, 3420 bp, DROSOPHILA
atgttgttgggatcaccctcgcgccgtgggttccccgagatctcggacagattttgggttcgtcgcgaaatctttcgtcaaggtcaaggctgcctgcgataccgataccgggactcaaagcgaatccgatgccgctccagcgaagggtccttccatcgccctaaaactgcaaaattgaacaacgtggccggcacttcattggccagaaacacaggccagagccaaaaaccaacacacttggtgctcaacacgaggatgcagcatgaatgtggaggactgcagccagagaacgaggatcgagaatggatggcggatggatgggcccccagccaagatgtgccaagtcagcgtgatctgcgcaaaacccaatccaagttgatggcgcgacagtcgaggtcgcaggcacagtccgtggcaagtggcgatgatggcgatgtggatatggatgtgactgcgactgtgactatgactctggatgatgcggttgatgccgagctcaactccatttatggctatttcacttgccggcggggaaccaagaaagaccggcgagagccgctcgtcggccagtctgtcagcgaatctcgaagcgagcggtacgcaggcgcgcagtcgcacatccgtcagcatagcaaacgccagaaaccaacacctttagttccgattcagatacagtgcgacaatctaaacacgcgttcgcaccaccaaccatatcgcggtgcaaaacgagaaaaagacgcgaggcaaggagtgcaaacatatcgacgaagatcgaatgcggacaaaaaggctaaaatacagcgaggccaaataaaagcgattcgcagccaagtcgaaggtgctccgccgagtggagtggccaagggaactagggatcgggatcttcggcccgccggcaaaatgtacgacatcaagcgcctggaagcgggacaacagaaactacagcaagcacagcaaccactgggccttgacctgagcggccagcaacagcaactcacctgcagcgtgatcacagcgcccgagcatcgggctaatcccaatcccagctccatttcgcaatccaaccccagcgaggccacccacatgactttgttgacgctgcgccggcgccgttcgctgcagcgacgcgcctgccttctgagcatcctcgccgccttcgtctttggcatggcactgggcgttgttgtgcccatgttcggcctgccccgccaccaggactccccgccagatctgccggaggagcagatacagatggttgccgtggagccgctgagcagctaccgcgtggagttcatcaaggagacggacgagctgagtgccgagcaggtattccgcaatgccttccatctggagcaggacaaggatgctccggactcgatggtggtgaagaaattggacaccaacgacggcagcatcaaggaattccatgtgcagcgcaccgccagcggtcgttatcgcaagggtccggagaggaggctgtccaagaagatgccggaaagggtgcagccacaagagacctctcgttctccgacgacctcgccgacaaatcctaccagtgagcaccaagcgggatttattgaggaggacgtctattggggtcccactgtggagcaggctctgcccaagggattcgccgccaaggaccaagtctcttgggaacgcttcgttggagagcagggccgagtagttcgcctggagcagggatgcggaagaatgcaaaatcgcatggtggtctttgcggatggaacaagggcctgtgcccgctaccgccagaatacggatcagattcagggcgagatattcagctactacttgggccagctcttaaacataagcaatctggccccgagtgccgccaccgtggtggacaccagcacgcccaattgggccgctgccctgggcgacattacacaggcgcagtggaaggagcgccgaccagtggtgctgacccgctggctgtccgatctggagccggctgggataccacagccctttcagccgctggagcggcatctcaacaaacacgacgtctggaacctgacgcggcacatgcaatccgaaaggcaagcgcaatcgcagccgcacggattactcaagcggttgggggctgccagttcgcccggctccgctcatcaatcaaacgcgattgaggagacaggaacaggaaccgaaacggccaacggagcgctggtgcagcgactaattgaattggcacaatggtccgatttaatcgtcttcgattacctgatcgcgaacctcgatcgcgtggttaataacctgtacaactttcaatggaacgccgacatcatggccgcgccggcgcacaaccttgcccgccagtccgcctcgcagctgctcgtcttcctggacaacgaaagcggcctgctgcacggctaccggctgttgaagaagtacgaggcataccacagcctcctgctcgacaacctgtgcgtcttccggcggcccacaatcgacgccctgcgacgtttgcgggcggcgggtgcgggacgccggctgcgtgacctcttcgagcggacgaccagcgccggagtgcgggatgttttaccttctctgccggacaagtccgtgaaaatcctggtggagcgcatcgatcgggtgctgggccagatctgtgcgcccaccaaccgcgactttgtttacattttacagtttactccagtttatggcccaaaaactgcaaacgccaaacaagtgtgccaacatctacggcttagctttatgaacttattaatgctggcgaatgaaatcaaaacgctttacgaccagatcataagacgccctagggcaactgcctctcagcaacttgtagcagttgctggtgcgtttacagcgaaaattctaaacaaattgcttccgcacctgcagctacgttgttgctgttgccgccgtgtggttgttgatgttgcatattggttattatcttcgaagcgcatcgctgcgatgcgtttaccgccgatgtcgatgccgtccaccagtcagccagccagccgcttgggatttcaaattggcaaactattttgcttcgcaaactctcggccaaactttgagcttcagtttgagaccgagttcgggttcgagttggagtttgaaagatatgctgtgctggtgttcgtggttcttatggtcacgtcgtcttgtcttacttgcgtgaacatgcccccgacaccgacaccaaccgctgcccccagaccccagacccctgacgctgcccccccagccgacgcccctactgccttttggcccccaaaaggagcgcgtgtaaacgcagtagccgatcggcttgttgggtgttcgattaacaatatttgcgacgtgcacaggtcggcggagtatttccgagatacgcgcgcgtatctctgcatctctgtgattaaccgaaaacagaaatactttcagtga
